United States Patent Application Publication US 2017/0114356 A1 - sequence listing, part 122

SEQ ID NO: 223633 - protein, 264 aa, Zea Mays
MEHVIGGKYKLGRKIGSGSFGELYLGVNIQNGEEVGIKLEPVKTKHPQLHYESKVYMLLQGGNGIPHLKWYGVEGEYNVMVIDLLGPSLEDLFNSCNRKFSMKTVLMLADQLINRVEYMHSKGFIHRDIKPDNFLIGLGRKANQVYIIDYGLAKKYKDLQTHKHIPYRENKNLTGTARYASVNTHLGIEQSRRDDLESVGYLLLYFLRGRALKLALRNKSMIKLVKRKCLPRQRFCANLTRRSSSHISTIVAPCDLKTGQITLQ

SEQ ID NO: 223634 - protein, 329 aa, Zea Mays
MEHVIGGKYKLGRKIGSGSFGELYLGVNIQNGEEVGIKLEPVKTKHPQLHYESKVYMLLQGGNGIPHLKWYGVEGEYNVMVIDLLGPSLEDLFNSCNRKFSMKTVLMLADQLINRVEYMHSKGFIHRDIKPDNFLIGLGRKANQVYIIDYGLAKKYKDLQTHKHIPYRENKNLTGTARYASVNTHLGIEQSRRDDLESVGYLLLYFLRGSLPWQGLKAGTKKQKYDKISEKKMLTSAEILCKSYPPEFVSYFHYCRSLRFEDRPDYSSMKKLFRDVFIREGYQFDYVFDWTALKYPQMGSNNKLVQQPSARMAGVGPSVERTDKASIAF

SEQ ID NO: 223635 - protein, 249 aa, Zea Mays
MEHVIGGKYKLGRKIGSGSFGELYLGVNIQNGEEVGIKLEPVKTKHPQLHYESKVYMLLQGGNGIPHLKWYGVEGEYNVMVIDLLGPSLEDLFNSCNRKFSMKTVLMLADQLINRVEYMHSKGFIHRDIKPDNFLIGLGRKANQVYIIDYGLAKKYKDLQTHKHIPYRENKNLTGTARYASVNTHLGIEQSRRDDLESVGYLLLYFLRGRFCANLTRRSSSHISTIVAPFLLSDPANVTIVLACTMIRC

SEQ ID NO: 223636 - protein, 676 aa, Zea Mays
MAAEALGAMRSRYRSAAIEPLRLRLSNPSDSGCGRYVFRNLISAMLLAYMHMESGEENLQEKVQEGGKVNLTEKVQEGGEENLTEKVQEGGEENLTEKENEGIVEVSKPPQRRRKDPVADPSSLESSGFMRFRERRNASAVQEQGPKKRRITEDSNMCHQCQRNDSGRVVRCQGCVVRKRKYRYCVKCIKRWYPHLSEDDFANNCPVCQNNCNCKACLRGDITRANSRKKKKLLQINSGGYSVSEQDKIKFSMRIVHFLLPWLKQFHQEQMQEKSAEAATKGIDADKLEVPLTICGKKERIYCNNCRTSIVDFHRTCNKCNYDLCLQCCQELRRGLVSGNDAKVDGGGKQDFLSGVSHDKIISKGPSDGQNDMLIDSVVPGENNTSSLRQWSVNKDGTIPCPPNAFGGCGSSLLELKCLFKEKFIAELLEKANSALNNEMEVKIEGSKCPCFTESGDMDDGISRKSSCRENSCDNYIYCPTATDVQNGSLDHFQEHWLKGEPVIVRDTLALTSGLSWEPMVMWRALREKKEKVERLSVLALECLGWCEVDVNIHMFFAGYSSGLVGPDDLPLLLKLKDWPPHSSFEERLPRHGAEFMSALPFREYTDPKWGPLNLAVKLPDNVNKPDLGPKTYIAYGVSKELGIGDSVTKLHCDMSDAVNIQFCVCFLALICNSQQ

SEQ ID NO: 223637 - protein, 69 aa, Zea Mays
MGQQSLIYAFVARGTVVLAEYTEFTGNFTTIASQCLMKLPASNNKFTYNCDGHTFNYLVEDGFSLLLYF

SEQ ID NO: 223638 - protein, 799 aa, Zea Mays
MMVFIAQEQRCLRRLWISDRPCWTISFMSEIKRRRIYIKLVESTRSEDFSESKIITISFLYATMPVWLLFFALGISSDKEVFDMIDMQDCDASVINTISATIKESDKLCEDFRKSDKARQYVDELVKSSRFPPAESFDDYIARFLFPDISGNRNKALFLGYMVKCLLMAFTGKRKCDNKDDFRNKRLDLPGELLGRELRAQLRLAEKRMVKAIQRDLNSDRELQDLERYIDASIVTNGLNRAFSTGSWCHPYKRAERCSGIVATLRRTNPLQMMSDLRKTRQRVAYAGKAGDARYPNPSYWGKLCFMSTPDGENCGLVKNLAVTAIVSSRVMQPLIESFISCGMSKLNDIPTEHIQRMDKIFLNGNWVGSCENSASFVFRLRCMRRSSLIDPQVEIKRDKHHNEVRVFTDAGRILRPLLVVENLNKIRKPKGRSFSFHELMQQEIIEFIGVEEEEDIQCAWGIRHLFESEGAISSYTHCELDPSFLLGLSCGIIPFANHNFARRVLYQSEKHSQQAIGYSTTNPHIRVDTLSHQLYYPQRPLFKTVIADCLGRSDYASFGRKNDFARPEYFNGQNAIVAVNVHQGFNQEDSLVMNRASLERGMFRTEHLRSYKADVENKDGTKRLKLKEKIDFGKTESKRGRVDNLDDDGLPYVGASLQTNDIVIGKVSESGEDHSIKLKHTEKGMVQKVLLSANDEGKNFAVVTLRQVRTPCLGDKFSSMHGQKGVVGFLESQENFPFTHEGIVPDIVINPHAFPTRQTPGQLLEAALGKGIACKGTMRYATPFTTASVDVIAEQLHR

SEQ ID NO: 223639 - protein, 234 aa, Zea Mays
MSPRWPRLPSSSSTANLTGPQMSPLVLLLLAHLLATATAAGAARTRDDGPPAPSSSSPRVPATTPPWPDQFHAVVVTNLSARGGGLQLIDLYYDWPRGRDLNIVRDQLSGERRWSWNVEWSNGTAFLFDSASCRTFQFAVGLLPPDWKARGAAYLGRDRVDGFDCHVWSNFVFARYYEDVATGRPVSWNFNGLQRHVLSFEAGAVLQDSSKWQAPAYCFTNTNGSSADAAASSS

SEQ ID NO: 223640 - protein, 69 aa, Zea Mays
MGLSDQDIVALSGGHTLGRCHKERSGFEGAWTTKRPTSSSPNWGMLMLKWSISWSGTQTAACMDSCDSG

SEQ ID NO: 223641 - protein, 160 aa, Zea Mays
MSLDVLVDVNFVIYSCLIPGCSATISTYGSTCTFSESILGSCGFHTGLFTSPHLMDVRERFQLDGENFEVLLVVLEQVEAYFRFLALLAFKIFSAEQVDVAILEVGLGGKFDATNVVKAPVVCGISSLGYDHMEILGDQILFLVINLVSINGLILLAKLG

SEQ ID NO: 223642 - protein, 144 aa, Zea Mays
MEGDPACGLALADEEAECSSWDSDDEYQKFIQNMNPPRVTIDNTSCPSAIVIHVLTNLKLIVTKAYISSDGGWFMDVSTDEGEAKAQEHGAMFMETSAKAGFNVKHRHSISQQELLHSIPIQHRQAFHFTQLIGGGKNIHQETS

SEQ ID NO: 223643 - protein, 391 aa, Zea Mays
MLLAFVTLLLVLATRPAQCHQQSYDVVRNFHAAADGKTDDAKAFLAAWKAACSDEARPVVVVPGGRTFLLSQVTFQGPCKSPITIQLDGRIVAPNRIWTTQPANLLVFHGVDSLTLDGNGEIDGRGAIWWDCYNHKRCNARPILLAFSFCDHLRVTRIRLTNSADKHMTLFRCSQALVDGVSIAAPPDSPNTDGITVASSNHTVISNCSIRSGDDCVSILSQTRNVTVTRSTCGPGHGISVGSLGRSESAVVEQIVVTNCSFVGTMNGVRIKSWQGGKGYAKGFLFAGLNMTGVQYPIVIDQFYCPQGNCPVKPGGVAITDARFIDIQGTSSRQEAIRLLCSQSVHCHGIYLSNVNLSWVNHTAPSNATILNAHGTTEGVVVPKIQFLQPL

SEQ ID NO: 223644 - protein, 94 aa, Zea Mays
MGVLYYMVGRYAESRSSFESAVAKLRASGERKSAFFGVLLNQMGLACVQLFKIDEAAQLFEEARAVLEQECGASHPDTLGVYSNLAAIYDAMGR

SEQ ID NO: 223645 - protein, 302 aa, Zea Mays
MSLSIHQESKWRQQEVTDERFVDIPEEVIDVYKLWRPTPLIRARRLEKLLGTPAKIYYKYEGTSPAGSHKPNTAVPQAWYNAAAGVKNVVTETGAGQWGSALSFASSLFGLNCEVWQVRASFDQKPYRRLMMETWGAKVHPSPSTATEAGKRILEADPSSPGSLGIAISEAVEVAATSADTKYCLGSVLNHVLLHQTVIGEECLEQLAALGETPDVVIGCTGGGSNFGGLAFPFLREKLRGKMSPAFRAVEPAACPTLTKGVYAYDFGDTAGLTPLMKMHTLGHGFVPDPIHVGFGTMEWHL

SEQ ID NO: 223646 - protein, 69 aa, Zea Mays
MTTAPTAAVGVGGMLADVSEDWWTLSSVGGRSRYAEGEKRRSQRTSSSSNRRLSSSRMSLKSSDMAWAN

SEQ ID NO: 223647 - protein, 164 aa, Zea Mays
MVKAGKPFKQSGKSSKDQKETKSSKDSKEPKPSKDAKQPKPSKDTKEPKPPKVSKSPKDSKEQKKATLKDPKKAPKDSKGLKKALKDPKEQESLEDPKEHTAKKAGKRVTFAEVEPEKELKASNSDWHPSSDFHAAYPEQNPWASGFMIFEDENSYWNRGPLDC

SEQ ID NO: 223648 - protein, 505 aa, Zea Mays
MPQGKSKKNVVKEKAKKIKKNAESRAKVHENTDQIEINIREGVSIWITKAAVQKCFEFPPGTDKKLPIDPTTKTFDSLYRVLSVSEKKINVKKKKMKENMKEKQVEEEKIEMNMEEKKQNLVEDEGSQQEESEEEDGEDGEIGEEEGEDGAIGDAKVGGDGDKESAKRGGIKVAVRRNVLTPLNINLMLQNINNDEILKLLVKRNEDTDGTEPNLDIDLIVRCFFAVSSVAEFGKDKKKLISGCTTVLMVVFLDHLVENPLDPLTIPRINLYTSDFIADLIMVPKDSPGPEKKRRKFKNSEDTCYHEDSEMVPSPGRASPVVASVQSHKNFVDHADLEIVPSHENSVDLHSVYMAHVLERSRQSIVVDILDYNIPESTFADCLLPTGHMHTDVFYLQCQLLSKDWKDKVILSWKATQELIHQDIGVKELDKELTAEVMNKVDLVCALFYITVEFFQIDSRVCAFFRYLFLSFMPVTGPLLFFPLPNKRHISLTPTQGTVGWPRMF

SEQ ID NO: 223649 - protein, 645 aa, Zea Mays
MIALNDHGKAVESLTNSIREMKKKLSNLELVMEELDNVKNLMKAAMVEIEENKKSTAAALKLMENELQKLKGSTKVKPRNMAQCFLLLALIGCVMFHVPCHFLESTVVLLLSVESDVDFGRTHGRRACHFHEDPRAEPRVTFMRYSVGFLIRVAFGYIELCSSNLCWVSGFHVDFWEDPRSEARVTFRSLQRCVLNASVMFHVPCHFLESTVALLLSVESDGRMLILGGPTGEGCVPFMRYSVGFLISVAFLQGVEFQGPMLIFGRTHVLESTMGLLLSVESDGQMLVLGGPTGEGRVTFMRYSVAFLQSVGFQGPMLIFGRTRGFHVDFLEDPWSVVRVTFRSLQCCVLNASVMFHNPCHFLESTVGLLLSVESDGRMLVLGGPTGERRSHVDFWQDPQSEARVTFRSLQCCVLNTSVMFHVPCHFLESTVALLLSVESDLRMLILGGPTANAGFPKRHGQFELALGMPPLCPSQTPWSIDGDVAGHEVAYQLVTRNTQAARRHVEITALTVPTFWGSGHCPEPLVILRKGSTVACYGYPRSHSSSMKRATNWPGKIWRRGDRMDGRQERAKKSWRLGEKMVALGAMGTEVRMVAAVENEATATSRLIVVVRGHGAEHLPEKSRLIRLKKVGEESAQHFTRSSD

SEQ ID NO: 223650 - protein, 245 aa, Zea Mays
MDRAKVHENTDQIEINIREGVSIWITKAAVQKCFEFPPGTDKKLPIDPTTKTFDSLYRVLSVSEKKINVKKKKMKENMKEKQVEEEKIEMNMEEKKQNLVEDEGSQQEESEEEDGEDGEIGEEEGEDGAIGDAKVGGDGDKESAKRGGIKVAVRRNVLTPLNINLMLQNINNDEILKLLVKRNEDTDGTEPNLDIDLIVRCFFAVVLDRLLLPQATFYLSSATLKAVTDLDRLKTVDWSILFSKI

SEQ ID NO: 223651 - protein, 831 aa, Zea Mays
MDTPTRVLPPAGQIRSINVTPGRLTDGLLPLPMMNMGPDLSRVWSWFVVPCRLDACRHTTAKQLFEEMPSLSSLLSGSNTASAELPLIPCKLCNGVVIERVSKQPETTSRKFYRCRAKKTDGFVSGDRRLELLMIALNDHGKAVESLTNSIREMKKKLSNLELVMEELDNVKNLMKAAMVEIEENKKSTAAALKLMENELQKLKGSTKVKPRNMAQCFLLLALIGCVMFHVPCHFLESTVVLLLSVESDVDFGRTHGRRACHFHEDPRAEPRVTFMRYSVGFLIRVAFGYIELCSSNLCWVSGFHVDFWEDPRSEARVTFRSLQRCVLNASVMFHVPCHFLESTVALLLSVESDGRMLILGGPTGEGCVPFMRYSVGFLISVAFLQGVEFQGPMLIFGRTHVLESTMGLLLSVESDGQMLVLGGPTGEGRVTFMRYSVAFLQSVGFQGPMLIFGRTRGFHVDFLEDPWSVVRVTFRSLQCCVLNASVMFHNPCHFLESTVGLLLSVESDGRMLVLGGPTGERRSHVDFWQDPQSEARVTFRSLQCCVLNTSVMFHVPCHFLESTVALLLSVESDLRMLILGGPTANAGFPKRHGQFELALGMPPLCPSQTPWSIDGDVAGHEVAYQLVTRNTQAARRHVEITALTVPTFWGSGHCPEPLVILRKGSTVACYGYPRSHSSSMKRATNWPGKIWRRGDRMDGRQERAKKSWRLGEKMVALGAMGTEVRMVAAVENEATATSRLIVVVRGHGAEHLPEKSRLIRLKKGTASPILMSKVTWCRSAGVKKKANMPQGKSKKNVVKEKAKKIKKNAESRYSLGSVTKLIQLLPPAAR

SEQ ID NO: 223652 - protein, 174 aa, Zea Mays
MKCDPGEFWCHVSEIALHDRKPAPSLPLASNVGIAREMSQVPKKAIPLFPKADDDKSKESKCDVEKPAATESSKPKVSLEETKDPEKHEVDVGGTDDDESDEDFVDSEEGESDDDESTKSKNRPSSLTLEDTSREKGKDHNTVCGQKKPAEKCYIRSQTCIAHSSFPWHWNLNL

SEQ ID NO: 223653 - protein, 222 aa, Zea Mays
MVCIRRFVACSSLVFVLISGIWIVIFITHKNPCCSILYSILALFLSTNVVWMSCMQHVQEFLNYAKFVSWWVSLGVASSIGLGSGLHTFVLYLGPHIALFTIKAVQCGRIDLKIAPYDTIQLKVGPSWLDKKCSEFGPPVYPASAHSVRIPVFDLLPQIQLEAVLWGIGTALGELPPYFISRAARLSGSESKAVQELDAATSKEDGPVASSLNRTKRSKSTL

SEQ ID NO: 223654 - protein, 52 aa, Zea Mays
MLSTSAATTTTPHRETTTVGQGAQSRGAVTCPRLPCCLDAWHINKKSTSLEG

SEQ ID NO: 223655 - protein, 52 aa, Zea Mays; identical to SEQ ID NO: 223654

SEQ ID NO: 223656 - protein, 52 aa, Zea Mays; identical to SEQ ID NO: 223654

SEQ ID NO: 223657 - protein, 122 aa, Zea Mays
MHHRPSGFSTPRRVRKRPPAPPLEAVAVPPAPERAPVRRGRAHAVVVRRRLARPWHRWWGRRCHGRLLLPPPDCAVRRQRRQPWMAHASRLQKGDAIGSSTSYKTDGAEEWNRVLAFSDGGR

SEQ ID NO: 223658 - protein, 376 aa, Zea Mays
MRVLLNAILVQIVKFEVKPNRFSALKETSVKDYQNFNFRQPYSQASYYVSLILGDKKWPVAEKLEALSKLESDYFAKFVPHLLSKTFLECYVQGNIEPSEAKSIVEEIENTIFTTPNSLFKSMSPSEYLIKRVIMLENDLKCYYQTEGLNQKNENSSVIQYIQVHQDDAILNIKLELFSLIAKQPAFNQLRTVEQLGYITSLSLRSDYGVLALQVVIQSTVKDPSYLDVRVDEFFKMFESKIYELSDKDFKRNVKSLIDSKLEKFKNLWEESHFYWGEIEAGTLKFDRVESEVAMLRELKKEEFIEYFNQYIKVDAPQRRTLSVQVFGGNHLVEFKKAINEANPPKMYRITDIFGFKRSRPLYSSLKGGPGRITMD

SEQ ID NO: 223659 - protein, 792 aa, Zea Mays
MAAAAVAAAGSSNVEFIRARSDKREYRRVVLANALEILLISDPDTDKAAACMEVEVGSFSDPEGLEGLAHFLEHMLFYASEKYPGEHEYTKYIIELQKHFASKDHPYHKFSTGSWETLETKPKARGLDIRLELLKFYKNYSANVMHLVVYGKENLDCIQGLVERMFSDIKNTDQRSLKCPSHPLSEEHLQLLVKALPIVEGDYLRIIWPITPSIQFYKEAPCHYLSHLIGHEGEGSIFHIIKELGWAMNLMAGECSDSNEYSFFSVSMRLTDAGHERMEDIVGLIFKYLHLLKEDGVHEWIFNELAAINEMEFHYQDKVRPINYVMRTVSTMRLFPPEEWLVGAALPSKYASQRINMILNQLIPETVRIFWESKKFEGSTSSAEPWYNTPFSVENVTPSVIQEWIEKAPTEKLHLPKPNIFIPKDLSLKEVHEKVTFPTVLRKSPLSQLWYKPDMLFSTPKVHIIIDFHCPLSSHSPEAVVATELFVDLLVDYLNAYAYDAQIAGLFYSIYVTSAGFQVSLGGYNDKMRVLLNAILVQIVKFEVKPNRFSALKETSVKDYQNFNFRQPYSQASYYVSLILGDKKWPVAEKLEALSKLESDYFAKFVPHLLSKTFLECYVQGNIEPSEAKSIVEEIENTIFTTPNSLFKSMSPSEYLIKRVIMLENDLKCYYQTEGLNQKNENSSVIQYIQVHQDDAILNIKLELFSLIAKQPAFNQLRTVEQLGYITSLSLRSDYGVLALQVVIQSTVKDPSYLDVRVDEFFKMFESKIYELSDKDFKDLLDQKDGKLWVKK

SEQ ID NO: 223660 - protein, 589 aa, Zea Mays
MHLVVYGKENLDCIQGLVERMFSDIKNTDQRSLKCPSHPLSEEHLQLLVKALPIVEGDYLRIIWPITPSIQFYKEAPCHYLSHLIGHEGEGSIFHIIKELGWAMNLMAGECSDSNEYSFFSVSMRLTDAGHERMEDIVGLIFKYLHLLKEDGVHEWIFNELAAINEMEFHYQDKVRPINYVMRTVSTMRLFPPEEWLVGAALPSKYASQRINMILNQLIPETVRIFWESKKFEGSTSSAEPWYNTPFSVENVTPSVIQEWIEKAPTEKLHLPKPNIFIPKDLSLKEVHEKVTFPTVLRKSPLSQLWYKPDMLFSTPKVHIIIDFHCPLSSHSPEAVVATELFVDLLVDYLNAYAYDAQIAGLFYSIYVTSAGFQVSLGGYNDKMRVLLNAILVQIVKFEVKPNRFSALKETSVKDYQNFNFRQPYSQASYYVSLILGDKKWPVAEKLEALSKLESDYFAKFVPHLLSKTFLECYVQGNIEPSEAKSIVEEIENTIFTTPNSLFKSMSPSEYLIKRVIMLENDLKCYYQTEGLNQKNENSSVIQYIQVHQDDAILNIKLELFSLIAKQPAFNQLRTVEQLGYITSLSLRS

SEQ ID NO: 223661 - protein, 634 aa, Zea Mays
MAAAAVAAAGSSNVEFIRARSDKREYRRVVLANALEILLISDPDTDKAAACMEVEVGSFSDPEGLEGLAHFLEHMLFYASEKYPGEHEYTKYIIEHGGSYNAYTSSETTNFFFDVNVDNFEEALDRFAQFFIKPLMSQDAVLREIKAVDSEHKKNLLSDGWRMYQLQKHFASKDHPYHKFSTGSWETLETKPKARGLDIRLELLKFYKNYSANVMHLVVYGKENLDCIQGLVERMFSDIKNTDQRSLKCPSHPLSEEHLQLLVKALPIVEGDYLRIIWPITPSIQFYKEAPCHYLSHLIGHEGEGSIFHIIKELGWAMNLMAGECSDSNEYSFFSVSMRLTDAGHERMEDIVGLIFKYLHLLKEDGVHEWIFNELAAINEMEFHYQDKVRPINYVMRTVSTMRLFPPEEWLVGAALPSKYASQRINMILNQLIPETVRIFWESKKFEGSTSSAEPWYNTPFSVENVTPSVIQEWIEKAPTEKLHLPKPNIFIPKDLSLKEVHEKVTFPTVLRKSPLSQLWYKPDMLFSTPKVHIIIDFHCPLSSHSPEAVVATELFVDLLVDYLNAYAYDAQIAGLFYSIYVTSAGFQVSLGGYNDKMRVLLNAILVQIVKFEVKPNRFSALKLRESYGLLSPL

SEQ ID NO: 223662 - protein, 491 aa, Zea Mays
MDRLTVMAPPLLVLLLLLLSRCSAAASRRGGGWWEEGEGEWRPSEEEEKGKGKGRGLFLLHRVEKVVESEGGQVRVVRGQPWPPASFACREGLMHIGFITMEPKTLFVPQYLDSSITLFVQRGEAKVGYIHKDELVERKLKMGDVLHIDAGSTFYMVNPGKGQRLQIICSVDASDSLGFGPPYQAFFLGGAGDPASVIAGFGPKTLTRAFNATYDELARILLPRTGGPIVYYTADAEPESGAAEEERGQVDGHDGVLDRGARREGAGAWVPGGRGDGGDECGGSDDAREATWWWTKLVNRVVGGAAGGGGAAEANRKGKKKKGGAPEPYNLYDSEPRGSGTRTEEGLLLGSMLAPHVNPRATEYGVELGGEGTVQVVFPNGSLAMSEVVRPGDVFWIPRYFPFCQVAARAGPFEFFGFTTSARRNRPQFLVGASSVLRTMLGPEIAAAFGAREKEFSKEARARHRKVFLLLLLRLVSDRVVGFFFRGAVYK

SEQ ID NO: 223663 - protein, 346 aa, Zea Mays
MSGRKNAGKVSPWLLVLICLGCFFVTYNLLTMPSRGRDGPRKFLGGGGDRHSTASLGSGSDSDPAKRFHVALTATDALYSQWQSRIMHYWYKEMRDRPGSDMGGFTRILHSGKPDGLMDEIPTMVVDPLPEGKDQGYIVLNRPWAFVQWIQKAKIVEEYILMAEPDHVFVKPLPNLSHGDEPAAFPFFYIKPTENEKILRKFFPEEKGPISNIDPIGNSPVIIKKAQLEKIAPTWMNVSLKMKEDQETDKAFGWVLEMYAYAVASALHGVHHSLHKDFMIQPPWDLKTDNTFIIHYTYGCDYSMKGQLTYGKIGEWRFDKRSYLQSPPPRNLSLPPPGVPESVVAV

SEQ ID NO: 223664 - protein, 359 aa, Zea Mays
MATLNPFELLGADDNDDPTQLIAAAAAAAQKAEAKKSAVAPAGKAAQPAATTKFPTKPAPPSQTVRDARGGGSSARGGFGRGERGRGRGGRGYGQNRGFSGDNGNEFQGGYGGGGYGDGAVTGGSEGERERETRPPYRGGGRRGGYRNVEFADDSERPPRRNYERHSGTGHGYEMKRDGAGRGNWGTATDELIAQDAEDSPKMEEAAPVAEKQGEQNDAPAADENKDNKDATANEEEEKEEDKEMTLEEFEKIREEKRKALLALKAEERKVEVDKDLQSLQPLSNKKENDEVFIKLGSDKDKKKENAERDERAKKSVSINEFLKPAEGERYYGGRGRGRGRGDRGGFRGGYGGGYSRGR

SEQ ID NO: 223665 - protein, 143 aa, Zea Mays
MMSVNATVRLRFRNRGTFFSLHVTATPFLLFYGDLTVATGEMAEFYQPRKSGRTVTVSVVGKQVPLYGAGASLHSKPNNGRLGPAVVPVRLRFVLRARAHILGLLVKSKFYRRVRCGLDIREAHLGRPARGVASGCDYHDGMR

SEQ ID NO: 223666 - protein, 279 aa, Zea Mays
MAAAGGGREATTSGCGLKRRYAPHDQEEETMNQDQPSKEDRCGRIWSGIDLLKDVTENKHVLPTGLEGIDRLLGGGLRQGQLTEVTGPSSSGKTQVCLHSASHAPVKHTGVVMYLDTSNSFSPSRIATIIDGTNDLSDQKGFDLLSKERLKTVMQSIICESVFDIFGDGRRICLLIIDSISSLLAPIIGGKYPQGRSMMISLAMILKKLAYEHNLAVLVTNHMVSAGNGAVKPALGESWKSVPHVRLMISREHSSNICTGTVLKHTLLASGRTAKFVLP

SEQ ID NO: 223667 - protein, 205 aa, Zea Mays
MTAGRGIVHSEMPAGPGTSRGLQLWVNLSSANKMVEPGYQEIQSKDIACTSDGDGGVTVRVIAGHAMGVRSPVRTRTPTMYLDFTVRPRGAVRQPVRASWNAFAYVLEGEGVFGAERCAPVGAHHLLLLGHGDGLEVWNKLPDRPLRFLLVAGEPIGEPVAQLGPFVMNTEEEIDMTVNDFECYANGFEKARHWKSQAMLALGVE

SEQ ID NO: 223668 - protein, 536 aa, Zea Mays
MARRLLSRGRLIKLDRPILPAALTRLLSRGPPTPTTSEPEDKGKKAAAVLVEAVATNHKKDAEVGRDGSEEDDEDTSPPWRSWRPDVAWLSKALEPALDLYKQYSWKPFASSGRVENIPASTRTFSEILSDLQRSKISIKDWSLSDLTIGLYLIYLSQASSKNSEAFKGVQISSNKMVQELIYHLELARGCYKGNAAGLARYSMLRKRNVVKFVKDSSILRPGYYIGIDPRAKLVILGIRGTHTVYDLVTDLIALSDKKVSPKGFSTHFGTYEAARWYLRHELGIIRKCLEKHKVRSLKQDYELRLVGHSLGGASAALLAIMLRKKSKEELGFSPDIISAVGFGTPPCISKEAAESCASYVSTVVLQDDIIPRLSAASLARLRNEILKTDWVSVLEKEDLKHIVDIVTNAKLVVSSIQDVARKLGDYAKIVSPSTNSGVTKDPTNSTEMATSISRNDVFVPEDLFLPGTLYYLQRDIEDINDVEEESYTLWKGDPGENFQRILLSGNLISDHRCESIYYALREVLKTLPPPRTLDE

SEQ ID NO: 223669 - protein, 294 aa, Zea Mays
MASRTKIYMVLEFVDGGELFDKIVNSGRLGEDEARIYFHQLINAVDYCHSRGVYHRDLKPENLLLDSHGTLKVSDFGLSAFAPQTKEDGLLHTACGTPNYVAPEVLADKGYDEILEDEWFKKGYKPPHFEQGEDVNLDDVDAAFNDSEDRLVAEKREKPESMNAFALISRSQGFNLGNLFEKEMMGMVKRETSFTSQCTAQEIMSKIEDACGPLGFNVRKQNYKMKLKGDKSGRKGHLSVATEVFEVAPSLHMVELRKTGGDTLEFHNFYKNFSSELKDIVWKAESDASMKQTK

SEQ ID NO: 223670 - protein, 211 aa, Zea Mays
MAGYLPFDDANLMRLYKLICHATFSCPPWFSSGARKFIKRILDPNPDTRIKIAEILEDEWFKKGYKPPHFEQGEDVNLDDVDAAFNDSEGFNLGNLFEKEMMGMVKRETSFTSQCTAQEIMSKIEDACGPLGFNVRKQNYKMKLKGDKSGRKGHLSVATEVFEVAPSLHMVELRKTGGDTLEFHNFYKNFSSELKDIVWKAESDASMKQTK

SEQ ID NO: 223671 - protein, 686 aa, Zea Mays
MLEQPKDSSINGASPGIRDRKLLVEVFPVKMSATLQGHSLTLSGPDDASQLTIDLLGCTVAAVSASNLPSRKWAKRYPIKLESKESGICRGSKVCYVYADTSWEKESWCKALRLASTTDKDKLKSHEMLTQEFRSYMSSLKAGYPSFLGPSTLSSQEHVLVDNTVKNDGPSKLRGFLKRLVGKKASAKASQESKTGPAPSKQDTSQPSTPSSTMSFNSQLPASPSAKVDEKLADDGTLCWNLLISRLFFDAKMNDEMNKAIRARIQRTLSNTRTPAYIGEITLTDLNLGKLPPSLHRMRVLPLDLDESWAFEVDFECSSGILLHIETRLEVQAPELEKDIMKTDIRGNPNGDASSDFLDSIEQYGNQFGPSEVSDFAAEVNDEADTLRKSKSAGWASTYMSRWRSILNSIADQVSQVPLSLAIKISSVRGTMRIHLKPPPGDRVWYGFTSMPEIEWELESSVGDRKISSSYIASLIGNRIKILVMPNCESFPISWMIADTDDWVPRRIAPFIWLNREPADRRAADTTREMMPGEASTSKAIAKNKSSPLPSTKRITNGSWNKTKIRVDGQEQEQAEASTSSQSWLVSANGDATREQLRMPLLSSSGDERAGPVEEQQASPSAAEEEGDAKKRKRRARVMDLGRRMGDKLEEKGKRFVGKMRENARNNRLLLPDLEQATTPPAPAPS

SEQ ID NO: 223672 - protein, 433 aa, Zea Mays
MEANGAVDLEVDIIGPGSEDGARPSEISDIEVDSPFCRYPSNCDAAALLDAAASDNSDRLLKKKKVTDHWRKYVSPLMWRCQWLELRMKDLQSQVSKYDKELAVLKHEKELQTKMIELDCSSSRSVPFSSLCCRKTMKRRRRKRNEDKIDTSSYISNHTVLSYFEKMEADGHSIEDNANLVDDNTKANNDADWLLGIEGGDTTVEQILLSIQAAQDRVFSLRSNLKQAMARKNKGITLKINTSVIGTHSSNCSPGKGKVAGLHERSPQDTSECDMDDSGMPDSALSSYGEASNMDIFESTMSLLSEGPHQMGEFRESSEDVLIDNQAAEEGYRNFEVISHPSKRLRVSVKREAGPHSEDESVAPVVGVKREETHEEATTSFSLHGAFLKPCFTGKRQERKPKKQMKRRRGGPTAAAAALISWRSKRIRKKKQL

SEQ ID NO: 223673 - protein, 353 aa, Zea Mays
MGGPGRPWHRHVFLVVSLQLLLVAPWQDETAARALNFTRQDFPRAFVFGAGTSAYQYEGATDEDGRSPSIWDNFTHAGRMPDKSTGDLGADGYHKYKGDVQLMSDTGLEAYRFSISWSRLIPRGRGAINPKGLEYYNNLINELVKRGIEIHVTLSHLDYPQILEDEYHGWLSPRMVDDFEAYADVCFREFGDRVRHWTTMDEPNVNSIAAYDNGAFPPGRCSPPFGFGTNCTAGGNSSVEPYVVTHNCILAHAAVAALYTRSYRAEQQGVVGINIYTFWNYPFSPAPADVQATQRSLDFMIGDGQPVGVWRLPSSDEEDSRVPPSQVHQAAVGDGPRDGGFHWHKPLHLRVRQ

SEQ ID NO: 223674 - protein, 229 aa, Zea Mays
MVNPLVYGDYPQVMKRIVGSRLPRFTKRQSEMVRGTADFIGINHYTSVYVSDRPNDAAADTTGPRDYNADLSATFRFSRDDPATGQFVPINMPSDPQGLQCMLEYLSQTYNNIPVYVQENGYGALFNDSIHDHERAEYLSAYMGSALAALRNGANVKGYFVWSFLDVFELLAGYYSRYGLYHVDFQDPELPRTPKLSALWYSKFLKNEIDIIENVVSDTDDARSHAAEQ

SEQ ID NO: 223675 - protein, 118 aa, Zea Mays
MEKVVPSLPLHLLAVCLELGQGPDLTYVLRGIRFLHSLSDLASRHTRLEQVLLDDVKLSEQVMDLIFFLLSILAEQKENNNVGASPLVHASLVAGSLHLLTNYFSSQWHELVHILLAH

SEQ ID NO: 223676 - protein, 703 aa, Zea Mays
MAGGDGDRHRAPKRHKSSTPSKAALVDESAEFDYADDFDDDAHDADTEVKKRDFTKLELKVDHASRPLWACADGRIFLETFSPLYKQAYDFLIAIAEPVCRPESMHEYNLTPHSLYAAVSVGLETSTIISVLSKLSKTKLPREIIDFIHGSTANYGKVKLVLKKNRYFVESPFPEVLSTLLRDEVISRARISPEDSLGAPSFTVSKTSGQIASGHEDLLNGMEIAAATEDKETHSFEIDPSQVENVKQRCLPNALNYPMLEEYDFRNDTVNPDLDMELKPQARPRPYQEKSLSKMFGNGRARSGIIVLPCGAGKSLVGVSAACRIKKSCLCLATNAVSVDQWAFQFKLWSTIKDENISRFTSDNKEKFTGMAGVVVTTYNMVAFGGKRSEDSEKIIEEIRNREWGLLLMDEVHVVPAHMFRKVISITKSHCKLGLTATLVREDERITDLNFLIGPKLYEANWLDLVKGGFIANVQCAEVWCPMTKEFFAEYLKKENSKKKQVLYVMNPNKFRACEFLIRFHEQQRGDKIIVFADNLFALTTYAMKLRKPMIFGATSHAERTRILYQFKNSPEVNTIFLSKVGDNSIDIPEANVIIQISSHAGSRRQEAQRLGRILRAKGKHQDRMAGGKEEYNAFFYSLVSTDTQEMYYSTKRQQFLIDQGYSFKVITSLPPAEEGPNLSYYTLDEQLELLSMMAPFTSTNRR

SEQ ID NO: 223677 - protein, 1057 aa, Zea Mays
MEPGLASRVARSAAQPLSGCLSRHSLSPWLKIQNHIYPMPSLCHKVPSTGKCHASMTTSYMETSDVTDLDWENLGFGLIETDFMYVAKCGTDGIFSKGEVLPFGPIALSPSAGVLNYGQGLFEGLKAYRKTDGSILLFRPEENAIRMLSGAERMCMPAPTVEQFVDAVKQTVLANKRWVPPTGKGSLYIRPLLIGSGAVLGLAPAPEYSFIIFVSPVGNYFKEGLSPINLIVEDKFHRASPGGTGGVKTIGNYASVLKAQKIAKGKGYSDVLYLDAVHDKYLEEVSSCNIFVVKDNVISTPAIKGTILPGITRKSIIEVAQSKGFKVEERLVCVDELINADEVFCTGTAVVVSPVGSVTYMGKRVEYGNQGVGVVSQQLYKSLTSLQMGNVEDWMGDNSRDDLNRETNRSRCQCHWHSGWYGTQGKASASYPVHAGWHSGWYGNWYPGKVSPSSRLQQSLRARGENSNSQRSALILSLRCSAPGSPHQRSLPEQAMKLKINKACDLGSISVLPPRRTGGSGGAGGAGSSAAPVAAGSQQRSQPMSQHSFSQGVVGSGGASSLLHSQSQLSQASLDENLLTLHLASPARDQRFGFHDDLSKKMTSLPVSSASCVREESQLQLAKTSSNPVHRWNPSLPDGRSVGPTEDVERKFQHMASSVHKVGMVLDSVQTDVMQLNRAMKEATLDSGSIQQKIVLLDALLQKNLKGQDDLKALVESNTKSISDQLTVLNSYSNKLDEISSTLSILPKQIETNLKQQQSDTFRIFRKDMEEIVRAVRSLNNKIDAIQMPTDQSCTTNGRPLMNQLPVDRNERPQVNQTPEVTRVSQTPVATMANQRPVAKGRHLVSQTPAANGKPLTNQTSVANGRSLMSQVPAANGKPLTNQIAVPKGRPMMRQKTAEGGRPQMNQIPVADGWPHTNKIHAPEVRHPVPLVCPAAGPRPKVEEGKLRAVPQKLTGCRSRVTPKQEEAATNTKVVVGRAAATEKVVIFIDDDSDDGGSEALASCVILRPAPLGSGAGECDLVKVGAEESQEILRRARKRRRREMQAIVACMPPELGY

SEQ ID NO: 223678 - protein, 873 aa, Zea Mays
MVIVYNMNSSLHASKIVCFNNAGIYVVCHFAFVHFILQEGLSPINLIVEDKFHRASPGGTGGVKTIGNYASVLKAQKIAKGKGYSDVLYLDAVHDKYLEEVSSCNIFVVKDNVISTPAIKGTILPGITRKSIIEVAQSKGFKVEERLVCVDELINADEVFCTGTAVVVSPVGSVTYMGKRVEYGNQGVGVVSQQLYKSLTSLQMGNVEDWMGDNSRDDLNRETNRSRCQCHWHSGWYGTQGKASASYPVHAGWHSGWYGNWYPGKVSPSSRLQQSLRARGENSNSQRSALILSLRCSAPGSPHQRSLPEQAMKLKINKACDLGSISVLPPRRTGGSGGAGGAGSSAAPVAAGSQQRSQPMSQHSFSQGVVGSGGASSLLHSQSQLSQASLDENLLTLHLASPARDQRFGFHDDLSKKMTSLPVSSASCVREESQLQLAKTSSNPVHRWNPSLPDGRSVGPTEDVERKFQHMASSVHKVGMVLDSVQTDVMQLNRAMKEATLDSGSIQQKIVLLDALLQKNLKGQDDLKALVESNTKSISDQLTVLNSYSNKLDEISSTLSILPKQIETNLKQQQSDTFRIFRKDMEEIVRAVRSLNNKIDAIQMPTDQSCTTNGRPLMNQLPVDRNERPQVNQTPEVTRVSQTPVATMANQRPVAKGRHLVSQTPAANGKPLTNQTSVANGRSLMSQVPAANGKPLTNQIAVPKGRPMMRQKTAEGGRPQMNQIPVADGWPHTNKIHAPEVRHPVPLVCPAAGPRPKVEEGKLRAVPQKLTGCRSRVTPKQEEAATNTKVVVGRAAATEKVVIFIDDDSDDGGSEALASCVILRPAPLGSGAGECDLVKVGAEESQEILRRARKRRRREMQAIVACMPPELGY

SEQ ID NO: 223679 - protein, 125 aa, Zea Mays
MGRWLGKRLWQIGDQRPRGVGPLAVARVKGRAATAAQVGEEAATLARREAVVLVRPAAPSVAPTTSLKPTGARALGMWLSFVVEGGVEYGNQGVGVVSQQLYKSLTSLQMGNVEDWMGWTMQLNQ

SEQ ID NO: 223680 - protein, 276 aa, Zea Mays
MDASSFWEQQPLSARGYASSTIIPACHTVVDMSTNSRDLIERELAAFSQSLDNSLCRLPATPQALLEAVGSNGMTGSEALAAAEKHAALLTARAGARDPSAVPSICRISAALQYNFGTEGTDFGLASVLNSLEFCLKPCGSEASILEDLSKSINFVHTRRNLVENDRVLLNRAHRAQQEYERVANYCLKLAGEQEKLVSERWLPELRNAVQEARRCFDDCQRVRGLVDEWYEQPAATIVDWVTIDGQSVGAWINLVKQLHMEISRRTLAMSSVGDD

SEQ ID NO: 223681 - protein, 816 aa, Zea Mays
MMFSEFVEGLAGVQNLWCCPWNSCSNSRHQIFSDPQEYEAWRSRNLKLLEAGLLVHPLVPLNKSDSSVQRLRQIIRGAYDRPLETGKNSESMQGLRTCVMSLAGRSHDGTSDGCHWADGFPLNLHLYQTLVEACFDNDEGTVVDEIDEVMELLKKTWVILGINELLHNLCFTWALFNHFVMSGQVDIELLSAAENQLAEVAKDAKTTKDPNYCKVLSSTLSSIMGWTEKRLLAYHETFNTSNIESMQGIVSIGVSAARVLVEDISHEYRRRRKEETDVARSRVETYIRSSLRTAFAQRMEEADSKRSSRNPTPVLSILAKDISDLATKEKKLYSPILKTWHPLASGVAVATLHSCYGNELKQFVAGLTELTPDTVEVLKSADKLEKDLVNIAVEDSVDSDDGGKSLIREMPPYEAENAIANLVKVWIKERVDRLKGWVDRNLKQETWNPGANRDNFAPSSVEMLRVIGETLDAFFQLPIPMHPALLPDLTVGLDRSLQLYVAKAKSGCGARNSFMPQLPPLTRCEVGSKLLFKKKEKPQNLQVRVSQNGASNGNDPLGLPQLCVRLNTLQYIRGEFENLEKKIKTSLRNVESAQADITDGLNIKFELCQAACQEGIQQICETTAYKVMFYDLGHVLWDTLYVGDTASNRVEVLLRELDPVLETVSSMVHNKVRNRAITALMKATFDGFLLVLLAGGPLRTFTRQDSQIIEDDFRALRDLYLADGDGLPEELVDKASSQVKNVLPLFRADSESLIERFKRMMVESNRPASKNRLPLPPTTGHWSPNEPNTVLRVLCYRNDETATKFLKKTYNLPKKI

SEQ ID NO: 223682 - protein, 132 aa, Zea Mays
MSVRIKAVVDRFVMELKEALDADIQDRVMKEREMQTYIAEREREVAEREAAWKAELSRRERLRVLRAEENPLQVPPRDVALKGAQAAVQYMAEYVAKKATRSQPMKTKKTWAQFCFFSRPNKRKHDRIDTAS

SEQ ID NO: 223683 - protein, 74 aa, Zea Mays
MSVRIKAVVDRFVMELKEALDADIQDRVMKEREMQTYIAEREREVAEREAAWKAELSRRESFFHELMAMPFIFF

SEQ ID NO: 223684 - protein, 687 aa, Zea Mays
MEGDDFTPEGGKLPEFKLDARQAQGFISFFKKLPQDPRAVRLFDRRDYYTAHGENATFIARTYYHTMSALRQLGSSSDGILSASVSKAMFETIARNILLERTDCTLELYEGSGSNWRLTKSGTPGNIGSFEDILFANNDMEDSPVIVALFPACRESQLYVGLSFLDMTNRKLGLAEFPEDSRFTNVESALVALGCKECLLPADCEKSIDLNPLQDVISNCNVLLTEKKKADFKSRDLAQDLGRIIRGSVEPVRDLLSQFDYALGPLGALLSYAELLADDTNYGNYTIEKYNLNCYMRLDSAAVRALNIAEGKTDVNKNFSLFGLMNRTCTVGMGKRLLNRWLKQPLLDVNEINNRLDMVQAFVEDPELRQGLRQQLKRISDIDRLTHSLRKKSANLQPVVKLYQSCSRIPYIKGILQQYNGQFSTLIRSKFLEPLEEWMAKNRFGRFSSLVETAIDLAQLENGEYRISPLYSSDLGVLKDELSVVENHINNLHVDTASDLDLSVDKQLKLEKGSLGHVFRMSKKEEQKVRKKLTGSYLIIETRKDGVKFTNSKLKNLSDQYQALFGEYTSCQKKVVGDVVRVSGTFSEVFENFAAVLSELDVLQSFADLATSCPVPYVRPDITASDEGDIVLLGSRHPCLEAQDGVNFIPNDCTLVRGKSWFQIITGPNMGGKSTFIRQMIQAPKIT

SEQ ID NO: 223685 - protein, 233 aa, Zea Mays
MAPPEPEMFDVVIFGASGFTGKYVIREALKFLNASSSASPLRSLAVAGRSRDRIAAALRWAAAPAPPPEDVPILVADTSDPASLAALASRARVVLSCAGPFRLHGHAVAAACAAAGADCLDISGEPEFMERVESELHEPAARSGSLIISACGFDSVPAELGFLFHSRQWEPPSAPATVEAYVSLQSTKRIVGNIGTYESAVLGVANAGQLQALRRSRPRRPRPNNSLRTVTCK

SEQ ID NO: 223686 - protein, 327 aa, Zea Mays
MIRIKGSWRDACKVLENGQSGAMVPASNSSDRSDRSDKPMDQKVLRRLAQNREAARKSRLRKKAYVQQLESSKLKLASLEQELQKARQQGIFISSSGDQTHTMSGNGAMTFDLEYSRWQEEQNKQINELRTAVNAHASDSDLRLIVDGIMAHYDEIFRLKGIAAKADVFHILSGMWKTSAERCFLWLGGFRSSELLKLLVNQLEPLTEQQLMGLSNLQQSSQQAEDALSQGMEALQQSLAETLAGSLGPSGSSGNVANYMGQMAMAMGKLGTLENFLRQADNLRQQTLHQMQRILTIRQAARALLAIHDYFSRLRALSSLWLARPRE

SEQ ID NO: 223687 - protein, 697 aa, Zea Mays
MISGYYVARFFTKKSLSSYFTFVALASLMVLWFVVHNYWDLNIWIAGMPLKSFTKYVVAAVIMAMAVPGLALLPTKLRFLLELGLIGHTLLLCYIENRLFNYASMYYYGFEEDIIYPNYMVFITTFLGLALVRRLYVDQRLGPKAAWILTCLYSSKLAMLFMTSRSVIWFSAVLLLAVTPPLLLYRDKSKGASKMKVWQAYFHASVIAFSAWLCRETIFEALQWWNGRPPSDGLLLGSYILLTGVACIPIVALHFPHAQSAKRFLVLIVATGLLFVVMQPPIKLSWVYRSDFITAAHLSDDDISIYGFVASKPSWPSWLLIATVVLTLAAVTSIIPVKYVVELRTSYAVAVGITLGIYISVQYFFQAVVLYPLLVATIVSAAVFVVFTHLPSESSTRVLPWVFSFLVALFPVTYLLEGHLRAKSFADEDEAEKFTNMLAIEGARMSLLGLYAAIFMIIALEIKFELTLLLREKAADRGMHGPSSRSAAFPPKARLLQQRRAHAAPTFTIKRLAAEAAWMPAIGNVSTVLCFGICLVLNLTLTGGSNRAIFFLAPILLLLNQDSDIFAGFGDRQRYFPVTVSISGYLLLTALYRIWEETWPGNGGWALDIGGPGWLFAVKNFALLVLTLPNHILFNRFMWDYVRQTDAKLLLTLPLNLPSIIMTDILTIRVLGLLGAMYSLAQYMISRRIRIAGMRYI

SEQ ID NO: 223688 - protein, 697 aa, Zea Mays; identical to SEQ ID NO: 223687

SEQ ID NO: 223689 - protein, 58 aa, Zea Mays
MSLFSHIFLLNVPFMVLLIAQGHENVAAEYYKQQVEMLEGFSEMDAFTDRAFLPVMSK

SEQ ID NO: 223690 - protein, 771 aa, Zea Mays
MERLKSAVPPDLRRAVGEGTAADLANTTSRLFAFFDSLPLFHQVMQELTDPELALCRKDKVKAVELKGHGNACFSRREFGKALRFYSQALRHVPINSGGMDVNLKLGLFEESLRDCDRAITISPNYSKAWYRKGMVKTALKNYSSAIHDLEVALSQEVTSSGKSNIEQELKLILEKHESVNEAGTSNCDSKDRDLPLAGQPHKIVIESISTPNKGRGMISTDDIPPASLIHVEDPLAAIIMKSSRETHCHFCFSETPADVVFCPSCTIPIYCSKRCQEQSAGHISRDEDTNLGYSTNVANLSITSSCKSPRSKLFAEHRHECGGAHWAAVLPADVVLAGRIIAHSIVKRMPSGKSFAFSGPNLDLVHHYDQHSPANKLESHIYAIVLLLCLQNHYRSDLLWTEDSLSQLVLLIFQIKVNSIAIVCMRSMDRGPEHTINRGFYVAEGAKMCSVEQVRVAQALYVSGSLFNHSCQPNVHAYFLSRAFVLRTTEFIKSGSPVELSYGPQVGEMHISERQKSLQENYYFSCQCSSCSELNLSDLVMNSFCCPQSNCLGAISESTYYRSKENFVNVSLGGSYVCKLSLPDVSKVDMDMENVAKSLLQNSGVSLNIDHGCCMSCRSCIDLSSALATSHREESTIDRLKKHTFLDKTLITEALQSLKQLKKLRHPYSKALAQAEDTIAEAFAKVGDQELARKHCEASIQILEKLYHPKHIIIAHELIKLVSILLSLGDGASAAATFAQAEAIFSLYYGSHVEKVLTYMGALKKAVIDV

SEQ ID NO: 223691 - protein, 291 aa, Zea Mays
MAAGGELQLLSSWYSPYVIRAKVALGLKGLIYEFIEEDLFSKSDLLLKLNPVHKKVPVLVHGGRPVCESLVIVQYVDETWAAGTGTPLLPADAHDRATARFWAAYVDDKFCKEWIKLYRSTTAEKAAEALGGVVPVVETLEQAFRECSRGKPFFGGDAVGLVDIALGSFVVWIRVVDEAAGVKLLDEAKFPALTAWAERFLAVDCSKGKPFFGGDAVGLVDIALGSFVVWIRVVDEAAGVKLLDEAKFPALTAWAERFLAVDAVKEVMPDAGRLLEHYKGFLAKRSPPAGY

SEQ ID NO: 223692 - protein, 1342 aa, Zea Mays
MAMEASAASDETLAAVFAQLKLHTVALLDLLRTRRPISSSGSSLREMAAFLRAAPAPALQLCFDYTVFPLLLLLDAAVQCRKQGNAPGQVAGGIDIGDAVAEAGLTCLEVLLTKCHLTSVNQMVAMLKKLTSGAMLSPSEASEEFRGAIIRCFRALVLQLQPCLDHFCSCKHGIVLPTIPTSTCLEVRSVVRPNHSAQPEECLLAFLQSQNASAAVGHWLSLLLQASELEASRGHRGSADVRKESLHTLRILIGKVGSADALAFFLPGIVSRLGKVLYTAKTMISGAAGSSLSIEQAILGLTEALMIVLNDKENLSALGKHKNENHSGGSESTEHILQMLRQLPTKNISDKISHDEITDDSVSNVNNSFADRKALHVKRTKKWLEETTSNVDKLLSATFPHLAIHSSEKVRKAVVSGVKGLLSSCSSTLKRTKMLLLECLCVLACDDAAAVSEAAQDALDHLFNQGHNLVTEKEISDTFTRLVERLPQVVLGSEETTALSHARMLLALTFYAGPQFLINHLHRSPVIAARFFDCLGLCIGHSSQFSGSMDKLIVSKPLSIGYLYSVAELKSGAYSKDTTNISLHATSTSAASKISVIHDNALPNALLGTVEYELPHVPPWFFHAGSQKLYGVLAGIIRLVGLSTVSGEGTAATLSLFVDILLDQFRRLSTELRDKDVYNDGLQRWYMKGEAGQALRQASSAVCMLNELMYGLSGRSLGMFLQLFSNGSAQMPRTVCQKNQLLACVKHNAVTNKREVWGFSEQKGTKDNILHCISSILHEYVSPEVWDLPTEKDTELHLIELNLPLHFYRDTTALHTVVLEGIGVLGVLLGQDFALSGFMHSSLYLLLRELISSSAQIRTACDAVLRALATAGGHCSVGQFVVANADYIIDSLCRQLRHLDLNPHVPDVLASMLCYIGASRDILPFLEEPMQSISSELEVLGRHDHPRLTVPFLKAVSEISKACRHESTCLPDEAQSFYEKVSSEGQEVKIMIEKRMESSAISERKNVDARSYFMTLEYWEDLFCKLNEMRRYRRIVGSLAGSCLSAAIPLLSSNKETACLVALDIVESAAISIANVEEAYKCECQSKGVIEEAIQFCSFDELLDGTDATEDVDENRLLPAMNKLWPYLVICLRNKISVPVVRKCTEMLRRAICISGGDFYVRRFHKDGPIVWRLLALSPFRRLSKMDEKAIILPYRDTSLNSEEPMAEISSQKIQIAVLDMIAAISSNKRSAVALESVLKKVCGLVVGIAYSSLTGLQEAAIRALAGLACMDADLVWLLLADVYYSLNQRESLLPNQDLALVSDLLPPPVSSREYLFVQYGGEGVRFLILCICNLAEFLWSC

SEQ ID NO: 223693 - protein, 208 aa, Zea Mays
MKKKKKKHVELDSSLTETGDVDDTGDDQVREDEEGEGIVLAGAAATRYPWEGTDRDYKYEELLGRVFNILRENNPDLAGDRRRTVMRPPQVLREGTKKTVFVNFMDLCKTQPEHVMMFLLAEMGTSGSLDGQQRLVIKGRFAPKNFEAILRRYINEYVICNGCKSPDTILSKENRLFFLRCEQCGSSRSVAPIKAGFVAQVGRRKAGS

SEQ ID NO: 223694 - protein, 462 aa, Zea Mays
MPSLLFARRPNCSTAEEEQGLLDDTDTDNSNDGTEPSASMTEASFGGVSSDAVTLVSNSGQQAQRRHPKKCRFKGCSKGARGATGLCIAHGGGQRCQKPGCHKGAESRTAYCKAHGGGRRCLQLGCTKSAEGKTDHCIAHGGGQRCGYPDCPKAARGKSGRCIKHGGGKRCSVEGCIRSAEGRVGLCISHGGGRRCQFPDCRRGAQGSTLYCKSHGGGKRCVFEGCGKGAEGSTPLCKAHGGGKRCVYEGGGVCPKSVHGGTDFCVAHGGGKRCAVPGCSKSARGRTDRCVKHGGGKRCRVDGCGKSAQGSTDCCKAHGGGKRCNFGDGQCEKFARGRSGLCAAHDTLVASQQRRGGGMIGPGLFHGIVRSASVANMNSDYSSSGVSTVSDCDGSPEAATRRQELIPPQVLVPRSMKSLTAATVQPPKRSREGRVVTVPEGRVHGGGLLSLLGGSFMNVDKL

SEQ ID NO: 223695 - protein, 572 aa, Zea Mays
MHKIVSREAQPHLFTPPMLHFFLAYQSTIVPLKQLQDHAKPPKVQLHNSVPQKQELPDRCMVPAKLPHASQVSAHLSGNNCLGCAAGSDLHKWAAAEKFQPSSKSSGHLNGTGQKVHSLVDSEKPSNQSFAMIVKSHTLRLPVGNPDGTIIIRTDQYNRDDLRVDYMYAKFFVIKSIGEADVHKSIKYGVWSSSSNGNIKLDSAFRDADRISRRHSTKCPVFLFFSVNGSGHFCGMAEMVGPVDFHKDMDFWCQDKWTGCFPVRWHIVKDIPNGFLQHITLQNNENKPVTHSRDTQEIPYLPGISVIKIFKDIKVRDCLFDDFMRYEAEEAQMKPHRRCKLSYDAPDFVPVSQRTEQTKSSSVLVDRTSEIQNVSEKPHDAKVINPQEPRASDKQASEAEKENELQESHCSGSQNQEDAAKTATNHPPGPSLKAAGADGKQQYWKKVENPKQHADSGAAQGSLKAPEKRLNGVSGSASTVPVPEGGEQQRVTAKLGSLKISSKAVEADRKTSTAGMEKQLNGVSGSGSAVPEGGEEQKVKISSKVVEADRKTSKAGVVTIGSMPVRVDSYAV

SEQ ID NO: 223696 - protein, 93 aa, Zea Mays
MPMMSSGAASPSTSLLHTKMDKWLLSVAGINLQSLATWEICVHCTSCVLCFVVRMCNTQKDSECVPIAYDICLEYSTSEAELELAQTIYQILN

SEQ ID NO: 223697 - protein, 93 aa, Zea Mays; identical to SEQ ID NO: 223696

SEQ ID NO: 223698 - protein, 93 aa, Zea Mays; identical to SEQ ID NO: 223696

SEQ ID NO: 223699 - protein, 313 aa, Zea Mays
MAQGLSYHSRRDIKCKNQLRNQEQPFDMGKKKKRNKNVPAVVWYPTRVIEFLGRRTPIILKEKDTRCSLVAICNVLLLGEKITLDLDIKKVLESHLIHLFQRPLLCGNTQMQLEQNLELSEFNKQVLGVLPKLTCSLYFDVTFSSSCGLEKTFETALFGFLGVPLRHGWLVDPQDAELDSSIRGSSYSKLSYNLAIYESIRPKTNSGPQKHGRYEDDMFYSALAFSKTGSEKELDSTSCATISTFLQGPQLTRYGALQPTVLIWNENLITISKFEDKIYVLLNDLSLLRTETDAVWERLTQFLAHGLVGHARH

SEQ ID NO: 223700 - protein, 322 aa, Zea Mays
MAQGLSYHSRRDIKCKNQLRNQEQPFDMGKKKKRNKNVPAVVWYPTRVIEFLGRRTPIILKEKDTRCSLVAICNVLLLGEKITLDLDIKKVLESHLIHLFQRPLLCGNTQMQLEQNLELSEFNKQVLGVLPKLTCSLYFDVTFSSSCGLEKTFETALFGFLGVPLRHGWLVDPQDAELDSSIRGSSYSKLSYNLAIYESIRPKTNSGPQKHGRYEDDMFYSALAFSKTGSEKELDSTSCATISTFLQGPQLTRYGFSSLHNDLRALQPTVLIWNENLITISKFEDKIYVLLNDLSLLRTETDAVWERLTQFLAHGLVGHARH

SEQ ID NO: 223701 - protein, 611 aa, Zea Mays
MGGCHAKPLTQDADGSPPHAAPATPPPGNATPGPGKKHWAVSPFFAFSTPSPSPAHHLFGGSAASPRKSPAPPGSAPTTPARRILRLPFPPPSPAKHIRAALARRHGPPRPSIPEEGGGEGEGGGGARGLDKGFGFNKGFAAKYDLGDEVGRGHFGYTCAATVKKGARKGESVAVKVIPKAKMTTSIAIEDVRREVKILKALSGNKNLVQFYDAYEDNDNVYIVMELCEGGELLDRILSRGGKYSEDDAKAVLVQILNVVAFCHIQGVVHRDLKPENFLFTSKDENSHLKAIDFGLSDFVKPDERLNDIVGSAYYVAPEVLHRCYSTEADVWSIGVIAYILLCGSRPFWARTESGIFRSVLKADPSYNEAPWPSLTPEAMDFVKRLLCKDPRRRMTAAQALSHPWIRNYNAIRLPLDILIFRLIKAYIRSSSLRKAALRALSKTLTVDELFYLKAQFSLLEPDRNGCITLDNIRMALTREATDAMKESRVQDILVSLSALQYRRMDFQEFCAAAVSVHQLEALDRWEQHARSAYEYFEKEGNRAIVIDELASELGLSPSVPLHVVLQDWIRHTDGKLSFLGFVKLLHGMSSKLTGLKNRTIGACISRASEL

SEQ ID NO: 223702 - protein, 1905 aa, Zea Mays
MAPLPPRELLSVIEAALLGSTAPSPAQRVELLHAVRDAAPAFRTLLSYPVPKASDRTQVESKEVRLPGMPPITLDDTDVRTALKLSDELNLNEIECVRLLVDANREWVLYGREPLEIYRLAAGLWYMERRDLITALYILLRSVALDQGLDADLMSEIEDQIQPLFNDGLRQRIITLVKELNREEPAGIGSPSSERYVLDFRGALVERRAIVSRERLSLSHCLALSALIKLTSPKEVKDVFSILKDCAAEANQNSSVELQITYGLLFFLVATFISDALSTSLEKASLSSSDSSFRREFHELVMRTGNNMTIEGFVGVVRLAWSVHLMLTQDRSNSRETSDIWSCLEIICRQNSFEFLREQVLKTAAYQNDDEDIVYMYTGYTHKLMMCFISHPTSRDKIKEIKEKAMTALSPYEPPRGQREDLGRNGEQADQPTKEPFVSLLELVREIYQKVPELGNGNEELWTFVIYAGEDHTNTQTLVAFLGLLSTLASTEVGAAKVYELLQGKTYRSVGWSTLFDCLSIYEEKFKKSIQSSANILPDFPEGDAQALVAYLAVLQKVVENGNLTERRKWFPDIEPLFKLLSYENVPPYLKGALRNSITAFIKVSPILKDAIWNYLEQYDLPVVTAPLGHHTATQVYDMRFELNEVEARRESYPSTISFLKLINALIVEERNISDKGRRFMGIFKFVYEDVFGPFPQRAYADPLEKWELALACLEHFRMVLSMYDIKDDDIYASVNTLAPSSLERQLPLLELLKDFMSGKVAFRNIMNIILVGVDSIINERTTQTYGIILERTVLLSLEIFILVMERDLALADVFRPLYQPLDVILAQSHRQIVALLEFVRYDYLPQIQQCSIKIMGILSSRIVGLVQLLLKADVGKMVIEDYAACLEFRFDDFQVIEDTKDDVGVLTLQLLVDNICRPAPNITHLLLGFDVNGSIEQTVLKPKSQYSCLKIILDNLEKATKPDINSLLHEFSFQLLYELCLDPLTCGPVMDLLSTKKYQFFSKHVGTIGVTPLPKRNSNQSLRISMLHERAWLLKMLALALHISDISSSVYREACMAILYHTFGQCAENFQSTSLIHSHDALTSISDVPAKRNKVLDLLEVLQFRCPDTSTKYPQLLSSLGIESKIEEILRNSATFENGGVYYYSERGDRLIDLDAFREKLLQISQELNSQLTEPEKAGLKESVHHLLKWAWRYNKNLEEQAAQLHMLTGWSQIVEVAVSRRMSLFEDCSQLLFELLDASLNATTSPDCSVKMAYVLTNVSLTCMAKLRDERFICPAGTDSDAVTCLDIISSKQLPNAACNSLLFKLVMATLRNESSEILRRRQYALLLSYFQYCSSILDSDVPPSVLRFLLLEEQDGDDEDITLQKVLKEHNELAHANFSIIRKEAQAIVDLVTKDAFHGSEAGKALSFYVLDALISIDHEKYFLNQLQSRGILRSCLSDVANYLSKGQCLNPQAQRREQSLRSPSLTYKVLVLGFTLVFGPSTVARPFKNPPSHQDPSQPPETRQNPSQPPETLLLSSVLSGFCRRLCSSLQVLQPAERQRADQPRGRGSSPRKGEGVEPHQGAGEGDFTREGEVAGSRYGAAAVGELRAAVTWTSREALTASFSGITSPLLPCLVKNKIVREIVDFAKQHQSVFNSILRENMTGTNLLTLEQLSMAVSILSKVWAYEENEECSYIQDLFSLMHSLFSVDFGILNFMQSPNMIENQKSELIAFGLCFSLVSYLYVLATRKNMRFQVSYGRNSDQQHPTLQMVSDLLNSATLALERVGEEKYMLLNKIRDLNELSRKEVDEIIKVCMKQDCISPNDNIRKRRYIAMIDLCCMAGNRDQLITLLLQITECAVTILLIHFQDDASAKGLSSFSDELLPVLERLEHLKEDKVGRSLKLFHRSITTLKEMTIRTITI

SEQ ID NO: 223703 - protein, 1900 aa, Zea Mays
MAPLPPRELLSVIEAALLGSTAPSPAQRVELLHAVRDAAPAFRTLLSYPVPKASDRTQVESKEVRLPGMPPITLDDTDALKLSDELNLNEIECVRLLVDANREWVLYGREPLEIYRLAAGLWYMERRDLITALYILLRSVALDQGLDADLMSEIEDQIQPLFNDGLRQRIITLVKELNREEPAGIGSPSSERYVLDFRGALVERRAIVSRERLSLSHCLALSALIKLTSPKEVKDVFSILKDCAAEANQNSSVELQITYGLLFFLVATFISDALSTSLEKASLSSSDSSFRREFHELVMRTGNNMTIEGFVGVVRLAWSVHLMLTQDRSNSRETSDIWSCLEIICRQNSFEFLREQVLKTAAYQNDDEDIVYMYTGYTHKLMMCFISHPTSRDKIKEIKEKAMTALSPYEPPRGQREDLGRNGEQADQPTKEPFVSLLELVREIYQKVPELGNGNEELWTFVIYAGEDHTNTQTLVAFLGLLSTLASTEVGAAKVYELLQGKTYRSVGWSTLFDCLSIYEEKFKKSIQSSANILPDFPEGDAQALVAYLAVLQKVVENGNLTERRKWFPDIEPLFKLLSYENVPPYLKGALRNSITAFIKVSPILKDAIWNYLEQYDLPVVTAPLGHHTATQVYDMRFELNEVEARRESYPSTISFLKLINALIVEERNISDKGRRFMGIFKFVYEDVFGPFPQRAYADPLEKWELALACLEHFRMVLSMYDIKDDDIYASVNTLAPSSLERQLPLLELLKDFMSGKVAFRNIMNIILVGVDSIINERTTQTYGIILERTVLLSLEIFILVMERDLALADVFRPLYQPLDVILAQSHRQIVALLEFVRYDYLPQIQQCSIKIMGILSSRIVGLVQLLLKADVGKMVIEDYAACLEFRFDDFQVIEDTKDDVGVLTLQLLVDNICRPAPNITHLLLGFDVNGSIEQTVLKPKSQYSCLKIILDNLEKATKPDINSLLHEFSFQLLYELCLDPLTCGPVMDLLSTKKYQFFSKHVGTIGVTPLPKRNSNQSLRISMLHERAWLLKMLALALHISDISSSVYREACMAILYHTFGQCAENFQSTSLIHSHDALTSISDVPAKRNKVLDLLEVLQFRCPDTSTKYPQLLSSLGIESKIEEILRNSATFENGGVYYYSERGDRLIDLDAFREKLLQISQELNSQLTEPEKAGLKESVHHLLKWAWRYNKNLEEQAAQLHMLTGWSQIVEVAVSRRMSLFEDCSQLLFELLDASLNATTSPDCSVKMAYVLTNVSLTCMAKLRDERFICPAGTDSDAVTCLDIISSKQLPNAACNSLLFKLVMATLRNESSEILRRRQYALLLSYFQYCSSILDSDVPPSVLRFLLLEEQDGDDEDITLQKVLKEHNELAHANFSIIRKEAQAIVDLVTKDAFHGSEAGKALSFYVLDALISIDHEKYFLNQLQSRGILRSCLSDVANYLSKGQCLNPQAQRREQSLRSPSLTYKVLVLGFTLVFGPSTVARPFKNPPSHQDPSQPPETRQNPSQPPETLLLSSVLSGFCRRLCSSLQVLQPAERQRADQPRGRGSSPRKGEGVEPHQGAGEGDFTREGEVAGSRYGAAAVGELRAAVTWTSREALTASFSGITSPLLPCLVKNKIVREIVDFAKQHQSVFNSILRENMTGTNLLTLEQLSMAVSILSKVWAYEENEECSYIQDLFSLMHSLFSVDFGILNFMQSPNMIEKSELIAFGLCFSLVSYLYVLATRKNMRFQVSYGRNSDQQHPTLQMVSDLLNSATLALERVGEEKYMLLNKIRDLNELSRKEVDEIIKVCMKQDCISPNDNIRKRRYIAMIDLCCMAGNRDQLITLLLQITECAVTILLIHFQDDASAKGLSSFSDELLPVLERLEHLKEDKVGRSLKLFHRSITTLKEMTIRTITI

SEQ ID NO: 223704 - protein, 1855 aa, Zea Mays
MAPLPPRELLSVIEAALLGSTAPSPAQRVELLHAVRDAAPAFRTLLSYPVPKASDRTQVESKEVRLPGMPPITLDDTDVRTALKLSDELNLNEIECVRLLVDANRESVALDQGLDADLMSEIEDQIQPLFNDGLRQRIITLVKELNREEPAGIGSPSSERYVLDFRGALVERRAIVSRERLSLSHCLALSALIKLTSPKEVKDVFSILKDCAAEANQNSSVELQITYGLLFFLVATFISDALSTSLEKASLSSSDSSFRREFHELVMRTGNNMTIEGFVGVVRLAWSVHLMLTQDRSNSRETSDIWSCLEIICRQNSFEFLREQVLKTAAYQNDDEDIVYMYTGYTHKLMMCFISHPTSRDKIKEIKEKAMTALSPYEPPRGQREDLGRNGEQADQPTKEPFVSLLELVREIYQKVPELGNGNEELWTFVIYAGEDHTNTQTLVAFLGLLSTLASTEVGAAKVYELLQGKTYRSVGWSTLFDCLSIYEEKFKKSIQSSANILPDFPEGDAQALVAYLAVLQKVVENGNLTERRKWFPDIEPLFKLLSYENVPPYLKGALRNSITAFIKVSPILKDAIWNYLEQYDLPVVTAPLGHHTATQVYDMRFELNEVEARRESYPSTISFLKLINALIVEERNISDKGRRFMGIFKFVYEDVFGPFPQRAYADPLEKWELALACLEHFRMVLSMYDIKDDDIYASVNTLAPSSLERQLPLLELLKDFMSGKVAFRNIMNIILVGVDSIINERTTQTYGIILERTVLLSLEIFILVMERDLALADVFRPLYQPLDVILAQSHRQIVALLEFVRYDYLPQIQQCSIKIMGILSSRIVGLVQLLLKADVGKMVIEDYAACLEFRFDDFQLLVDNICRPAPNITHLLLGFDVNGSIEQTVLKPKSQYSCLKIILDNLEKATKPDINSLLHEFSFQLLYELCLDPLTCGPVMDLLSTKKYQFFSKHVGTIGVTPLPKRNSNQSLRISMLHERAWLLKMLALALHISDISSSVYREACMAILYHTFGQCAENFQSTSLIHSHDALTSISDVPAKRNKVLDLLEVLQFRCPDTSTKYPQLLSSLGIESKIEEILRNSATFENGGVYYYSERGDRLIDLDAFREKLLQISQELNSQLTEPEKAGLKESVHHLLKWAWRYNKNLEEQAAQLHMLTGWSQIVEVAVSRRMSLFEDCSQLLFELLDASLNATTSPDCSVKMAYVLTNVSLTCMAKLRDERFICPAGTDSDAVTCLDIISSKQLPNAACNSLLFKLVMATLRNESSEILRRRQYALLLSYFQYCSSILDSDVPPSVLRFLLLEEQDGDDEDITLQKVLKEHNELAHANFSIIRKEAQAIVDLVTKDAFHGSEAGKALSFYVLDALISIDHEKYFLNQLQSRGILRSCLSDVANYLSKGQCLNPQAQRREQSLRSPSLTYKVLVLGFTLVFGPSTVARPFKNPPSHQDPSQPPETRQNPSQPPETLLLSSVLSGFCRRLCSSLQVLQPAERQRADQPRGRGSSPRKGEGVEPHQGAGEGDFTREGEVAGSRYGAAAVGELRAAVTWTSREALTASFSGITSPLLPCLVKNKIVREIVDFAKQHQSVFNSILRENMTGTNLLTLEQLSMAVSILSKVWAYEENEECSYIQDLFSLMHSLFSVDFGILNFMQSPNMIENQKSELIAFGLCFSLVSYLYVLATRKNMRFQVSYGRNSDQQHPTLQMVSDLLNSATLALERVGEEKYMLLNKIRDLNELSRKEVDEIIKVCMKQDCISPNDNIRKRRYIAMIDLCCMAGNRDQLITLLLQITECAVTILLIHFQDDASAKGLSSFSDELLPVLERLEHLKEDKVGRSLKLFHRSITTLKEMTIRTITI

SEQ ID NO: 223705 - protein, 661 aa, Zea Mays
MPPTRSSRASPWQASSTSSASSETSQSAFVLESLLRSLASVSYYTSCCLASSNRIRMHTPAGYVSTGMRRLAAEVFDDMQDQVMAASARGRRLAARARKLLAADLDLVLDLDLPPPSTQEHRCLSSAAAATALATSGGAGRLGCRSYLGGAPPMPRVVVQRIERCRGPPRLSLLDKYIWPLIYDTMTCSAAACLISAPKSQLQCPIHAGTVVLRCRFDAAGDGACLKRYTDPSFFFRAHSAKIDEQGTLKQHRRQAEAAAAAGAAGSMFLLMQQTAAHRVEQPNMEQKLQEGSTAQPSPSELERTSSFEAWLSPQARRFPTATAATTHHHLQEPPDDDDGGGGGGATTCSGSISSQVDTTSNAAAVSSSSTVKAVRLNSASLVKGGESNTTRSRYKGKIASRVSSLPRKLFMNTTKHHNDHSRSFRAGSSSLRVTQATDIGDCSPELEAIAVAIPTPAADSKNLLLLLPGSGPVLEPPDNSSAAAAEDAKVHTPLAPIPPMQWLSEKGTPPASPKHRTPCFQQQFGSSGQSDEKPSQEHEASDHSSNLLQESVFFSAAQELAKMSPPPPWVPRPKYPLLDVKAVKLRNGPSPIHPSRNILDSRSAQIKDIAISSKLKPASRASSHVTGTGSPTNATILNRADGIRQVHDDETDQIWSDDTQ

SEQ ID NO: 223706 - protein, 161 aa, Zea Mays
MQWLSEKGTPPASPKHRTPCFQQQFGSSGQSDEKPSQEHEASDHSSNLLQESVFFSAAQELAKMSPPPPWVPRPKYPLLDVKAVKLRNGPSPIHPSRNILDSRSAQIKDIAISSKLKPASRASSHVTGTGSPTNATILNRADGIRQVHDDETDQIWSDDTQ

SEQ ID NO: 223707 - protein, 91 aa, Zea Mays
MGWQGVNPATDFRGCGFVSLENLLFFARTYPASFKRLMLKQQGMRTTWEYPFAVAGVNISYMLIQLLELNSGHIASIVSGTWWTQLVADNC

SEQ ID NO: 223708 - protein, 443 aa, Zea Mays
MEKQSSTRHGALEKLKSFRGIEKQRSFKFLSMEKQQSFKRNKDSPGKRGDTALHLAARAGSVAHVQRILAECDPELLVELAARQNQDGETALYVSAEKGHVEVVCEILKASDVQSAGLKASNSFDAFHIAAKQGHLDVLKELLHAFPSLAMTTNSVNATALDTAATQGHIDIVNLLLETDASLARIAKNNGKTVLHSAARMGHVEVVTALLNKDPGLGFRTDKKGQTALHMASKGLASKGQNAEILLELLKPDVSVIHVEDGKGNRPLHVATRKGNTIMVQTLISVEGIEINAVNRAGETAFAIAEKQGNEELVNILREAGGVTAKEQVNPPNPAKQLKQTVSDIRHDVQSQIKQTRQTKMQFQKIKKRIEKLHIGGLNNAINSNTVIMVATLGSMCYCIVAHRMEEKSMRRIRRTSTSQSWSISIDSETELMNSEYKKMYAI

SEQ ID NO: 223709 - protein, 137 aa, Zea Mays
MFAGEQFCNQHLSSLRKRHPNRSDEDFSRYCFSMAYIVALLHDSLGVPLDDKRIEYSNQVGDIQVEWALGAFITLMQNTSLKPLHTTAESTHSNRPLFAVLGMFLLCGVLFVSRWRKPKTKIIYDLEKGRYIITRIS

SEQ ID NO: 223710 - protein, 138 aa, Zea Mays
MLIMGLETLQSAYLLHNFYCKKERKSASINNVTWDLLLYLSCVDTSWELKIYILLQSSLDLRSLHHYLISCLLENNFATSICRVLEKGILIGQMRIFHGIASRWHTLWLYCMTVLVYHWMTRGLSIQTRLETFRLNGL

SEQ ID NO: 223711 - protein, 196 aa, Zea Mays
MMAEAWTPVLLPATAPCFWQQDTHSVLWRRGDAWTAEENKLFEKDVGVIEAGGLVPFPRYSGSVPPPSGFALEDWGGGDRGFRRARGSEEMQERKKGVPWTEEEHKLFLMGLRKYGRGDWRNISRKYVTTRTPTQVASHAQKYFIRLSSGGKDKRRSSIHDITTVNLPGDAPRSSPPAATTNPSAGALVVDVKPFV

SEQ ID NO: 223712 - protein, 254 aa, Zea Mays
MWDVIHPKSGSNVGTVRKPRPPVLAAAVSAWTFLLTTVGSWRINTDSWKEPIAFLSTLLEADDRAVRMAAGEALVLCFELNLLDVSSCEDGDVNTGGTGGSKNKLFLDMQALKAKISGLASNLSAEAGGKGADKKNLTDQRDLFQRILDFVKYGDCPEESIKIAGKRDVLRVSSWSELIQLNFLKRFLGKGFLKHVQENGLLQDIFDIKVDKTETLSSTDKKIFRSEEEKERALRLNKERRLAQVRKNAVMLDE

SEQ ID NO: 223713 - protein, 342 aa, Zea Mays
MRSTYEIMVEEWNAPKPMHPSLLNEALRWTATDGQKKDLWSPLPYQGWKPCLTPSVSHKLPLEPSGYIQVFLDGGLNQQRMGICDAIAVAKILNATLVIPHLEVNPVWKDSSSFEEIFDVDHFINSLKDEVSIIKVLPKEFSWSTREYYGTGIRATRIKTAPLHASANWYLENVSPILQSYGIVAIAPFSHRLAFDDLPVDLQRLRCKVNFQALVFRSHIISLGETLVKRLRSPVRVHSSKSIHQVVGDTNQAEKYAVLHLRFDKDMAAHSACDFGGGRAEQLALAKYRQVIWQGRVLNSQLTDEELRNTGRCPLTPEEIGLLLVALGFDNRTRLYLASHKV

SEQ ID NO: 223714 - protein, 75 aa, Zea Mays
MSNQIGPWLFFLSSIVFFSPSMELTTLSIFQADAIMSRLNIDDYQKEGSQPTLLITSDIGLLEKNQPPRKKHGNS

SEQ ID NO: 223715 - protein, 691 aa, Zea Mays
MNTMECLDLSMGKDGCSFSQNCVEGFTQGTKSDFFSSINDVETSYPFVKGSSCPTLPNMEQKDGVLENAEQPHLLEMVNLDGTSHSLVDPPLEIKEQGAEDGLFASVEYVEQTHPNFTEEKVDGSIPTPASSEQPDQLEVVRPWDDAPNSTLRSKPPSNYSQPMQGSDLDVRNMDALDPSKEWLDSRLLSNTVEPSSSSNGGGTSVEKDNIEKTERLSGIDTVTPGLDNVQGSNPSAEPSSSSTGEGNSAVEKHSAEMTECLLGMGILNPALHNVQVLSPSTPKECLVSSADKSDVANRSDEINHSLDDFNQSNPKPVLKGRVSKMMCPRLAFQLPKVLPVCEHHKREMSLPSKHVSPRKATKSSFRKQYEGPNRHVSRHTEHQKTKLVMKDRNTGPAHMRSCRPTKQIDCTCSSASLDSSTKTKEVNDAEPRCSKSVKTFENVMAKKRKRPILSYDEDAKAMQMEVRMRRRHRESGVMKLRRSTENSDEAMCPGNSNNQLTNDHTKARKQRRANKDNKTPPVNASVPCTQIDAARLASDQQSFICTRPIDRPYWTGIMKIGQEYISLVAHLSNQACKKVQELSMSLPPLMKVTKHSKLKAWPGRWKASEPTAECVGLYFFSDNMRELDQLVHYLNDHSLVLKYVVGFAKLLISPSVFLPEQCQTFQGKRYLWGVFKRRMNTGRIHHVNAK

SEQ ID NO: 223716 - protein, 872 aa, Zea Mays
MDIVCEVCGVVGYRQLLIQCSNCKNAARHLYCLDPVIYDASAIEWLCDDCPPKHNEASDLTVETQKAVGAVGPTMNTMECLDLSMGKDGCSFSQNCVEGFTQGTKSDFFSSINDVETSYPFVKGSSCPTLPNMEQKDGVLENAEQPHLLEMVNLDGTSHSLVDPPLEIKEQGAEAGLFASVEDVEQTHPILTDETSPIWSSEEQVDGSCPASESREQPVPFKVVILGPWHDVPNSILRSRPPSNYSQSMQGSDLYVGNVDVLDLSKEQLDSRLKPEEQGAEDGLFASVEYVEQTHPNFTEEKVDGSIPTPASSEQPDQLEVVRPWDDAPNSTLRSKPPSNYSQPMQGSDLDVRNMDALDPSKEWLDSRLLSNTVEPSSSSNGGGTSVEKDNIEKTERLSGIDTVTPGLDNVQGSNPSAEPSSSSTGEGNSAVEKHSAEMTECLLGMGILNPALHNVQVLSPSTPKECLVSSADKSDVANRSDEINHSLDDFNQSNPKPVLKGRVSKMMCPRLAFQLPKVLPVCEHHKREMSLPSKHVSPRKATKSSFRKQYEGPNRHVSRHTEHQKTKLVMKDRNTGPAHMRSCRPTKQIDCTCSSASLDSSTKTKEVNDAEPRCSKSVKTFENVMAKKRKRPILSYDEDAKAMQMEVRMRRRHRESGVMKLRRSTENSDEAMCPGNSNNQLTNDHTKARKQRRANKDNKTPPVNASVPCTQIDAARLASDQQSFICTRPIDRPYWTGIMKIGQEYISLVAHLSNQACKKVQELSMSLPPLMKVTKHSKLKAWPGRWKASEPTAECVGLYFFSDNMRELDQLVHYLNDHSLVLKYVVGFAKLLISPSVFLPEQCQTFQGKRYLWGVFKRRMNTGRIHHVNAK

SEQ ID NO: 223717 - protein, 825 aa, Zea Mays
MMPQQLNGCVTIVLQNIMKAVGAVGPTMNTMECLDLSMGKDGCSFSQNCVEGFTQGTKSDFFSSINDVETSYPFVKGSSCPTLPNMEQKDGVLENAEQPHLLEMVNLDGTSHSLVDPPLEIKEQGAEAGLFASVEDVEQTHPILTDETSPIWSSEEQVDGSCPASESREQPVPFKVVILGPWHDVPNSILRSRPPSNYSQSMQGSDLYVGNVDVLDLSKEQLDSRLKPEEQGAEDGLFASVEYVEQTHPNFTEEKVDGSIPTPASSEQPDQLEVVRPWDDAPNSTLRSKPPSNYSQPMQGSDLDVRNMDALDPSKEWLDSRLLSNTVEPSSSSNGGGTSVEKDNIEKTERLSGIDTVTPGLDNVQGSNPSAEPSSSSTGEGNSAVEKHSAEMTECLLGMGILNPALHNVQVLSPSTPKECLVSSADKSDVANRSDEINHSLDDFNQSNPKPVLKGRVSKMMCPRLAFQLPKVLPVCEHHKREMSLPSKHVSPRKATKSSFRKQYEGPNRHVSRHTEHQKTKLVMKDRNTGPAHMRSCRPTKQIDCTCSSASLDSSTKTKEVNDAEPRCSKSVKTFENVMAKKRKRPILSYDEDAKAMQMEVRMRRRHRESGVMKLRRSTENSDEAMCPGNSNNQLTNDHTKARKQRRANKDNKTPPVNASVPCTQIDAARLASDQQSFICTRPIDRPYWTGIMKIGQEYISLVAHLSNQACKKVQELSMSLPPLMKVTKHSKLKAWPGRWKASEPTAECVGLYFFSDNMRELDQLVHYLNDHSLVLKYVVGFAKLLISPSVFLPEQCQTFQGKRYLWGVFKRRMNTGRIHHVNAK

SEQ ID NO: 223718 - protein, 226 aa, Zea Mays
MKMLNHPNIVNLVEVIDDPNIDKFYMVLDYVEGKMVCDNGLEEGTARNYLRDIISGLMYLHSHNVIHGDIKPDNLLVTSAGNVKIGDFSVSQVFEDDDDMLWRSPGTPVFTAPECCQGSAYHGRASDTWAVGVTLYCMVSGHYPFLGDTLQETYDKIANDPVQIPGDMNPQLADLLLRLLCKGDRITLQAAAEHPWVAGDEGPVPEFICRCGFGRRKRNDVREEVQ

SEQ ID NO: 223719 - protein, 208 aa, Zea Mays
MDASQDLWDWDWEVVLPDHRSFSLSNGVKNLDDKETETEEQDLLPPSGDVDVHNECKGIGVVLDETCKSAVPSVADPIMASEGGVEEKAIQSPDAEESVTADSKFAQEEEEEEDIKKDVDDKVGALIGALCSFGVAAATACVFLIGGRLHHQHTQQHKIQLQFFGDDKRIQQVVRQASRLNQKAMSFAMGAGASRHFGRPRVKRSKKH

SEQ ID NO: 223720 - protein, 713 aa, Zea Mays
MPLADRIRDLGVGIAFLRINLDGLVPPAPALAPAKREPDAALSAASLTVEEARKMLRATQMEAAHARIRESGVGAVPFLLFHYRPEPSHPPRILASDLISLNQQSAAGPPPPEVILLRCSLGSGLNIHGIVTVDSTMVPEISNSAVELNGVLLNHALVTFRELLLKCAQHYSWYVLRAIYVTKGSKLLPPSFASIFYDSASSVLDVFFDPSDGSLNVPGLTIGMFKFISKNMKSGGFSGTKRYLGDLGKTVKTASSNALFAAVTEISDSVVRGAETNGLNGMMLEEDVAVPVSSANEAPKDTTKMDTDDAPSDPVSGTDVNVHEPDTTEAAPAAENGAENPEEKSVPMETDAKVEPSERKVKRTSVPVHALVYGALAVADLQKAVEKEYEMALQDRVMEETKEKKNVVEAYVYDMRNKLYDRYNDFVTPEEKEGLIGKLREVEDWLYEDDLKKIGDPIEARYKESTERGSSVDQLVYCINSFREAALSSDQKFGHIDISEKQKIFDKFDVIIISYSLKFYGLSEIRKNDEGGDGRAQGMRLAAIEAAGSGPAVPEQGGAVVCHSSAHLSVRTIQWISAGTIAVLLVAKGTAIHKSFLVPFFALQTPCCIISWIKGDYGQWTAFLSLLVRLFFFIPGELELPLSTMLLVSVAPYQFMDLRGTQGGVVMSLVIAAYLAFQHFTRVGGPGKAFEQGSIVATLAIICIMIVPLMLLF

SEQ ID NO: 223721 - protein, 1199 aa, Zea Mays
MAPAAATQKSSLEVLLETLKKRDEQPKDAPPTLPARPTCRGRLPTTRRSSLPAGFMLENGMATVAATEAAVVDKKADAKMEIVGLEAKEEKLVKGCIFGTKRKFPNTEVLEESPYVGKFLEERKGTSVCKNPPHISSATIRMNGNVACTDILDYILQKKLRVWCSSPNAKWELGQIQSMSGDDAEILLANGKVLMVSPEQLLPANPDILDGVDDLIQMSYLNEPSVLYNLQLRYSRDLIYTKAGPVLIAVNPLKEVALYGKSSIMQYKQKANDDPHVYAVADLAFNEMLQDGINQSIIISGESGSGKTETAKIAMQYLSDLGGASGTESEVLQTNVILEALGNAKTSRNHNSSRFGKLIEIHFSESGKMCGAKIQTFLLEKSRVVQRAQGERSYHIFYQLCSGAPPLLKKKLFLKSANDYNYLKQSNCLKIDGVDDSKKFTVLVDALDTIQISKEDQMKLFSMLAAVLWLGNISFCVIDNENHVEVVSNEGLSTAAKLLGCTANQLVIALSTCKIRAGNDSIVKKLTLTQAIDARDALAKSIYANLFDWIVDQINHSLGTGRQFTWRSISILDIYGFECFNKNGFEQFCINYANERLQQHFNRHLLKLQQEEYLEDGIDWTPMEFVDNTNCLSLFEKKHLGLLSLLDEESTFPKASDFSFANKLKRQLSGNSCFKSEKEGTFKICHYAGEVTYDTAGFLEKNRDPLHSESIQLLSSCTCELSKHFASVMVADSQNKSSLSWHSVKDTHKQSVVMEFKAQLFKLMQQLESTTPHFIQCIQPNSKHHPRLFEHDLVLHQLKCCGVFEVVRISRTCYPTRITHQQFAERFLLLRSIASQDPLSVSIAVLQKFNIPPEMYQVGYTKLFFRTGQVAALENAKRQMLLGTLHIQTQFRGLHSRRGYQRLKKGAMNLQSFIRGERTRIHFDNLVKRWRAAVLIQKHTRRRLAANMFNDQLNHVILLQSVTRGFLARRKYKCLQNEKESKASHSIVQGNTRKNNSESRICHEMNGHYPHEPVITELQGRITKAEAALRGKEEENVMLKQQLEQYERKWSEYEAKMKCMEEAWKRQLSSLQYDSEDTLSTGTRTPEVIESKHDNHNPEAKVSAGNSDRRVNAVNHLAKEFEDRRQVFEDDAGFLVAVRSGQIGSNMNPDEELRKLKDRFATWKKDYKSRLKETKVNLSKVGTHDEKSRKRWWGKKSSK

SEQ ID NO: 223722 - protein, 247 aa, Zea Mays
MRKGSFQRSNGGAEQNTMDLREKLSRNHKKLPRYDSRGHAAESRASYDMRDEPPELRSRYFSREDVLGSRNSSVVSRVPYSRTADDLLKSNPSRKSYPSWTDDGLRHRSPERILSVRSDVSPPVGYDQIRSMPPLRSAGSSRPQSFITRGAPDTPRSQPYAGKATISVDTVQRTNGITPSSAPLPKVPVMAEAPLTVTGLLNSLGLEKYIVLFQAEEVDMAALRQMGESDLKDMGVPMGRSRSQKKV

SEQ ID NO: 223723 - protein, 364 aa, Zea Mays
MFPNMLPFGVAGQFNPLVIQPQAMTQQATRHARRVYVGGLPPSANEQTVAIYFNQVMAAIGGNTAGPGDAVLNVYINHDKKFAFVEMRSVEEASNAMALDGIMFEGAPVKVRRPTDYNPSLAAALGPSQPSPNLNLAAVGLTAGSNGGLEGPDRIFVGGLPYYFTEAQVRELLESFGPLRGFDLVKDRETGNSKGYAFCVYQDLTVTDIACAALNGIKMGDKTLTVRRANQGASQPRPEQESILLQAQQQVQLQKLVYQVGALPTKVVCLTQVVTADELKDDEEYEDIMEDMRLEAGNLVKVIIPRPDPSGQPVVGVGKVFLEYADIDGAAKAKTALHGRKFGGNPVVAVCYAEDKFANGEYDG

SEQ ID NO: 223724 - protein, 243 aa, Zea Mays
MTVDGGNSSSAVSILTSSVHHEAYKHTEARAINTSMTKGTYTMDESSSGIDGACNEHGSCNASAMECSDNSDSECEIFRVKRRSTSFDKPTSEAKTSTLSEQQVLRRLKKVHPEVQQVISKRQEESGNGSVRAAHMSQKSSNPAPADDETEDMAPIMWRIKRRQSETQDATCPGTRPQSYPPSSGGSGEEFVERTRDAAVELRPKRVKIRLPSNASRQIEQQRSSGQRFAREDRLPLGFPRTF

SEQ ID NO: 223725 - protein, 279 aa, Zea Mays
MLRRTKNCTDKEGRPILNLPPANIEVKYCVLSEAEKDFYEALFRRSKVKFDQFVEQGRVLHNYASILELLLRLRQCCDHPFLIMSRGDTKEYADLNKLAKRFLRGGNGAVNGDSCIPSRAYIKQVVQELQKDEGECPICLEAFEDAVLTPCAHRLCRECLLSSWRSATAGLCPVCRMSMSKQDLITAPTDNRFQIDVEKNWVESSKISALLQELEALRSSGAKSIVFSQWTAFLDLLQIPLSRNNFSFARLDGTLNLQQREKVIKEFSEDKGILGAQTT

SEQ ID NO: 223726 - protein, 836 aa, Zea Mays
MKFLREGSVQSSPNGFISSDVGPRSRQGTFDLQLPADHYIDDDGTSDNKPIDFLGLASDTKPRNDAELTLVSAEGLGKFSDNSSSSGLQTTNNLGPRQVTDLNESNTGFHMGRANGSVSRGLPRTLENSWNQPILRANTTNFSFSKKHSKEKHTDEGTSSNFFDTSVKTIHDDKPSINKGKQVSSVTFLAPRYNDADPPKYFKAVDGRPATASYNHFVYQGQNSSVGWIAQSPLEPSVINNFARVDRPHHLNMGTFTAPVSIPQIDNPSIVSPMGSCTADPRSSVINNPALIPRFNGFSTVNSYTSLSAVTQSIGTSIPKLINVDNVDKRYRGFPLDSFSVSHSRHQVAVSSNLEQKNSQKLEDSDQQSHGKGMKNFNLNETLSDCQEDGLVEQDGRCASSFQHDKDGGSVLGISWLKKKLMSADPTAVEKPGKIFGHSLGTAIELKNTKDQNEPAVTIRNLSDSASTSVGCAIKKDRPSDNIVTGTLPVCNKAQEGATCLPLSCQKHVPKDGQAAEGATKKSGAPIRNFIDLNDDVPNDDNSEESVVSHECHVEPSRNNHPKRAFVIDLEVPACEEDASWDIDQECAQPKPDAYQEVDDGSDTSALAAAENIVALSRNTPTAAEASDDTLQWFADLAVLNINDLAEQAELQACTNDSSNYESDSFESLTLKLEETKIDDLWSRPLEPETATDEQTVSAAHLLTKPRRGQQRRRRQKRDFQRDVLPGLSSLSRPEITEDVQLLEGLVQASGGSWESSLTRRGRCGGRARGRKPRKTVVTVIVEEEEEEEVEVSPPPKPAGTGELEADGRGMIGWGRTTRRCRRARCPSGNSMATAS

SEQ ID NO: 223727 - protein, 963 aa, Zea Mays
MGAKVERESYMPGYYATGDLNLEPNGRWSPYYEEMTSNDQLCNGFTTKPTNDYSEFDKEILKHQILEHEAVFRQQVYELHRVYKIQKDMMKQHQSKEVYSYPTLAVASHTNSPSQVPQNGAKMMWQMPVPPMSTTYRKAIGEHNDTNQSSMKFLREGSVQSSPNGFISSDVGPRSRQGTFDLQLPADHYIDDDGTSDNKPIDFLGLASDTKPRNDAELTLVSAEGLGKFSDNSSSSGLQTTNNLGPRQVTDLNESNTGFHMGRANGSVSRGLPRTLENSWNQPILRANTTNFSFSKKHSKEKHTDEGKQVSSVTFLAPRYNDADPPKYFKAVDGRPATASYNHFVYQGQNSSVGWIAQSPLEPSVINNFARVDRPHHLNMGTFTAPVSIPQIDNPSIVSPMGSCTADPRSSVINNPALIPRFNGFSTVNSYTSLSAVTQSIGTSIPKLINVDNVDKRYRGFPLDSFSVSHSRHQVAVSSNLEQKNSQKLEDSDQQSHGKGMKNFNLNETLSDCQEDGLVEQDGRCASSFQHDKDGGSVLGISWLKKKLMSADPTAVEKPGKIFGHSLGTAIELKNTKDQNEPAVTIRNLSDSASTSVGCAIKKDRPSDNIVTGTLPVCNKAQEGATCLPLSCQKHVPKDGQAAEGATKKSGAPIRNFIDLNDDVPNDDNSEESVVSHECHVEPSRNNHPKRAFVIDLEVPACEEDASWDIDQECAQPKPDAYQEVDDGSDTSALAAAENIVALSRNTPTAAEASDDTLQWFADLAVLNINDLAEQAELQACTNDSSNYESDSFESLTLKLEETKIDDLWSRPLEPETATDEQTVSAAHLLTKPRRGQQRRRRQKRDFQRDVLPGLSSLSRPEITEDVQLLEGLVQASGGSWESSLTRRGRCGGRARGRKPRKTVVTVIVEEEEEEEVEVSPPPKPAGTGELEADGRGMIGWGRTTRRCRRARCPSGNSMATAS

SEQ ID NO: 223728 - protein, 82 aa, Zea Mays
MNWLPHGKYLQNDSWRLQTCTNISSNFRTTMIGSKQLNRGCSLSLMLPWSSSTWPKMLLPEMARCTRTACFEHPTAMGLCGC

SEQ ID NO: 223729 - protein, 198 aa, Zea Mays
MSGGFFRGTSADQDTRFSNKQAKLLKTQKFAPELDHLVDTSKVKMDVMKPWIAKRVTELLGFEDEVLINFIYGLLEEKEADGKKIQIQLTGFMEKNTVKFMRELWTLLLSAQQNASGVPQQFLDEKEAEIQQKKAEDDRIAQEIQKKREMEENDSELVKNKVMITSPIIWVHIVIYLNCCRMGMLVTQDPMAIQLALL

SEQ ID NO: 223730 - protein, 262 aa, Zea Mays
MQRSGATIAFDFFRNKLLTEVSTSRGNESGKDVAKVKYVPDNKAETVHKLFKFIEDGDLWRWKIPNSKAFSSGLKDLDIEFNVNANNKLFDQLLELDPEHVISHGQATLLEKQRLIDDCLEKSYEISLGCGQFGSCLAVDADAISNLRSELGNQLASKSRDFNLRGIGAVVYKVPELNNDQILKVSLRSLEQEDTTCISQEYGGGGHRNASSFILSVTEFDRWKVGSSRPKDMNCRVDEVSRAWPTSVTKRQQVGIFEASIG

SEQ ID NO: 223731 - protein, 316 aa, Zea Mays
MLMLLFWYIPSAMIFFCLFCRSDSLPLEEIKDVYLLDFVGPPGFVEDIAPKVERITILDHHKTAFESLCVNATLGQNVTKVIDMQRSGATIAFDFFRNKLLTEVSTSRGNESGKDVAKVKYVPDNKAETVHKLFKFIEDGDLWRWKIPNSKAFSSGLKDLDIEFNVNANNKLFDQLLELDPEHVISHGQATLLEKQRLIDDCLEKSYEISLGCGQFGSCLAVDADAISNLRSELGNQLASKSRDFNLRGIGAVVYKVPELNNDQILKVSLRSLEQEDTTCISQEYGGGGHRNASSFILSVTEFDRWKVGSSRPKGA

SEQ ID NO: 223732 - protein, 216 aa, Zea Mays
MGHCLCGRRLLLVTAYSDGQVKVYELLDSLELDKWQLQAEFQNITDPISRFGKPACTSASIAWNPRRGGSQQASFAIGFNSDSPHFNSCKIWEFEEAHQRWLPLVELGSPEDTGDKVCAVAWAPNIGRPYEIIAVATCKGIAIWHIGLNADADGGPSTQNVALLNGHDGEVWQLEWDMGGMTLASTGGDGMVKLWQANLDGVWHEQAVLDCSGSHV

SEQ ID NO: 223733 - protein, 78 aa, Zea Mays
MVLFSGENGQCQKTFYPFCGVNEELKTFVHDMLEAGKDGDHKAAPRGSYVEGARDVAVLEAMLESSAKQGAPVQVKRF

SEQ ID NO: 223734 - protein, 263 aa, Zea Mays
MLKAGKHVIQEKPASGSTTEAETALSIYHSFQNLFPHKPIWAVGENYRFEPAFIESSKLINDIGDMMHIQVIIEGSMNSSNPYFNSTWRRNFVGGFILDMGVHFIAGLRMLVGSEITSVSSISRHVDMALPPPDNICSLFQLENGCAGVFVFAVNSRSPKILWRVDGTKGTIQVERGVDSGKHGYQVLFSGENGQCQKTFYPFCGVNEELKTFVHDMLEAGKDGDHKAAPRGSYVEGARDVAVLEAMLESSAKQGAPVQVKRF

SEQ ID NO: 223735 - protein, 89 aa, Zea Mays
MAATGLLRRAAASSLPRLPSGISLIQPPLPAPLTESQSLVIPGIGAAAGPAMELMAVPKKKVSKYKKGLRNGPKALKSVPVIIRCRRAK

SEQ ID NO: 223736 - protein, 511 aa, Zea Mays
MASGGQPQFRYTQPPSKVLHLRNLPWDCTPEELVELGTPFGKVVNTKCGVGANRNQAFIEFGDQNQAIAMISYYASSTEPAQVFSAFGFVHKIATFEKASGYQALIQFSDAETATSAKAALDGRCIPSYLLPELDVACTLRITYSAHSVLNVKYQSHRSRDFTNPYLPFLDSAKDGSGPDGKKQEAESNILLASIENMQYVVTIDVLHEVFSAFGFVQKIAIFEKNGFQALIQYPDIQTAYAAKEALEGHSIYEGGYCKLHLTFSRHTELNVKVNNERGRDYTKGNATPSSDQPSILGPQPIPSVGAAIPPAQGSVPSAATNSVMPPGDPSVALPSNPSSEPLLQAPVVSSGGPPHYPNQAILQGPLGVVARFPGYGALQFAQGSAQAQMVQPSGQGSQHMSGHVNYQLPPGSAQFMQYLSNGSHPLPNAPGPQTMPYPALSGQQLPPGLQMMQAQGFGGLPFSQGPGQPMPQFPMYGTQQFPPGMEPKMMRFSEQGGQQFTFAPRGPNSR

SEQ ID NO: 223737 - protein, 610 aa, Zea Mays
MDVEKPASKAHGFFALFDWGKKSKKRLFVGSTSSDPNLKDAADGKDIDDSTPTTSTRSNSILEDAPSLKESSEHSCSSSVIDEEAQSRRSPTVVARLMGLDSMPAASSPESNPVPLTVQPPFQPNSHEDLIGRSYVGSPLKMPGSPIDRFKMEALPPRLAKRTLSVAQYKLLSPMKNPNHISSRNAADIMEAASRIIRPGVENISSYRVHDVGNTNAARAYNPGELIGVQQRSQKLNEALRKRDGSASFRPPSGKPSDGRLRGSEGTSSSRISQANGCAPVAPKVKPGNRLDTARAMHAQEKGGMRKFGKKLETHKNPENSNAERSGLNRQKDSNQLGTSSSSVLVPNSRKQNATVTKHKVHSNPATPSRQRSNIHQINAHPRKARAANTFAGSSSQGSRKVDLQPDARANVRNNSVSKAIPKPRRLQDRRVYSDTSQSSDSINSDRSQRRIRHNIVIDEQSSFSTNKKKVSTEIVSFTFTSPVHKSLHGTHFPNHSVEKQILGNQNTVSTSSNTSNTKLDVIDGKFLGLLLEQKLRELTSGVRSPYTKPAEGAQVYHTSTALEDMASACETSSIASTDYDRESLQSFSDGKATLPYTNLATRSVQSEFY

SEQ ID NO: 223738 - protein, 105 aa, Zea Mays
MWFCSVCYQALLMLQGALIGAQNVRLSWGRSLSNKQTQPQQESMQWGAGAPAGVGDYYGGYGQGYEAYGSGYAQPQDPNMYGYGAYVGYPNYQQQPAAQQPQQQQ

SEQ ID NO: 223739 - protein, 212 aa, Zea Mays
MGQKPIVLDRARRLISKPIKFFNEMQELFINSSADGSLAMEATTCMNETHPGDDSDFNDDVCSDFSNYPQPVHDLGDDSDTLPSPNHHPSQNVDHSSSSSGLKRPQGEGVPAKRNVKPKSRTTKVVDELSATLVELRNDLKKPPPPVPMPFGNPDAILWQRLENMTITTDQKLMVGTYLAHKDQKGMRGFLSAASDITFESWVLKHLSDLDL

SEQ ID NO: 223740 - protein, 107 aa, Zea Mays
MDRVVSQLLVEIDGLSDNSQDLFIIGATNRPDLLDSALLRLGRFDKLLYVGVNTEASYRERILKAQTRKYKLHKNVSLLSVAQEWFHAAKRSVSISADPLRHMLGSS

SEQ ID NO: 223741 - protein, 160 aa, Zea Mays
MVAFSEPLATVPVHGFSFNNSNSLSWAFCNSSKPGRACVPPNRQSWVLHSTTEYASKVINNIGPRKPSAEALAKVAEELFREFQATGLSIPRPIFLKAHRWGAAFPAIAISGDDKCVWDKSTNLAICGDFCTSPSVEGAVLSATRGVSEILECLRCPSSI

SEQ ID NO: 223742 - protein, 224 aa, Zea Mays
MAGNALANYVQVYVMLPLDVITVDNTFEKEDETRAQLKKLTEAGADGVMIDVWWGLVEGKEPGVYDWSAYRQVFKLVQEAGLKLQAIMSCHQCGGNVGDVVNIPIPQWVRDVGKSNPDIFYTNRSGLTNIEYLTLGVDDQPLFHGRTAIQLYADYMKSFRENMADFLDAGVVVDIEVGLGPAGEMRYPSYPQSQGWVFPGVGEFIRQTSLGPCVGFCWKQSQKK

SEQ ID NO: 223743 - protein, 772 aa, Zea Mays
MVVLRTQGSSSMKDTIITVFGPNTFKCLEPFSVTTSDGCQIEGFLSKPGPGTGRSSGDRQFFYVNGRPIDMPKVTKLVNELYRSSNAKQYPVVILDFHIPTTSYDVNIAPDKRKVFFSSESMILQSLRETVENLYSPQQCSFSVNHIKDPEKEGDAVTDRHNEDTNAIVMVNVPSYYNNDDNEETDNEDQVSPENQKLPSVARDASPLSGGTTTQADRSAWLPSFAYDQPKRSPKEGRSLVLGRNCFRTGLAAKPTHSSTVQSSLLNFVSLNKRKHEDDCTLISEAAVLRRETCSEHMRRSSLEANFVTPNKQNHEDDCIISESPVLRSGTCSELYKRTSLEVNFPSPNKQKHDDNCTLISEIPVLRRRTNSEQARGTSLEANSAPEFNLPLETNSLKQHSSQYFGSVRTDVSPQHSKQPNIVTIGAGVTGPCDVDTTESDMDQQCGRCHSASGAPNKYSESRHQNALADSPLPDAQDYGDGAAVCYASVQYPIIQFTVAELRRRRKNCFMISHINKSYCLEKTTRCYKAATLDITVPLADEAKSNSLAAATNELDRLFSKHDFREMEVVGQFNLGFIIGKLGQDLFIVDQHASDEKYNFECLSQSTILNVQPLLEPLRLDLSPEEEVIVSMNMSTIRKNGFVLAEDLHASPGNHYLLKAVPFSKNITFGVQDVKELISMLADSQGDCSIISSYKLDTADSVCPSRVRAMLASRACRMSTMIGDPLTKAEMKKILKNMAGLRSPWNCPHGRPTMRHLADLRTMKAKDIAFKR

SEQ ID NO: 223744 - protein, 58 aa, Zea Mays
MEISSSVDCGQEKEQPTNKRPRSESTTESSTKASREKIRRDKLNERPRRMSCETRSKG

SEQ ID NO: 223745 - protein, 171 aa, Zea Mays
MDADAAAAAAAAAVSQMDPHSALVAGTVPPMATNQLTLSFQGEVYVFDSVSPDKVQAVLLLLGGRELSSLGGASSSAPYSKRLNYPHRVASLMRFREKRKERNFDKKIRYSVRKEVALRMQRNRGQFTSSKPKPDEIAASEMASADGSPNWALVEGRPPSAADYTNDASRT

SEQ ID NO: 223746 - protein, 112 aa, Zea Mays
MASADGSPNWALVEGRPPSAAECHHCGTNATATPMMRRGPDGPRTLCNACGLMWANKGLLRDVTKSPVPLQATQSAPHLDGGNGSAMSAPGSELENAAAAMTNGHESSSSGV

SEQ ID NO: 223747 - protein, 261 aa, Zea Mays
MTQTPIPTPRGYSLSLISPSNPKFNLLHGRRSIWCSEASTWDSQVLSRHAECLELEELTAISVNPSLLPALNQLLLEAYAILRPKPLDYDQRNTLVDVFRKMVNQRFGSNSGSPVVEPFGSFTMDLFTPHSDLDLSINFSANTDEQYTRKQMISIIKKFSKVLFSYQRSGIFCGVLPIVSARVPILKVIDRGTGVECDISVENKDGMTRSMIIKFVSSLDERFQILSYLVKFWAKVPWVNYYFGLVIKLQVTVPLPFVLIN

SEQ ID NO: 223748 - protein, 234 aa, Zea Mays
MTNLISGQRKVTFLPEKPHTKGIINDISFMPWSDVCFVTGGSDHGVILWEDKDDLWKPKRVHKDFHSSAVMGVAGMQQKKTILSVGCDKRIIGFDLSAGRTEFKNLIDSKCMSVLANPCDCNLYMVQTGAPGRQLRLFDVRLRQSEVHAFGWKQESSESQSALINQSWSPDGWYMSSGSADPVIHIFDIRHHGQNPCQSVQAHQKRVFKAVWHRTLPYLTSISSDLNIGIHKYS

SEQ ID NO: 223749 - protein, 392 aa, Zea Mays
MSNPGSLPASAHHEHEHTPLCRSCGAPTTSPTPAPWSGTTDSPPPAYRPIRLPAINAPTNTAAIVLSPVPQPLPVPPAAPPHAFLVPAKRITSPDDIARFHASVHGLHFLGFVAALSASVHGRKLSDPLPSPPSPAIAALLDLVSALAALVASTPPLPHSSRYGNPAFRLWHEKLTDSASELISRITATASSPADLAGADVELAPYLLDSFGNATRIDYGTGHETNFAAFLYCLARLGLITEPDYPAVVLRVFTAYLDLMRTLQDTYQLEPAGSHGVWGLDDYHFLPFIFGSAQLIDHKYMKPKSIHNPDILENFSKEYMYLACVAYVKKVKKGPFMEHSPMLDDISGVANWKKVNSGLLKMYKAEVLEKVPIMQHFLFGSLIKWYAALPTL

SEQ ID NO: 223750 - protein, 170 aa, Zea Mays
MALVELERAGFLKFVISQNVDSLHLRSGFPREKLAELHGNSFKEICPCCKTEYLRDFEIETIGLKDTPRRCSDKNCGARLKDTVLDWDDALPPEEMNLATEHCRSADLVLCLGTSLQITPACNMPLMSIKNGGRVAIVNLQATPKDKKASLVIHGLVDKVIAGVMSKEMC

SEQ ID NO: 223751 - protein, 306 aa, Zea Mays
MSREAQKLDCAAGAGGIGVLSLDLLGQVLEHLREPRDRKTCRLVSRAFERAEAAHRRALRVLRREPLPRLLRAFPALERLDLSACASLDDASLAAAVADAGGGLAGLRSVCLARANGVGWRGLEALVAACPKLAAVDLSHCVTAGDREAAALAAASELRDLRLDKCLAVTDMGLAKVAVGCPKLEKLSLKWCREISDIGIDLLAKKCPELRSLNISYLKVGNGSLGSISSLERLEELAMVCCSGIDDEGLELLSKGSDSLQSVDVSRCDHVTSEGLASLIDGRNFLQKLYAADCLHDSVFYPSWQD

SEQ ID NO: 223752 - protein, 619 aa, Zea Mays
MQGLLDQYTVAGNSMALDMVIKMANYFSDRVKNVIQNYSIERHWESLNEETGGMNDVLYQLYTITHDMKHLTLAHLFDKPCFLGLLAVQADSISGFHSNTHIPVVIGAQMRYEVTGDPLYKQIASFFMDTINSSHSYATGGTSAGEFWTDPKRLAGTLSTENEESCTTYNMLKVSRNLFRWTKEIAYADYYERALINGVLSIQRGTDPGVMIYMLPQAPGHSKAVSYHGWGTKYDSFWCCYGTGIESFSKLGDSIYFEEKGDPPALNIIQYIPSTYNWKAAGLTVTQQIKTLSSSDQYLQISFSISANTSGQTANINFRIPSWTFADGAGATLNGKDLGSISPGSFLSITKQWNSDDHLALHFPIRLRTEAIKDDRLEYASLQAVLFGPFVLAGLSTGDWDAKAGNGSAISDWIAAVPPAHNSQLVTFTQVSNGKAFVLSSANGTLTMQERPEVDGTDAAIHATFRAHPQEDSTELHDIYSTTLTGTSILLEPFDLPGTVITNNLTLSAQKSSDSLFNIVPGLDGNPNSVSLELGTKPGCFLVTGTNYSAGTRIEVNCKSSLESIGGILEQAASFSQTDPLRQYHPISFVAKGVARNFLLEPLYSLRDEFYTVYFNVRV

SEQ ID NO: 223753 - protein, 485 aa, Zea Mays
MVKAVVVGAAVVACAAERRRRAAAVIEEVESSLATPTALLRSIADAMVAEMERGLRGDIHAQLKMLISYVDSLPTGDEHGLFYALDLGGTNFRVLRVQLGGKEKRVVKQQYEEVSIPPHLMVGTSMELFDFIAAALAKFVGTEGEDFQLPEGRQRELGFTFSFPVNQTSISSGTLIKWTKGFSINGTVGEDVVSELSRAMERQGLDMKATALVNDTVGTLAGGRYMDTDVVAAVILGTGTNAAYVEHANAIPKWTGLLPKSGKMVINTEWGSFKSNKLPLSEYDKAMDFESLNPGEQIYEKMISGMYLGEIVRRILLKLAHEASLFGDVVPPKLELPFILRTPDMSAMHHDSSHDLKTLGAKLKDIVGVADTSLEVRYITRHICDLVAERAARLAAAGVYSILKKIGRDKVPSGGGKMPRTVVALDGGLYEHYKKFSSCVEATLTDLLGEEASSSVVAKLANDGSGIGAALLAASHSQYQYGASD

SEQ ID NO: 223754 - protein, 797 aa, Zea Mays
MARGGGGGCCPPMDLMRSEAMQLVQLNIDKSPFQRTYAAQIKRCSEMARKLRFFKEQMSKADITASPTQLNGTHMDFDELEIKLGELEAELTEVNANNEKLQRTYNELLEYHTVLQKAGEFFYSAQRTAAAQQMEMEANQSGQTSLESPLLEQEMTTDPSKQVKLGSLSGLVPKEKAMAFERILFRATRGNIFLRQEPVDEPVTDPVSREKVTKNAFVIFYSGERAKTKILKICDAFNANRYPFPEDVGKQLHAVQEVSGKISELKTTIDMGLAHRDSILKNIASDFEQWNHLVKKEKAIYHTLNMLSVDVTKKCLVAEGWSPIFASIQIQDALQRATLDSKSQVGSIFQVLNTKESPPTYFQTNKFTSAFQEIVDAYGVAKYQEANPGVFTIVTFPFLFAVMFGDWGHGICLLLATLYLIIREKKLASQKLGDIMEMMFGGRYVIMMMAVFSIYTGLIYNEFFSVPFGLFGKSAYACRDSSCSDATTEGLLKVRDAYPFGVDPVWHGSRSELPFLNSLKMKMSILLGVAQMNLGIVISYFNAKFFRNSINVWYQFIPQLIFLNSLFGYLSLLIIIKWCTGSKADLYHVMIYMFLSPTDDLSENQLFSGQKTVQLVLLLLALVSVPWMLIPKPLLLKKQHQQRHQGHQYAMLQGIDESVGAELGEHHEDAHDHEEFEFGEVFVHQLIHTIEFVLGAVSNTASYLRLWALSLAHSELSTVFYEKVLMTAYGFNNVFILIIGVVIFIFATIGVLLVMETLSAFLHALRLHWVEFQNKFYEGDGYKFAPFSFALIREEED

SEQ ID NO: 223755 - protein, 993 aa, Zea Mays
MDLSRLGSGEVYDDDATSSGPDDDDNDKGPADVDGLREMLQRCRNELEVARLNSTMFEEKAQRISESAIALKDRAEGAQRDVSAAVATVQEVIVKEADAKEAVQKATMALSMAEARLQLASEALDAKRGSVGPMEVSIEGVEEEALVSAQEEIKDCRAALLRCEEELERIQEQKMNLQKEVDRLTELAEKAQLDASKAEEDVTNIMVLAEQAVALEMKATQRVNDAEAVLLKAEKVISSVDTVVELTSLAEEQKSAEEDSVSEGYEYSSNGTDDVPVRDEVSSIERLMVGDLTVEGIEQLEPSREIYDEASSDKMSVEPQKEAEPDSDKLKQGKKQEMERKEFTKEPLSAQKSLKKRSSRFFPASFFSSKADGEFTPTSVFRGLMKSVQKQAPKLVVGILLLGAGAFFLNRAEKSQLFQQQEIATSIGKVTSTTKPIVREIRQIPQRVKKLIELLPHQEVNEEEASLFDILYLLLASVIFVPLFQKIPGGSPVLGYLAAGVLIGPYGLSIIRNVHGTKAIAEFGVVFLLFNIGLELSVERLSSMKKYVFGLGSAQVLATTAAVGVIAHRFAVLPGPAAIVVGSGLALSSTAVVLQVLQERGESTSRHGRATFSVLLFQDLAVVVLLILIPLISPNSSKGGVGFQAIAEAMGMAAVKAVAAITAIIAGGRLLLRPIYKQIAENQNAEIFSANTLLVIFGTSLLTARAGLSMALGAFLAGLLLAETEFSLQVESDIAPYRGLLLGLFFMTVGMSIDPKLLLSNFPMISMILGLLIIGKTLLVTFVGRVFGVSTIAAIRVGLLLAPGGEFAFVAFGEAVNQGLLSPQLSSLLFLVVGISMALTPWLAAGGQFLASKFEQHDVRSLLPVESETDDLHDHIIILGFGRVGQIVAQLLSERLIPFVALDVRSDRVAVGRALDLPVYFGDAGSREVLHKVGAERACAAAITLDTPGANYRAVWALNKYFPNVKTFVRAHDVDHGVNLEKAGATAYLQHIF

SEQ ID NO: 223756 - protein, 959 aa, Zea Mays
MDLSRLASVAGPSRAAPRAGLQIGAAGNGFRVCSLRHRGAGNGRLTSAAALLRGSSGLFYLAPARGGPPRLRARGRPRCQGSDSLAYVDGPLEAAKGSGEVYDDDATSSGPDDDDNDKGPADVDGLREMLQRCRNELEVARLNSTMFEEKAQRISESAIALKDRAEGAQRDVSAAVATVQEVIVKEADAKEAVQKATMALSMAEARLQLASEALDAKRGSVGPMEVSIEGVEEEALVSAQEEIKDCRAALLRCEEELERIQEQKMNLQKEVDRLTELAEKAQLDASKAEEDVTNIMVLAEQAVALEMKATQRVNDAEAVLLKAEKVISSVDTVVELTSLAEEQKSAEEDSVSEGYEYSSNGTDDVPVRDEVSSIERLMVGDLTVEGIEQLEPSREIYDEASSDKMSVEPQKEAEPDSDKLKQGKKQEMERKEFTKEPLSAQKSLKKRSSRFFPASFFSSKADGEFTPTSVFRGLMKSVQKQAPKLVVGILLLGAGAFFLNRAEKSQLFQQQEIATSIGKVTSTTKPIVREIRQIPQRVKKLIELLPHQEVNEEEASLFDILYLLLASVIFVPLFQKIPGGSPVLGYLAAGVLIGPYGLSIIRNVHGTKAIAEFGVVFLLFNIGLELSVERLSSMKKYVFGLGSAQVLATTAAVGVIAHRFAVLPGPAAIVVGSGLALSSTAVVLQVLQERGESTSRHGRATFSVLLFQDLAVVVLLILIPLISPNSSKGGVGFQAIAEAMGMAAVKAVAAITAIIAGGRLLLRPIYKQIAENQNAEIFSANTLLVIFGTSLLTARAGLSMALGAFLAGLLLAETEFSLQVGMSIDPKLLLSNFPMISMILGLLIIGKTLLVTFVGRVFGVSTIAAIRVGLLLAPGGEFAFVAFGEAVNQGLLSPQLSSLLFLVVGISMALTPWLAAGGQFLASKFEQHDVRSLLPVESETDDLHDHIIILGFGRVGQSG

SEQ ID NO: 223757 - protein, 225 aa, Zea Mays
MQVAALVPKTELDGEMGDAHIALQARLMSQALRKLSHSLSLSQTILLFINQIRAKVATFGFGGPTEVTSGGNALKFYASVRLNIRRIGLVKKGEETIGSQIAVKIVKNKHAPPFKTAQFELEFGKGICRSSELFELGLKHKLIRKSGGSYYSFNGKAFNGKSNLKSYLTENKSVANDLEMELKRLMGTDASKEQEAGDSSQSDFPEESVTPEASSEEDLGAIIEG

SEQ ID NO: 223758 - protein, 162 aa, Zea Mays
MLGHPVKTKIDWSVAPSSYMKEGMRTSVEAILLVQEHNHPHILLLQIGNTFCKLPGGRLKPGENEIEGLKRKLCSKLAVNSPSFPPNWQVGECVAVWWRPNFETVMYPYCPPHITKPKECKKLFIVHLSEREYFAVPRNLKLLAVPLFELYDNVQEFVKICF

SEQ ID NO: 223759 - protein, 394 aa, Zea Mays
MEEEIRKEFQSNGFSIGGAGPEDAAQILSTLLTYCINYKMSPADLVSNWEVYYLNRQLDGLKLESSYLDGFLSHLQNEVKDRIIKEEANLHIYSSNDVDMLLSNSHVDEAAFHDTPGYEQEKAPEGSSISELTPLASDRPSSSRVAKTNADRITPFATRVNKFTQQYVLNADNAVGVPSKSAEITEDEIIRRVQPSQRCYLQVQRSQPEPGCRFMYDRMEDRFNYLEDRIRKSASLFSASGFCGQPADATLASEEKMFAVGTVACDGEGHLNEKSILLQGSVEHSRGQCVRLDLKDLDHFSLFPGQVVGIEGHNPSGHCFVASKLFDSIPVSVDAQLPSAKKQAIDNESNQNSDAGTLSRALSSVPIQQPIICCLSHFKNFFHMLVESRLSFSY

SEQ ID NO: 223760 - protein, 380 aa, Zea Mays
MASRGRGGGGGKGPSGGRGGEGRGRGIRGGGGYHHGDDGGGERGGRGDPGRGRGVGGRGRGPGGRGVDDHQQQPPPLGNTEGGGQGRGGMAVAVPPARPAAPCPLAPDAAAPAFPAAAASSSAQAPRAPTEAAGAALADGMGKLAVADDRPAAPPVPAGKPVAQGPAHQPQEAPPLSRKRIVPPPRPGLGTSGRKLAVRANHFFVEVSVNDIFHYDVLINPEPKARKTNRMLLSELVKIHGATSLAHKTPAYDGSKSLYTAGELPFKSMEFVVKLGKAGREVDYKVTIRYAARPNVYQLKQLINSQLRNTPFDAIQALDVVLRESPSLNYVTLSRSFFSKKFGDDDIGGGLECWRGYYQSLRPTQMGLSLNIVSVWEFCV

SEQ ID NO: 223761 - protein, 368 aa, Zea Mays
MFYSHQLLARKAPLGQIWMAATLHSKINRKRLDKLDIIKICEEILNPSVPMALRLSGILMGGVVIVYERKVKLLYTDVSRLLTEINEAWRIKPVTDPTVLPKGKTQAKYEAVTLPEINMVVEQPMFFSEPDGAKFRRMGLEDLDEQYVQVNLDDDDFSHADDRHQAKAVNITLVDNFESGLAETDLFNHFERFDIADDETTVNITPDEYPQVPSTLIPSPPRQEDIPQQEEPYYAAPSPVHGEPQQGGPEDQEEQKMKQPPKASKRKARWEVPRVIMDNNQMMIPGNIYQTWLKDASSLVSKRRKLNSNFNFIRSTKLCSSGRTALRSSPQKLLQEGSDHHHKNHNRKTHHLRLGESMRWKQVVCRWI

SEQ ID NO: 223762 - protein, 381 aa, Zea Mays
MFYSHQLLARKAPLGQIWMAATLHSKINRKRLDKLDIIKICEEILNPSVPMALRLSGILMGGVVIVYERKVKLLYTDVSRLLTEINEAWRIKPVTDPTVLPKGKTQAKYEAVTLPEINMVVEQPMFFSEPDGAKFRRMGLEDLDEQYVQVNLDDDDFSHADDRHQAKAVNITLVDNFESGLAETDLFNHFERFDIADDETTVNITPDEYPQVPSTLIPSPPRQEDIPQQEEPYYAAPSPVHGEPQQGGPEDQEEQKMKQPPKASKRKARWEVPRVIMDNNQMMIPGNIYQTWLKDASSLVSKRRKLNSNFNFIRSTKISDLMHIPPVALISHDNLFSELCYPKPLMQLWKDCTEVKSTKASSGHFIICNIMSLLTKETILF

SEQ ID NO: 223763 - protein, 409 aa, Zea Mays
MSLIRQDVKNSLQPLFKHVEQGSEIREKIICFLRDKVFPLKAELLKPQAEMERFITDLIKKSVQDVTGSEFELFMGFLRSLSIFGDSAPRESFQELIEIIQAQADLNSQFNVSDIDHIERWISCMYMALPIFMRGASASKFLNYFVKQIVPAFEKIPEEKKLDLLKTIASSSPYAAAQDSRQLLPSVVQLLKKYMPGKKVEDINHNYVECLLYTFHHLAHKTPNTTNSLCGYKIVTGQPSDRLGEDFSEHYKDFTERLTGTEETVRAASKRLTQGMADFNKAISSAKTDEEKTKIKGDQQTSTRTMRSYNNILAMTQSLHSKSPLFIGDKKITLSWMEQPNKAAATKAGGKRSQPSTNGNDPANKKGRGGMQNQLVNRAFEGLSHVGRGSGRGRGRGGRGRGRGWSGYH

SEQ ID NO: 223764 - protein, 228 aa, Zea Mays
MVGTGKRERIAIRRIDNLAARQVTFSKRRRGLFKKAEELSILCDAEVGLVVFSATGKLFHFASSSMKQVIDRYDSHSKTLQRSEPQSSQLQSHMDDGTCARLKEELAETSLKLRQMRGEELQRLSVEQLQELEKTLESGLGSVLKTKSQKILDEISGLERKRTQLIEENSRLKEQVTRMSRMETQLGADPEFVYEEGQSSESVTNTSYPRPSTDTDDCSDTSLRLGSK

SEQ ID NO: 223765 - protein, 53 aa, Zea Mays
MVHPCTTRGLAHGVTVSETGCLVVDVKRSGAPPVSVDNYTGASKTHNEEQTRS

SEQ ID NO: 223766 - protein, 212 aa, Zea Mays
MNMFPHLSISRTMCCAIKRCLDQSLLDRAINSMNRTPGIVINRSEPLQPTITGEIETPVAVASVEFIDPREPVLVIPILRAGLALAELASSVLPATKTYHLGFRRDEETLQPSIYLNNLPDKIPEGTRVLVVDPMLATGGTMVAAIDLLIECGVTSKQIKVISAIASPPALQKLNNKFPGLHVYTGMIDPEVNEKGFIVPGLGDAGDRSFAT

SEQ ID NO: 223767 - protein, 392 aa, Zea Mays
MGRSRRHEGGGGGERRGAGAGGVAAAAFAALLLGCVVMALVGGAAAQGPRLPSDYKTLSGAAPLVVARGGFSGAFPDSSEGAYSFGASASAPGTAMWCDVQLTKDGVGLCLRDVNMKNCTTVDQTYPGRKRTYVIDGVHKTGWFVPDFTSAELLQSVYLTQAIWSRTERMDGIYPIVTVPDVQSIVNTSPIWLNVQHPIFYKQRDLDMSSYIHSIRKLVRMDYISSPEIGFLRNISARVRRRTKLVFSFLDKKLLDHSVNQTYGSLARNLTFVRSVASGILVPKDYIWPVTADNYLLPSTSIVTEAHEAGLEIYASGFVNDKAVPFNYSYDPLAEYLNFVGDGGFSVDGVLSDYPITASEAIGCFANLNSSKTDHVHLYSYRETLSYLPQWR

SEQ ID NO: 223768 - protein, 1591 aa, Zea Mays
MCSDMSGQRHHHATRENAPEDNGYHRTPHGADHLEQSQAADTDNKHINHLSTDDNVPSSASGHKHGAISRHPSTSSVDDRSIKSGDDSDGAESTSGRSSNTEISFMNNDTIWIPPQAADKEDEAQSFATSIAYDDDDDDYSDGIKWGQSSFPSPGKQHDADTSNHREEREKAMLEAMNGQLKVLVSRFLASAGIPSSNEEGSDSWLDIVTSLSWEAALLIKPDGSMGKEMDPGSYIKVKCVASGTRRQSEVIKGLVFKKNTAHKHMPTNCHNPRLLLLKGVLGHSDIGLSSFSSMDQEKDLLERAIGKMMEICSPNVVLVEKTVSRNIQELLLKEGVTLILDMKLNRLQRIARCTGSPIISFSEVLDKPKLKQCDYFHIEKFIEEHNNASEGGKMPSKTLMFLEGFPRPLGCTILLKGANSEELKKVKQVMHFTVFAAYHLILETSFFEDQRVFLNDKSTPKEISVTATEGASPTAYDVAALSGAIPSFPSHGDPPALRLFHATSNSYADVNKPLTYPENGDAFSSVSSSSANDLEQGTSIRPNNAERLTSLVQGPLRKLFTDMLRHQNIYLPVTSLQEANDISKEVRAESSQETVINGFHRPEIEESVVSIENGDSINDAQKQEIAQAIMPRGSSANDKDAESSVMGDNGAHSTSIIIKEKYVDDDQADDALDSHSILILMSSQCPEKQVICEQSHLTRIKYYGSFDVSLGRYLQDILQNQKLSCSSCGEPPESHMYSYTHRNGNLTVLVKHLVPQHHLPGESEGKVWMWTRCSRCDHEHGVSKPTPRVLISAEARNLSFGKFLELSFSSHSAARRLGSKVAMFRYSSVEIYTTCKPQPTLQFVNPIRQDWFEGQRRNVHAKGMALFSGVARFLQNLKNEHPDAITLAIHCGLAFPVKDFTELEELLIKEKAQFESSVDKATDQNGVPTSSVHELLNINWYYQDLLLELYIWDRRLHQLFYCKSVKLESVSNYKNLADTVDGICGDKFGVDKKIDEFTYDETTAALGVASTTEPASNKLDHQSGDAAASLLDESQEAGHSEIPCNGGSKAEKSSIAHGQIKVDGTTKTGNDPCFEISNDKKVQVNLTVADPISMEQERCSTLQQFKYPYWDDRERWIWNSISESQLAYRNDIQIGYLEKFELINNYLPHYLPPLFEQHDDADSPHFAVGPGGNILCIMEDEISSIIARALAISDERRHLIDLKFENGMDYSKGEHAKAMEKSYSFLSENSFTSSPWSSTDSEASLSSLSSFSSFSSDDFSGYDSSSLLSSMHPEMTVNGKITLKGKYSVTVVYDNQFFALRKKCCPSELAYITSLSRCKKWNAQGGKSKAYFAKTTDDRFIIKQIKKTEFDSFIKFAPDYFRHVYHSLDTGSQTCLAKILGIYQVKQIRHGKEVKIDLMVMENLLFGHNISRIYDLKGVTFSRRVTDSNDHDTVYLDQNYVEDMGFSPIYIGGRTKHLLQRAIWNDTSFLTSVNVMDYSLLVGVDKEKHELVFGIIDYLRQYTWDKQLETWVKTSLVVPKNVSPTVISPKEYKKRFRKFMAKYFLSVPDTWSSDNSSNPCKSFGQSNHKLAEVHNGDSLLQHPNEAEGCV

SEQ ID NO: 223769 - protein, 1564 aa, Zea Mays
MCSDMSGQRHHHATSRENAPEDNGYHRTPHGADHLEQSQAADTDNKHINHLSTDDNVPSSASGHKHGAISRHPSTSSVDDRSIKSGDDSDGAESTSGRSSNTEISFMNNDTIWIPPQAADKEDEAQSFATSIAYDDDDDDYSDGIKWGQSSFPSPGKQHDADTSNHREEREKAMLEAMNGQLKVLVSRFLASAGIPSSNEEGSDSWLDIVTSLSWEAALLIKPDGSMGKEMDPGSYIKVKCVASGTRRQSEVIKGLVFKKNTAHKHMPTNCHNPRLLLLKGVLGHSDIGLSSFSSMDQEKDLLERAIGKMMEICSPNVVLVEKTVSRNIQELLLKEEVLDKPKLKQCDYFHIEKFIEEHNNASEGGKMPSKTLMFLEGFPRPLGCTILLKGANSEELKKVKQVMHFTVFAAYHLILETSFFEDQRVFLNDKSTPKEISVTATEGASPTAYDVAALSGAIPSFPSHGDPPALRLFHATSNSYADVNKPLTYPENGDAFSSVSSSSANDLEQGTSIRPNNAERLTSLVQGPLRKLFTDMLRHQNIYLPVTSLQEANDISKEVRAESSQETVINGFHRPEIEESVVSIENGDSINDAQKQEIAQAIMPRGSSANDKDAESSVMGDNGAHSTSIIIKEKYVDDDQADDALDSHSILILMSSQCPEKQVICEQSHLTRIKYYGSFDVSLGRYLQDILQNQKLSCSSCGEPPESHMYSYTHRNGNLTVLVKHLVPQHHLPGESEGKVWMWTRCSRCDHEHGVSKPTPRVLISAEARNLSFGKFLELSFSSHSAARRLGSKVAMFRYSSVEIYTTCKPQPTLQFVNPIRQDWFEGQRRNVHAKGMALFSGVARFLQNLKNEHPDAITLAIHCGLAFPVKDFTELEELLIKEKAQFESSVDKATDQNGVPTSSVHELLNINWYYQDLLLELYIWDRRLHQLFYCKSVKLESVSNYKNLADTVDGICGDKFGVDKKIDEFTYDETTAALGVASTTEPASNKLDHQSGDAAASLLDESQEAGHSEIPCNGGSKAEKSSIAHGQIKVDGTTKTGNDPCFEISNDKKVQVNLTVADPISMEQERCSTLQQFKYPYWDDRERWIWNSISESQLAYRNDIQIGYLEKFELINNYLPHYLPPLFEQHDDADSPHFAVGPGGNILCIMEDEISSIIARALAISDERRHLIDLKFENGMDYSKGEHAKAMEKSYSFLSENSFTSSPWSSTDSEASLSSLSSFSSFSSDDFSGYDSSSLLSSMHPEMTVNGKITLKGKYSVTVVYDNQFFALRKKCCPSELAYITSLSRCKKWNAQGGKSKAYFAKTTDDRFIIKQIKKTEFDSFIKFAPDYFRHVYHSLDTGSQTCLAKILGIYQVKQIRHGKEVKIDLMVMENLLFGHNISRIYDLKGVTFSRRVTDSNDHDTVYLDQNYVEDMGFSPIYIGGRTKHLLQRAIWNDTSFLTSVNVMDYSLLVGVDKEKHELVFGIIDYLRQYTWDKQLETWVKTSLVVPKNVSPTVISPKEYKKRFRKFMAKYFLSVPDTWSSDNSSNPCKSFGQSNHKLAEVHNGDSLLQHPNEAEGCV

SEQ ID NO: 223770 - protein, 822 aa, Zea Mays
MWTRCSRCDHEHGVSKPTPRVLISAEARNLSFGKFLELSFSSHSAARRLGSKVAMFRYSSVEIYTTCKPQPTLQFVNPIRQDWFEGQRRNVHAKGMALFSGVARFLQNLKNEHPDAITLAIHCGLAFPVKDFTELEELLIKEKAQFESSVDKATDQNGVPTSSVHELLNINWYYQDLLLELYIWDRRLHQLFYCKSVKLESVSNYKNLADTVDGICGDKFGVDKKIDEFTYDETTAALGVASTTEPASNKLDHQSGDAAASLLDESQEAGHSEIPCNGGSKAEKSSIAHGQIKVDGTTKTGNDPCFEISNDKKVQVNLTVADPISMEQERCSTLQQFKYPYWDDRERWIWNSISESQLAYRNDIQIGYLEKFELINNYLPHYLPPLFEQHDDADSPHFAVGPGGNILCIMEDEISSIIARALAISDERRHLIDLKFENGMDYSKGEHAKAMEKSYSFLSENSFTSSPWSSTDSEASLSSLSSFSSFSSDDFSGYDSSSLLSSMHPEMTVNGKITLKGKYSVTVVYDNQFFALRKKCCPSELAYITSLSRCKKWNAQGGKSKAYFAKTTDDRFIIKQIKKTEFDSFIKFAPDYFRHVYHSLDTGSQTCLAKILGIYQVKQIRHGKEVKIDLMVMENLLFGHNISRIYDLKGVTFSRRVTDSNDHDTVYLDQNYVEDMGFSPIYIGGRTKHLLQRAIWNDTSFLTSVNVMDYSLLVGVDKEKHELVFGIIDYLRQYTWDKQLETWVKTSLVVPKNVSPTVISPKEYKKRFRKFMAKYFLSVPDTWSSDNSSNPCKSFGQSNHKLAEVHNGDSLLQHPNEAEGCV

SEQ ID NO: 223771 - protein, 81 aa, Zea Mays
MSGCKTGNFMLSTMCVDMMLVEMLGPIFNSWGASSSASYACTSPASPAGHRPRCTFPPCSVHVPMCHSCFSLFRIVRVLLQ

SEQ ID NO: 223772 - protein, 128 aa, Zea Mays
MSSASSSAAAANAGEGSGGAEEGVEITYVSYGGEQHLPLVMSLVDEELSEPYSIFTYRYFVYLWPQLTFLVTLEAEVTNKGALALYGRLGFIRAKRLYRYYLNGVDAFRLKLLFPRPDNDPQIFGIID

SEQ ID NO: 223773 - protein, 205 aa, Zea Mays
MPCCRARTSFPIRARRGSSGSSATRPTATCPHGPPLPGSIYQISHLSSFSSNQVRFPFLSTLSLVSGGRWPHLPLPVALMAPSTALAPVAFRSAFSTPLASKPTRNRMNIEGAFCLPCSTRKRASYRPFRVYSLFGGKKDKDENGDEAPSKAGIFGNMQNLYETVKKAQMVVQVEAVRVQKELAATEIDGYCEGELIKSCSFQGK

SEQ ID NO: 223774 - protein, 839 aa, Zea Mays
MAEPEPLPQVSSEPTTPPQEGSGRTKTKNKKNRSKKQPKRAGADTDGLSSGASTMVEDPFFVLAGGKEGGFLDLEEIDEADFGIFGGVLDDVGQSVEEAGKDHGKKKKKTKKRKRGGDGEGFSGDAALVVENDQVDVEKVEKKVEDGEKGDKKGKRKMNMKKRKVKDNEMNRESDEDVASDKAEDDTENMEQNEDDELILGEDDVSAWRELRLHPLLLKAMRRLGFKEPTPIQKSCFPAAAHRGKDVIGAAETGSGKTLAFGLPVLQRLLEEREKATRLQQEDEKMEERSCGSPLRALILTPTRELAKQVCDHLKDVAKFLGIHVVPIVGGLSMEKQERLLKKKPEIVVGTPGRLWEHMSMNNQHLVELHSLSFFILDEADRMIERGHFRELQSIIEMLPLTNGSDEQAARTMPNCETVPILQIKKRQTFVFSATLALSSNFRKKLKRGLSTSKASTPDDVSSIEALSKQAGMKSNAEIVDLTKASILPEKLEESFIECSEEDKDAYLYYILSVHGQGRTIIFCTSIAALRHISSILRILGINVLTNHAQMQQRARMKAVDRFRESENSILVATDGFARGMDFDDVRTVIHYQLPHSTDVYIHRSGRTARKSLAGCSIALISPTDKSRFYSLCKSLSKENLQQFPVDHTYMSGVMNRLSLARQIDKIARKTSQENANKSWLQRNAESMGLILDTSDSEEDHVQGHKKRKATSAHLQKLQQELSDLLQCPLQPKTFSRRYLAGAGVSPLLQKQLEELAKRNASNNSSKSKNKGSGFVVIGQDRVEPLQALQNSGQEVCVNIDKEREKRRVAENWRRKKHEEKKRTQEQKRKDKRKAKEMA

SEQ ID NO: 223775 - protein, 167 aa, Zea Mays
MAEICCEEAKSTPATAVAAASVSATAAAAAAVAVASSALERRRRRLEMRRFRVASDPEELVAEDVRAAKRQRLARTLSGSCPDAGSDSDRPALPRYGVTSVCGRRREMEDTVSIRPDFLPGTSKHNFFGVFDGHGCSHRRCARTTCTRLSRTSTRRLPLARRRRGRA

SEQ ID NO: 223776 - protein, 138 aa, Zea Mays
MAGRGGGSKSSLYAALGVASDCSDAELRSAYRKLAMKWHPDKCAGAGSSGGGADAAKARFQKIQGAYAVLSDPNKRILYDVGAYDGEGDDDDNGKGESLEDLQRQFEELFLRPSPSSFSPQNDAAGKSASKSRPAGRK

SEQ ID NO: 223777 - protein, 152 aa, Zea Mays
MAGRGGGSKSSLYAALGVASDCSDAELRSAYRKLAMKWHPDKCAGAGSSGGGADAAKARFQKIQGAYAVLSDPNKRILYDVGAYDGEGDDDVRRRGDPRRHSRGHEPGRPCRRQRQGGEPGGPAAAVRGAVPEAVAVVLLAERRSWEVGFQE

SEQ ID NO: 223778 - protein, 259 aa, Zea Mays
MPRNNNPSDEENKAAATTASVPSRKSWLPAGFGGSGKHGATIDIPLGDPKKKERELLSWEQELKRREQDIKRREDAMNRAGVTLEVRNWPQFYPIIHHDIASEIPIHAQKLQYTAFASWLGLIACLVWNLFAVLVESIHTEDIVIFLLAVIYAIFGCPLSYMLWYRPLYRAMRTDSVVTFGQFFIFYSVHVGFCVVAAIAPPIIFKGKTLTGILVAIEVLDGDIFAGVLYLLGFALFTLESFISIWVLERVYMYFRGHR

SEQ ID NO: 223779 - protein, 166 aa, Zea Mays
MPKPPAGFVLNEWGRCIAAAFKCIFIIVRSWPAAGHQYHRLGPPTSCNAGPVLSPFDREFSTKKISIMKRIALSALIKIYGCFLFHLASDFDNMRPHLIIVGALKMINIIAPSWRVIPATNMIDKIRKDPQLKKKRKPRTANRLQTPFRQPRHQEEPARGEIFAIC

SEQ ID NO: 223780 - protein, 112 aa, Zea Mays
MPKPPAGFVLNEWGRCIAAAFKCIFIIVRSWPAAGHQYHRLGPPTSCNAGPVLSPFDREFSTKKISIMKRLLHEFMRKQALHLQVYTEEIRVQSSGLYLPRIRSRVQHIHRR

SEQ ID NO: 223781 - protein, 345 aa, Zea Mays
MLPSRRKSAVLGVVALSSSVLILLHAFSLPAASALSVGLARRHRHDATPGLAAGGCDVFSGSWVLDGGSSASAAYTGYNCPLIDAEFNCQLYGRPDSDYLRYLWKPAGCELPRFDGADFLTRMKGKTVMFVGDSLGRNQWESLVCLLHAAAPQSPAQLVSADPGGHRRGPGEAGADAGRHLRERRVVARRRRALLQLRPLVDAHRLDAGVGLHGRVWAILRGHGPHGGVPARPHHLGQLGGPQPRSSQDPCLLPVHVAHALQLEGMAQPGVEELLRRDGTGDRAQLDRPGLGPGPGDPGRAAGHEEPRPSPRHHGAVGDAEGRAPVGIQRRLLAGAARQPRRRLR

SEQ ID NO: 223782 - protein, 426 aa, Zea Mays
MALVLHSGAGNKNAFKALIAAEYSGVKVELTKDFEMGVSNKTPEFLKMNPLGKVPVLETPDGPVFESNAIARYVARLKDDNPLFGSSRIEQAHVEQWMDFAATEVDPGVGWYLYPRLGYIPYAHTTEETAIASLKRSLGALNTHLALNTYLVGHSVTLADIVLTCNLYHGIARILTKSFTSDFPHVERYFWTMVNQPNFKKVIGEVKQAESVPPVLKKGVPPKESKAKDVKKETPKEAPKPKVVEVPAEEEAPKPKPKNPLDLLPPSKMVLDDWKRLYSNTKTNFREVAIKGFWDMYDPEGYSLWFCDYKYNDENTVSFVTLNKVGGFLQRMDLCRKYAFGKMLVVGSEPPFKLKGLWLFRGQEVPKFVMDEVYDMELYEWTKVDISDEAQKERVNAMIEDQEPFEGEALLDAKCFKVRNEASEDT

SEQ ID NO: 223783 - protein, 895 aa, Zea Mays
MRCSDVTELADVRKHFKSKYGKEFEAAALEVRPDSGVNRLIIEKLSAGAPDVQTKIKTLSSIAEEHNIKWEPKAFEEKLQQPTEGHLYGSATYSGGNTSTMGSSTSSISTPQPTYSGGPPYPQYSATVPDAVSRNEDSNQNRERKPLVTGANWNVEFKDATSAAQAAAESAEMASIAARAAAELASRGNYSGDKGTGAYDSAAYSSKNTVRKQRAEHVVKDESFHDQSSGVNDPSEMPSNSRNFFGGTETSHVDSENISTAPYQQFHAYNPDSHPYVYEMPTEPPRAHSPDPRFDDLYERESDIGRSEVDPFDFPRENFQDTASVGHNFKDVEIRTPSYDQESTDDYYGNFNSSHDTLAHGSSTTAWDKQNDKAQDNSSPVVFDQYDSDVEQENLLDTFSSKHTEQLPAPGDHMRFSTADWSEQHTSESPSKQRTSALFSRTETQLSDNLGTNKSDIPSPHSYHNMRPAFDSDGGSSDEEIATTTHAVPLRSHSGGSASSVLNKGGGPDASPIFDYSGAHAVRNLNRVQSRDSDLSEEETDLDKFKGSSFARANEQQLLPSAIRTSATSDDKEDDISLNFGKLTPGLRNKPRQPPPYTKVSRESILPKQSLPKVSAGTEESVDSEENTTFKQDRSSPQSSFSARTSSGKDYDSGLYERNRSVGTHWEAKSTIARNSSGLDDAEKLSDLPTNISLPTTKSSERWNSSKVPYHEKPGIGTRREVRSTLARNYFDSDDSEEELEQQQIPQSKQSGVLIQSRRTREVTSDTKRDGRFQTGAQYGDETESVTSKTQVHQGFNSSSTERSERRDPSVYPRVAVQRSSSKAEQIESPMERGKPQGAEMRSTLFRGNEEDTETSSGTPKESTPKTPPAHVHPKLPTDYDSFAAHFRSLRTNRP

SEQ ID NO: 223784 - protein, 135 aa, Zea Mays
MVAIMRSLRHPNIVLLMGAVTQPPNLSIVTEYLSRGSLYRLLHRHAARENLEERRRLSMAFDVAKGMNYLHKRNPPIVHRDLKSPNLLVDKKYTVKVCDFGLSRLKANTFLSSKTAAGTLRCNLMGAYDIAAAME

SEQ ID NO: 223785 - protein, 378 aa, Zea Mays
MEISFEAWEGVQRHGQDLADRLAQGFTGLLQAPPQFPWPPAPHKRMPFDIDLPVVPFGAGVPKKDLPFPAAAAAVSSVIDIGGRLGQAGAELGASVGGAVQHAVRHLPVPFRNAQIRRRTLPPAPPQAPLPPATSVGEGAAGRSVERAAVDRCPLEAAAAAAAAATGSAAASSVSGHVSGDDLDEDDEGFGCGIGTLGNFKKANGTVNMSATYNSRSQDIESSVVAHGDLWRLEASRGGSTSGNGTSPLYLVQLGPLLFVRDSTLLLPVHLSKQHLLWYGYDRKNGVHSLCPAIWSKHRRWLMMSMMCLNPIACSFMDLQFPNGQLTYVAGEGISASGFLPLFGGLLQAQGKYPGETRVSFSCKELLKPWHGKDLVLW

SEQ ID NO: 223786 - protein, 100 aa, Zea Mays
MSKGPVPFANIGKRAKDLLYKDYNFDQKFSLSTSSGSGLNLTATGVKINEDFIGDIRTQHKSSRTTIDVTVDSDSKAKVCGPKEHVDFGMCQPQSLLMKH

SEQ ID NO: 223787 - protein, 178 aa, Zea Mays
MFANVIDSSQVRVQRGGSSWSAARSSRLSTQDPAEVEQLREELRRHQDFLKQQAAQHEYYATQIQQQQNTHTTTSTGSRDTRPGAPPPPPHVHYPWSSPPPTPTSPSTEHQVLVRFGGRGPDHDQAKAAARSGCRRDGDAHQRVRAEECHSSWLDGCLWIVVLVLLACCLRMEGKLLV

SEQ ID NO: 223788 - protein, 295 aa, Zea Mays
MKNSWGKNWGEQGYVRIKMGTGKPEGVCGIYTMASYPLKNATRWGRCPESKNEATQYGLDMTEQQYLEHSIPWIAANDAAWRAFCRYWASAEFKAKSVRHSSNHGTESYHKYGGDDHFRLAKRMEASTGAVPSDVQIYLRGHRGPDPANLDVLYSQKQQIVWYTMFANVIDSSQVRVQRGGSSWSAARSSRLSTQDPAEVEQLREELRRHQDFLKQQAAQHEYYATQIQQQQNTHTTTSTGSRDTRPGAPPPPPHVHYPWSSPPPTPTSPSTEHQTPPAILPTHEREDGLDFVKT

SEQ ID NO: 223789 - protein, 355 aa, Zea Mays
MVEAKFVKLINHSKILLRKQWLYGIVDDFVTKQLPHNVTWGLSLLYALEHKGDRALTSTQGELAHALRFLASVVSQSFIAFGDILELHKKFLELSGGINRIFELEEFTRFAQRNTVVSPNAISAASKETISFHEVDIVTPSQKLLARKLSCDVVQGKSLLLTGPNGSGKSSIFRVLRDLWPTFSGRVTKPSEGMFHVPQRPYTSLGTLRDQIIYPLSREEAKIKVLSLHRSGNNSSASMLLDDHLKTILENVRLVYLLEREGWDSTPNWEDVLSLGEQQRLGMARLFFHHPKFGILDECTNATSVDVEEHLYRLATSMGITVITSSQRPALIPFHALELKLIDGEGNWELCAIQQ

SEQ ID NO: 223790 - protein, 269 aa, Zea Mays
MAAEAAFASAKFAAMAARAAVELSRSESHGKGSTGGGYDKVPSVRTTAATEQGTAPPLSRPHKSPSPSPSWSDRSTATSVGSDAAHKGKEVVFDQSDEELDDVVWPPPQRRPSYRRTASTVGTVHASARDTGTPAAQLARPQHRRHATELSAGNAHAPGLHDALAGQRRQHVTPPYRRASTASTGRNSDAAALDDGGAYESSPYVQPPYSRMASALERSNGHIARHEEVRRMGTDARALQERVYGAAAPGQGHGPLDPERRTTSVRTRR

SEQ ID NO: 223791 - protein, 693 aa, Zea Mays
MITSAPDTAMWCDVQLTKDGVGVCLRDINMKNCTSVDQAYPERKRTYVIDGVRKTGWFVSDFTIAELQSVSLTQAIWPRTRRFDGIYPIISITDFRSLVMPSPVWLNVQHDIFYKQHGLDMRNYILSIKKGVSMDYISSPELGFLKNMSGRVGRKTKLVFRFLEKALLDHSINQTYGSLSSNLPFIKSIASGIIVPKSYIWPVTKDNYLLPSTSIVTEAHNAGLEIYASDFANDRIIPYNYSYDPLAEYLNFINDGGFSVDGVLSEHPITASEAIGCFTKLNSNKTDHGEPLVISHNGASGDYPDCTDLAYHSAIDDGADIIDCPIQVTNDGVLMCMSSTNLLDTTNVQRTTYNSLVSVVPDIQPQPGIFTFNLTWSDINSNVLKPKISSPVSGYFLVRNPRYTNQGKFLKLSDFLAIAMDKDLSGVMIIIENAAFLVNSLGIDIVDSLTTALSAAGFDNHPTKEVLIKSKDSDVLVKLKQQKTKCKLVYTLPSGIGDASNSSLKDIKKFAEYVAVDSKSVFTLSSDFIIRQNSLVQDLQSAGLALYAEVFQNEFVAQPLDFFGDETVEINYYIQSFNLSGIITDFPKTVRRYKRNTCTVLGKDMPSYMQPPQAGSLAQFLQTFKTQPPSLPPMSTLNSSSVEEPPLPTVALRSVSDGSASGATKTPGTPSDAPTATVNAGMLLVMVFTALLI

SEQ ID NO: 223792 - protein, 374 aa, Zea Mays
MSQMELVSPASSAPRQEVMMVTTDDYSYKPGLAAAPAAAAPPSFQQHHPLPLQLHGGEGGGDHDKTERRLAQNREAARKSRLRKKAYVQQLETSRIRLQQVEHELQRARSQGLFVGGCSAAGDMSSGAAMFDMEYARWLDDDTKRLAELRGGLQAHLLDGNLGLIVEECMQHYDELFQLKAALARSDVFHLLTGSWATPAERCFFWMGGFRPSELLKILIPQLDPLTEQQLLGICNLQQSSEQAEEALAQGLHQLHQSLADTVAAGTLNDGAAAPNYMNIMAVALEKLASLENFYQQADNLRHQTLHQMRRILTTRQAARCFLSIGEYYSRLRALSNLWASRPRDNFIGTESLSPTATELQALHHQQQNQFAGF

SEQ ID NO: 223793 - protein, 103 aa, Zea Mays
MDVKNAFLNGDLQEEVYMHPPSGVDTPSGHVCCLRRTLYGLKQAPHAWFERFISVITTAGFSSSEHDPALFVHVSPKGRTLLLLYVDDMLITGDNLEHISHVK

SEQ ID NO: 223794 - protein, 98 aa, Zea Mays
MPRSRGRVCTTSVMTATADADGQRHDNGGCAQPGARQRCKKLTSARKQMFMLRAPKVLVIQLKRFEGINGGKINRNIEFKEALDLSDCMYNKNQVYDV

SEQ ID NO: 223795 - protein, 180 aa, Zea Mays
MDMERLKQEYQQHLQEAQYLLMQSKELHNNLELAQKSIVDHTSAQRKRKARVISEYAVMARSIIRKKFQQFQESAIAERVKEEENAVNDAKSDRVKDPMPANTSAIGNIQNIDTSLGMTANDDEDEVPEVGDSVYVPKLKNEATVVKIDSSKNEVQVQAGMMKLKLKLKDVKVQKRKVSR

SEQ ID NO: 223796 - protein, 614 aa, Zea Mays
MLRLSIAVLTSPLLPTSVPAVRPHPRRLLRLRLRSLAASSSLSPSARSLRLLEWGKVCDAVASFAGTAHGRDATTKQLWEVEDVSYEQSQMLLQETEAAVLLLDNAGGAMDFSGLDTVAIESAIHSVSGGAVIKGLEAMAVTSLMMFVESLQVNIKAAMKLDEGSCSRLTTLTETILDAVINKSLVKSIQDIVDDDGSVKDTASPELRRYREQVQRLENRLYQLMDKLMRNADDEASLSEVCIVNGRCCIRTTMDNSSFFDGLLLSSRSDAGSMIEPIVAVPLNDELQESRALVAKAELDVLSKLTDKIRLDLDSIQNLLQETIKLDKIAARAKYSIAYDGTFPDLYLPNFENETVTSATGGSIKQISSAQLPKKAWKLYMPNAYHPLLLQRHQENIHRAKRDVASATAEIRRRRIYGQDIAEEDQLASDLDSMKLRVSQLEKDQPVPVDFMIAEETTVLVITGPNTGGKTISLKTVGLASLMAKIGLYILASEPVKIPWFNAVYADIGDEQSLTQSLSTFSGHLKQIGAIRAESTSESLVLLDEVGAGTNPLEGAALGMSLLESFAEAGSFLTLATTHHGELKTLKYRIWFSPTVCFQGNSGFPSCVTLGCKL

SEQ ID NO: 223797 - protein, 107 aa, Zea Mays
MKTKTSRSLQKSGRGNHVQGEGPNWVLVAGGVLLSTLSVKVVCKLKQLLDGKQQNNTSEAKGRPEACKLHSDLYRFSDQTGCYYCMSGSRGCDLMESCVSCVGWTGD

SEQ ID NO: 223798 - protein, 515 aa, Zea Mays
MLQIAHDTLTNQSSRTEYDRALSEDRDAALTMDVAWDKVPGVLCVLQEAGEAQLVLATGEHLLQDRPPKRFKQDVVLAMALAYVDISRDAMAASPPDVICCCEVLERALKLLQEDGASNLAPELLAQIDETLEEITPRCVLELLALPTDEKHKNKRQEGLQGAKNILWSVGRGGIATVGGGFSREAFMNEAFLQMTSAEQMDFFSKTPNSIPPEWFEIYSVALAHIAQAIASKRPQFIMMADELFEQLQKFNIGSQYPYENEMDLALERALCSLLVGDICNCRMWLGIDNESSSYRDPKNIEFVVNNSSMNEENDLLPGLCKLLETWLVSEVFPRSRDTRGTQFRLGDYYDDPKVLSYLERMEGGGASHLAAAAAIAKLGAQATAALGTVKSSALQAFSKVFPLTEQLDMSGKDIPSDDLDKSLEKLAQGSVAGDAIHDSRNDALKIISAGASMGLWRLLTPLMVQRQMKSHWKSLGWTRSWLKTLFAGGKASSPRLWGQNTLSRHCKRSSAATC

SEQ ID NO: 223799 - protein, 406 aa, Zea Mays
MAATAAALRCCFPGSSGVGSGFVKPNSSRRGWCAAAVAAPSREAEPVSSLGHRTRVDFPILHQEFDDAKLVYFDNGATSQKPCSVMKTLDEYYRSYNSNVHRGIHALSAKATHAYEDARRKVANFVNAADSREIVFTRNATEAINLVAYSWGLSNLKEGDEIVLTVAEHHSAIVPWQFVSQKTGATLKYVGLTKENVPDIEQLKGFLSNKTKIVVVHHVSNVLGSMLPIEEIVTWSNRVGAKVLVDACQSVPHMPVDVQKLGADFLVASSHKMCGPTGVGFLHGKFEILSSMEPFLGGGEMIADVFEDKSTYAEPPSRFEAGTPAIGEAIGLGAAIDYLSCIGMEQIHEYEKSWGHTSTKAFSLFQMSRYMARRLPRLSTVLRCAPSISRTSILQISQRFLICSIA

SEQ ID NO: 223800 - protein, 160 aa, Zea Mays
MIADVFEDKSTYAEPPSRFEAGTPAIGEAIGLGAAIDYLSCIGMEQIHEYEKELGTYLYESLLSVPNVQIYGPAPSQTVHRAPLCSFNIENVHPTDIAEILDLQHSVAIRSGHHCAQILHRTLGINASARASLHFYNTKDEVDTFVDALKATVDFLTDRY

SEQ ID NO: 223801 - protein, 590 aa, Zea Mays
MSCQAQFHLLSSANNNNCDAKNSGNDNDDSGKKLQVVSAEGDNGGVNRNKRISRKGRDDNGDDGDDSDDNSNENGDSSSQKKPRVVWSVELHRKFVAAVNQLGIDKAVPKKILDLMNVENITRENVASHLQKYRLYLKRLSADASRQANLTAAFGGRNPAYVNMGLDAFRQYNAYGRYRPVPTTNHSQPNNLLARMNSPAFGMHGLLPSQPLQIGHNQNNLSTSLGNVGGMNNGNLIRGAHMPLQDTSKCFPTGPSGNSFANISNSTQLVTTNNLPLQSLEPSNQQHLGRLHSSADPFNSFVGEPPQFADLGRCNTTWPTAVSSSNVQEIGQKDRIVNRPKLEPLSSFTEASSQIPLLGSEMQSHQVASLASNGLPMPFTQEAVPFAYGSSTNSREMLNNNLALSNSGVNSTLPNLRIDGSVVPGQTLGGSNSGGCVVPPLQDGRIDHQAVSSHLNYNNELMGTGRLQRGLSGGLDDIVVDMFRPTMASPSLMGTGNWSSKFQFSTSSLPSCEIFRICGCGGVRRLIGPKLFIVARLHHKCPLHLVFQFSDQVPVSRPNINYVVFATLTRMAMFSSQVLTVAIVIYTAWL

SEQ ID NO: 223802 - protein, 132 aa, Zea Mays
MMKFASFETIVELIYKHAVPVPKSECSKTTQLGISFAGGYIAGVFCAIVSHPADNLVSFLNNAKDATVGDAVKKLGLWGLFTRGLPLRIVMIGTLTGAQWGIYDAFKVMVGLPTTGGVTPAPAAKAELKASA

SEQ ID NO: 223803 - protein, 132 aa, Zea Mays; identical to SEQ ID NO: 223802

SEQ ID NO: 223804 - protein, 160 aa, Zea Mays
MAGMTDMPMRPARPGPPMQHRGPPPMARLRPEPIDREKTCPLLLRVFTRVAGHHQNEEFSVRGKEPKDEVQIYTWKDATLRELTDLVKEVALPARKRNARLSFAFVYPDKNGRFVVRQVGSTFAYGHGRGDDAKTLAELGFQIGDYLSVAIIEEGELLQC

SEQ ID NO: 223805 - protein, 521 aa, Zea Mays
MGVGYRPEPSSLTRCSLVLFLRKRGRAHMESFLSVALGELVTRSINFIINKFSKPPTLAMEESLQRTLLRAQVIDEEAMGRHIPNQAMIQQLGMLRDAMHRGSYALDAFRYKPHYGEDDSVQVVSGFMSLSKLPFAKDPYFFSRTAQSREQLQEALDRLGSMIVDLNELVMFLASYPRLHRQPYSMHILLGNCMFGRQVEAELVINFLLHTQPHSSEELEVLPIIGPCRVGKSTLVAHVCKDERVQDHFSEILWLNDLAFTDDERAFRQGYAMEHQNQVSNWNKDKRSLVVIELSGNLHEDAWNRFYLACKRSFCSGSKIVVTSSSDRAAKFGTAQALALKHLSHEAYWYFFKTLAFGSMDPETHPRLAQVAMEIARTQNRSINAAYIICYLMRNNFNIHFWCKVLRFFRVFVQKHVSRFGTHPYDLLNQNRPIRISRMGTASEYFTIHRQYHCSSQEEVPKIRVHDVVYGSMKTCRKFEVLSWRSPIPPYYSYANTYEIQERRTTSAKRKRSTEDGVTFC

SEQ ID NO: 223806 - protein, 603 aa, Zea Mays
MDLLIAQITTDLRSSDALRQSLALLQALQQCAAGRDVSALARTAATEILSAPSSAVCKRLALDLLRALPLPPDLLDPLLLSSLRSDLSFPDPDVASSSIASFPSLPSHLLPSLLSSAHAEIANALSSPAESLRLGAVTSLSSFLPRDDLVLMCSTNPSLMAHATTWWARLAELALDSADAVSAGAFEALARLFQELEGRRMSRLAGDKLVDGEGVLAVRAQWAADAIDFIWSRRNMLIARSVVMPAESFRLTVHPLVHAAKMVASGVVNTLQRIAKPGDTTIADSVESSAEKLVGVSDIVSHLLPFLSSLDPPLVFEVGINMLALADVPGGKPEWASAAIIAILTLWDRQEFSSMRETIVRAVVTNLHLLDLGMQVSLFKRLLQMVRNLRAESDRMHALACICRTALCVDLFAKESVRRGQKPVPGTDVISLFEDVRLKEDLNSVTSKNLFREELVASLVESCFQLSLPLPELKNSGTESRVIGALAYGTGYGALNWTEPALDVVEVCRPCVLWDCDGRTYAVDCYLKLFGRLCHIYDTRGGVKTIKAGASQDQILNEMRLRNLQLQLIRDLREVHTPRISSRLIWAISEHFDLEGYKMCRLC

SEQ ID NO: 223807 - protein, 603 aa, Zea Mays; identical to SEQ ID NO: 223806

SEQ ID NO: 223808 - protein, 601 aa, Zea Mays
MSRTSNKYPCLEEITSIDQRGRHQKQSRPLRGSSQEQQARPPHADRTTERAALTDPSPPPPPRSTMTLASTDKVVLGCIAFSIFWVLAVFPSVPFMPVGRTAGSLLGAMLMVLFRVMTPEEAYKAIDLPILGLLFGTMVVSIFLERADMFKYLGSALAWRSRGSKDLLFRVCLVSAVASALFTNDTCCVVLTEFILKLARQNNLPPQPFLLALASSSNIGSSATPIGNPQNLVIAVQSGITFGQFLVGVFPAMIVGVAANTCILLCYFWMSRASSVNGGGADADCVGELIRRSDSLSRADTTLGMSMRSRSYNSEGGDIQVAIRSMRASSMSQEMVEVSTVCDRRDDGGAGPRKVTRTTSHQRSVIIEDAPEADAADDDDDGHKGKDGDSVTNKEKRWKVLVWKTAVYLTTLGMLAALLMGLNMSWSAITAALVLLALDFTDAQACLEKVSYSLLIFFCGMFITVDGFNRTGIPNALWELVEPHSRIDSAKGTALLAVVILVLSNVASNVPTVLLLGTRVAASAGTISPESEKKAWLILAWVSTVAGNLTLLGSAANLIVCEQARRAQFFGYNLTFWSHLRFGLPSTIIITAIGLLIVASY

SEQ ID NO: 223809 - protein, 535 aa, Zea Mays
MPSCPPRRPVMSSTTAAAFRLGQRVHAAGDPRRLGTVRYLGPVEGHGGVWVGVDWDDGAGGRHDGSLAGRRYFVAVGECSATFARPTALSGGISLPDALRLRYRVQDFTKEEQDEMYVFSTSQKRVSVEFVGTDKVQEKLNNFNELASASVSYMGVSSIGAPNELNSLVPNLKLLDLTGNLFSQWQDIFSLCQALASLEVLNLTNNTMENDVVETPMLENIRILVLNNCGVTWELVEKIKVSFSCISELHLMSNRLNMIMTLDGKFVQGFNTLRLLNLEDNHIDSWDEIVKLSYLRSLEQLHLNKNRLKHVKYPSNLSPDGPIDDAAAVPFENLQVLLLVDSLNLFPSLRDVRLSDNPVADPAKGGAPRFVLVARLGKVGILNGSEISPRERRESEIRYVRLVMGKIESNDQEEIRRLHPRFAELKSFHGIEDEKPTSSISGPQKMASGLISITLKCVGPSMGEKQPLTKKLPATTTVGKLKSLCESFFKLKDIKVKLFVEEEGCPLPQPVEEDTASLMELGIGSGATIVVDEES

SEQ ID NO: 223810 - protein, 90 aa, Zea Mays
MASGLISITLKCVGPSMGEKQPLTKKLPATTTVGKLKSLCESFFKLKDIKVKLFVEEEGCPLPQPVEEDTASLMELGIGSGATIVVDEES

SEQ ID NO: 223811 - protein, 85 aa, Zea Mays
MGLGTWTTRRRARRRRREAPPPTSPGRPAAAAAGLPTRWTLRFSASSPRPTASQEQPGRSTAIRQRDNNSVTLTNILARPSYTIV

SEQ ID NO: 223812 - protein, 187 aa, Zea Mays
MDIWFQICSSIISSCQLGRRHVYFHSCAPILASSIVSFWCTADLVCVKCIRLSQVGDFRLCSLQPRRRRRRRSVHGGHLLHGRIDATARYGYLELAIEQMAKTADASNALNHGLHYLRSTGNACAARVLLWWGWENSDAHAELYTQDEVPSLPVTQNSPTTSWVKLSTCSNERNEGDDQRTSELNKQ

SEQ ID NO: 223813 - protein, 462 aa, Zea Mays
MSLHVVAAIYCNLGKYEEAVPVLHRSIEIPVIEEGQEHALAKFSGCMQLGDTYGMLGQTAHSLQWYASGLEIQKQTLGEQDPRVGETCRYLAEAHVQALQLDEAQRLCQIALDIHREHRETASLEETADRRLMGLICDTKGDHEAALEHLVMASMSMVANGQETEVASVDCSIGDIYLSLGRYDEAVFAYQKALTVFKTSKGENHATVASVFVRLADLYNKTGKLRESKSYCENALKIYQKPIPGTSLEEIATGLTDVSAIYETMNEHEQALKLLQKALKMYNNSAGQQSTIAGIEAQMGVLHYILGNYGESYDSFKSAIAKLRTCGEKKSAFFGIALNQMGLACVQRYSINEAAELFEEARTVLEQEYGPYHPDTLGVYSNLAGTYDAMGRLDEAIEILEYVVGMREEKLGTANPDVDDEKRRLGELLKEAGRVRSRKAKSLENLLETNPYIATKRNAVAA

SEQ ID NO: 223814 - protein, 386 aa, Zea Mays
MAIMLWAREKRAEFVLLKCTFVRRASEFLRNYFPSLIDSMLNDKGNFSQRGHLQRPDHTDMRYKFRTYARLLQHIKSLDKSCMMPLRKAYCHSLNMIIRRESRDFSNELRNSSKASKSSTPLFEGPAGANQPASITDSPADAYSKMITVFVPLLVDESAFLAHFMCFEVSALPQSDASSSNPNAESTITSSVALEASASIGKTSNNPAEMGALNECIQELLDGIQEDFYALVDWAFKLDPLSCISMHGLTDRYLSGQKAEVSGYVQVLLDDLETRITILFSRFVDDACYQIEKYERNVRQIGVVPYIPRFSQLAARMEQYINGSRDLVDQAYTKIVTIMFVILEKIAQVEPKYVDIVLLENYAAFQHSLYDLANVVPTLAKYYSSS

SEQ ID NO: 223815 - protein, 491 aa, Zea Mays
MGSGSSKATTSSTSPTAAEAGGEGKRPNGSEKARRGRSLLPLPSSSCFRGSTTPCDCDVSAVAVDVECNKGGETASLPSLTHTTKSDEDVLATPKSHPGEEITLPSSDRERDQDDGVLQNAAATNTLTAASQLTDPSGRSRPRFGVNFGLSRAVSLGSSVACSILSSGLPTSANPGEGRGDVDDSSDTVISQQGSAPTAGIDSTLDMLRDSVTAQARAARQARRNLQESEDAILRNSYRRMGSQEPFEGSVRFSRTLSVGRLRDRVLKRPPFSDGLFTPALLYDRAVWLSGNASARQDSAVMQRTNSDRSSESRSDPSTNGLYNLSSERQASNSDLLERRSVFLERRRRIRSQVRALQRLGSRFENLSGHERSCILSGQHRTGTCNCRTGSRQGNPDEETSTRASISRIVMLAEALFEVLDEIHHQSAALSSSRPAFSSIGSVPAPREIVERLPAKVYRRPLKYHSEEAAQVCPLCRGDVCRSDALIGKVS

SEQ ID NO: 223816 - protein, 733 aa, Zea Mays
MRAWEMHPLCCLAGEWPASGGGLAPGDRSPPAEDAGAAPAVAGVLYKWTNIGKGWRPRWFAIRGGVLAYSKIRRRVAAEPRPEAAGGVRLIGVARGAAGAAERPIGFVPLKISSFSESKSDDKRFYIITPTKTLQLRTGCANDRATWIEALVTARSEYSFNGDLSGDQNDASFSTEKLRNRLNAEGVGEAVIKDCEQIIHSEFSQYQTQMKQRCEEYLSFIGTLPQDVEVVNSVDSTVPEKPRLELFKHDCSSSGKCSEYSNTESSDDVGKQEISELSDGDEFHFYDTRQSFSEFASSPADPRKGCLNNGNEDHKSVESLTVDKAEKYMLSHSKRRLQLPEPIEKEKGVSLWSMIKDNVGKDLTRVCLPVYFNEPLSSLQKCFEELEYSYLLDRAYECGLRGNGLMRILYVAAFAVSGYASTDSRPCKPFNPLLGETYEADYPEKGIRFFSEKVSHHPMVMACHCEGKGWKFWGDSNLKSKFWGQSIQLDPNGVLTLEFDDGEIFQWSKVTTTINNLILGRVYCHHHGTMNISGNRRYSCKLTFKEQSFLDRNPRQVQGVVKDAGGSKVATLTGKWDESVHCVINNDASKVNSHGPHQSSGSTLLWEKNEPPVNPTRYNLSAFAITLNELTPELELPPTDSRLRPDQRHLENGEYEKANAEKLRLETQQRMARKMQESGWKPRWFQRDSEDGTYRYVGGYWEAREQRTWVGCNDIFGNLSSSQKLPPSALYTS

SEQ ID NO: 223817 - protein, 277 aa, Zea Mays
MVMACHCEGKGWKFWGDSNLKSKFWGQSIQLDPNGVLTLEFDDGEIFQWSKVTTTINNLILGRVYCHHHGTMNISGNRRYSCKLTFKEQSFLDRNPRQVQGVVKDAGGSKVATLTGKWDESVHCVINNDASKVNSHGPHQSSGSTLLWEKNEPPVNPTRYNLSAFAITLNELTPELEEKLPPTDSRLRPDQRHLENGEYEKANAEKLRLETQQRMARKMQESGWKPRWFQRDSEDGTYRYVGGYWEAREQRTWVGCNDIFGNLSSSQKLPPSALYTS

SEQ ID NO: 223818 - protein, 206 aa, Zea Mays
MNISGNRRYSCKLTFKEQSFLDRNPRQVQGVVKDAGGSKVATLTGKWDESVHCVINNDASKVNSHGPHQSSGSTLLWEKNEPPVNPTRYNLSAFAITLNELTPELEEKLPPTDSRLRPDQRHLENGEYEKANAEKLRLETQQRMARKMQESGWKPRWFQRDSEDGTYRYVGGYWEAREQRTWVGCNDIFGNLSSSQKLPPSALYTS

SEQ ID NO: 223819 - protein, 251 aa, Zea Mays
MSAISDQKKRTLEALQQQYTAAKAKKLQDEQVKSQKKSNFNTPKPKCDAPRGSKGPEITPRRTYAQPSHKGVAFSSSNCQQKPSTSSGEEINPVYAELSCAFHDTLSKGVVSDLDGTEVVHNVIYDIIQKGGDAGKITKGAKKLKLEKGILLDNYVQRGSRLVDSQARSLLIHSKRSKRHMSLKQHKKCGSFDLDGTFHKYDLYKPMHEMWKDYIRELMDLSPKKKFTENLLSADLHGALLIGSDWFTAST

SEQ ID NO: 223820 - protein, 317 aa, Zea Mays
MSAISDQKKRTLEALQQQYTAAKAKKLQDEQVKSQKKSNFNTPKPKCDAPRGSKGPEITPRRTYAQPSHKGVAFSSSNCQQKPSTSSGEEINPVYAELSCAFHDTLSKGVVSDLDGTEVVHNVIYDIIQKGGDAGKITKGAKKLKLEKGILLDNYVQRGSRLVDSQARSLLIHSKRSKRHMSLKQHKKCGSFDLDGTFHKYDLYKPMHEMWKDYIRELMDLSPKKKFTENLLSADLHGALLIVAECKAASYKGVNGIMIRDTAETFGIISEDNRFRAGSVFVLQADRWKFTLIGDKLSPREKLKEDQRQQRAQSLIR

SEQ ID NO: 223821 - protein, 239 aa, Zea Mays
MSAISDQKKRTLEALQQQYTAAKAKKLQDEQVKSQKKSNFNTPKPKCDAPRGSKGPEITPRRTYAQPSHKGVAFSSSNCQQKPSTSSGEEINPVYAELSCAFHDTLSKGVVSDLDGTEVVHNVIYDIIQKGGDAGKITKGAKKLKLEKGILLDNYVQRGSRLVDSQARSLLIHSKRSKRHMSLKQHKKCGSFDLDGTFHKYDLYKPMHEMWKDYIRELMDLSPSSWGPSNSGRMQSCFI

SEQ ID NO: 223822 - protein, 77 aa, Zea Mays
MDGYKSLQGRVVTGIEDDGCSRRGSRARSSNGCYGIRRRCDKCASAWALKRSLTRIQNTTSSRTFGAHNPSKIYRLH

SEQ ID NO: 223823 - protein, 289 aa, Zea Mays
MEVGDLHKVWEVRALKIKPDATAARATLDRVARQVQPIMRRHKWRVKVLSEFSPRNPRLLGLNVGAGVEVKLRLRRAGRDHDFIPYEEVLDTMLHELCHNERGPHDAQFYKLWDELRKECEELVSKGITGTGQGFDGTGRRVGGFTVHPPPPSLRQATLAAAQKRARNGALLPSGPRKLGGNSEIMSALSPVQAAAMAAERRMYDDLWCGSHDQSAIDDSDDVIILQESPNLTRDEKDKGSCSNTSAQPSTSSRIHIAARDDRTTSDALDSSKWECGACTLLNQVSSRS

SEQ ID NO: 223824 - protein, 59 aa, Zea Mays
MNVRVQMKKMNTLQRVLRARIGQAASPLKTPPGKKARITTPSVGKKNLLRSVTFDRKLV

SEQ ID NO: 223825 - protein, 122 aa, Zea Mays
MIKAKKVNVMWRSLLLLSPLNRRLAWRKQRILRSMKLMLVAPTMMKVTKTLLIQKRVNQMMTRVLRARIGQAASPLKTPPGKKLVMMLRKISTSMSKLVKTARSIIDNYKQSTGHSCKSCSK

SEQ ID NO: 223826 - protein, 197 aa, Zea Mays
MDRSLVAHAHGRRDRRRLLVPGAGVLHARHRGREDGRVRVRRLPAGARHRAEAGGRQTPEPPQLGPAAAERRRQGGGAGGPEARRRLRRRAGAAGDVRGVAVRQGGGDVAAVHDRGAGAAGRRRDPAGPVGDARDGGGQRRRRAAAMVVRRSRRLRRRRRRPRRRRRGVQHPVPFLLLVVVNHKQLAIYIPRYLDSL

SEQ ID NO: 223827 - protein, 126 aa, Zea Mays
MPKLPGKTASTQKMLHCFLLLVTKNTNNRVLQPYYATNFYILLRAVDRLAANYSRLPGIFDSEIDEDIPRLKTVAASVASEMGLNGASLSEDLITEMCRFGGAEIHPVAAFVGGVASQEVIKFDLG

SEQ ID NO: 223828 - protein, 67 aa, Zea Mays
MVKYSAFNPRHFSTEMDRRCSICQEEFEVHEETGKLSCGHSYHVHCIKQWLSRKNACPVCKTTVSKT

SEQ ID NO: 223829 - protein, 213 aa, Zea Mays
METIRHKGSGLLEKAKEELGSHSDASRSSKELERGSEEQGNNKDMDAFSAVMDKVKGHPEAMEKVSAVMDKVKSHPEVVDKVKDEVMSLAGALRLRRHGSEDKEAESEEKAEGAQSADEGASDGMAGEPSVLEQAVQEIQAVAAALQQTAEPEAEIPAETAAAAAAETSAGGDKPEETNGEVEQDDPKKRLDFAGFFAMLLERFCSPASKKKD

SEQ ID NO: 223830 - protein, 105 aa, Zea Mays
MFFQRKKSKKAKDSRGSQKKGKDGRGKNDLFDRAKGGLDALAGSLQEAKKDAETATEKLQGDVKSGMETIRHKGSGLLEKAKEELGSHSDASRSSKELVIHVDIA

SEQ ID NO: 223831 - protein, 224 aa, Zea Mays
MVHDMFGHEVVGKIKEQYCDAFLTAHFEVPGEMFSLAMEAKRRAMGVVGSTQNILDFIKDHVMGALDRNVDEHLQFVLGTESGMITSIVAAVQELLHLYSSQERANIEVEIVFPVSSDAISKTSNGSHHVGSSMATDLNSLTIVPGVSSGEGCSIHGGCASCPYMKMNTLGSLLKVCHQLPDKNNKLSVYQANRINVRTPLGKSVAEVGCEPILHMRHFQDLRT

SEQ ID NO: 223832 - protein, 554 aa, Zea Mays
MDSNDLERERGITILSKNTSITYKGTKINIIDTPGHSDFGGEVERVLNMVEGVLLVVDSVEGPMPQTRFVLKKALEFGHAVVVVVNKIDRPTARPEFVVNSTFELFIELNATDEQCDFQTVYASGIKGKASLSPDNLADDLGPLFEAILRCIPEPRVEKDGALQMLVSNTEYDEHKGRIAIGRLHAGELQRGMEVKVCTPDDACRVGKVSELFVYQNFSRAPVESVSAGDICAVCGIDDIMIGETIADKVTGTPLPTIKVEEPTVRMSFSINTSPFVGREGKYVTSRNLRDRLYRELERNLAMKVEDGETADTFLVSGRGTLHLTILIENMRREGYEFMIGPPKVINKTVDGKLLEPYEIAAVEVPEESMGSVVELLGKRRGQMVDMEANGTEGTTLLKYKIPTRGLIGLRNAILTASRGRAILNTIFDSYGPWAGDLSSRDQGSLVAFEDGSTTSYALLNAQERGMLFVQPGQDVYKGQIVGIHQRPGDLAINVCKKKAATNVRSNKETTVVLDEPLSYSLDDCIEFIQEDEIVEVTPASIRMCKNPKVSKKK

SEQ ID NO: 223833 - protein, 367 aa, Zea Mays
MVSQHGILLAVNIISDHFGPIVSKVCGCLLRHGALSLQDIVRRLELSPGQVKNSLLILIQHNCVQAYTSPRGAGDRTVTLYLAIFDNVLHRLRFSKFLSVVRVDIPESEVLLEGLLQNGRLTFEQLVERTIFKVSEDSPLPTREEVRMNFNKLVYAHYVERCPKPEPFFDPLAVEQPTSTRKRAPKTVEAVLSLEQKVVCTAALSDAERFSEIPYFMDGSSSAKDGHHAVAGNKRKHETLEVDEDDSIIAESEVLWRINFERFIFCLKKKFCAERKKAKMRLGTLAIWEAFFEANVTNNDNKTVTSPIDGILERVGQKEGGMSMTLDHITSVLNDLECTSTANNPEEFTFDRVSCEKETWARSLYNL

SEQ ID NO: 223834 - protein, 469 aa, Zea Mays
MASLAASAAAAAEVTHLTQRDAAEIDEQLMGPLGFSVDQLMELAGLSVAAALAEVYKLNEHARVLVICGPGNNGGDGLVAARHLYHFGYRPSICYPKRTPKPLYSGLVTQLESLSIPFIPVEDLPNELPREFDVIVDAMFGFSFHGTPRPPFDHLIQMLVSLSDIQNPDKRPAIVSIDIPSGWHVEEGDVDGGIKPDMLVSLTAPKLCAKKFTGPHHFLGGRFVPPPILNKYGLQLPPYPGTSMCVRIGKAPSVEISSLRENYISPELLESQVMSDPFDQFLKWFDEAVTAGLREPNAMALTTANKEGKPSSRMVLLKGVDKQGFVWYTNYGSRKAHDLCENPNAALLFYWNEMNRQVRVEGSVEKVPEAESDKYFHSRPRGSQLGAIVSKQSTVIAGREVLQQDYKKLEQKYSDGSLIPKPEYWGGYKLTPTLFEFWQGQQSRLHDRLQYSQREVDGSTVWHIERLSP

SEQ ID NO: 223835 - protein, 371 aa, Zea Mays
MCKWRFYYGSASCRHSVGKSSAVPMRELEQGDFDPRENALSWTEFPPEGSKATLPHSTGYFCWKDYCPMVFRHLRKLFAVDTGDYMLSICGNDPLRELSSPGKSGSFFYLTQDDQFMIKTVKKSEVKLLLKMLNSYCKHVDRYKNSLITRFYGVHCVKRHNGQKIHRRFDLKGSSYGRTADKFEDEIDETTTLKDLDLNFVFRLQKSWYTDLHEQLRRDCDFLESEGIMDYSFLIGIHFCDDISASKMGSSTFTASPSGGTTELCFSDDAFDMVPDCSRKSLIRLGAHMPGRAEQASRRSGFVFPNQTGEVHDVILFFGIIDILQDYSVKKRLEHSYKSLQTDPNSISAVEPKLYSRRFQEFIGRIFVEDG

SEQ ID NO: 223836 - protein, 53 aa, Zea Mays
MYHQNNILIASISMDAKQTWLFAMEASDKIWWLVDLLKNQKSDKVDITIQPEE

SEQ ID NO: 223837 - protein, 60 aa, Zea Mays
MQSRLGCLRWRLRIVRYHMSARELLPPLTITNFVTKIWWLVDLLKNQKSDKVDITIQPEE

SEQ ID NO: 223838 - protein, 96 aa, Zea Mays
MAELERIKKERAEEKLRKERQQAEEEAKMKEAELMRGNPLININNAGSFSVKRRWDDDVVFKNQARGETKTPKRFINDTIRSDFHRKFLQRYMKVG

SEQ ID NO: 223839 - protein, 126 aa, Zea Mays
MEDAFMALKFVQDIHDMMVNRLYEQLPKDGSSSRTNSTGFITLEKNGKALELFPGEVSADQIYAIEEAYQSMASAFSEADGIDYTDPEELELLVATLIDLDAMDGKRSVSLIAECSSSPDVNTSPS

SEQ ID NO: 223840 - protein, 70 aa, Zea Mays
MLPMKASSSISYLAGLGLRGTWRRKNQRPNSKEEKYNDSKKFLPRRSVIAKFCSGRSAMSSWIRIYVNID

SEQ ID NO: 223841 - protein, 97 aa, Zea Mays
MATALKSFLNSPVGPKTTHFWGPVANWGFVIAGLVDMNKPPEMISGNMTAAMCVYSGLFMRFAWMVQPRNYLLLACHASNESVQLYQLSRWARSQGV

SEQ ID NO: 223842 - protein, 308 aa, Zea Mays
MGTLFSSLGSQGSVLHPRDVDIHVRTSGSVPGASTNPSDSAGAQAHQNVNRPGDASHANIGEAFSGVAGGTPFSVESGVRLLPLRTVVAMPAGISRAPSGSSSGGLGIIYPFLTRVRQRANTNGNDERNGQSPNESARSSTHLNQQSIPQSSQTHEAGNLRSPVDVNVGDGSETSPGQQNGLVTLSQIMDFFGSMLPGENVRGNTSSQQPPMASTEQGEGRNLATPEVSGASEEALRFAGMVRQIMPFISQVETQNQSAPPDSSSTPAQAASGSADRARDVPNDSTSSRQHNRDQIDEPNSKRQRTSD

SEQ ID NO: 223843 - protein, 313 aa, Zea Mays
MHRPRSHRLCRSRVAAAVSAAIIIGLGAAGVGEAATGTFIYAGCSPSKYQPGTPFEANLESLLASMAGAAPKAGYSSFTAGAGGVGNGTTAYGLYQCRGDLAGADCAACVRDALGQLGQVCAAAYAASLQLEGCYVRYDGTDFLGTPDAAMVYRKCSTSSSSDGEFLRDRDAVLAGDLLQGGAANNGSSNGYKAGSSGSVQGVAQCLGDLAAPDCAACLAQAVGQLKGTCGTALAADVYLAQCYVRYWADGYYFRPTQDYSQDDVGRTVAIIVGILAGLAIFVVFISFLRKASLATGNGGLPHSLSDGGTRTA

SEQ ID NO: 223844 - protein, 90 aa, Zea Mays
MLCTVPTTPCRLIPFYGGAAYHDYHHYAGGRSQSNFAPLFTYCDYLYRTDKGYRYHKLKQEKLKSLAENSADKGGNYSFDEGKKNRYFCA

SEQ ID NO: 223845 - protein, 113 aa, Zea Mays
MIPYATAAEAEGALGRTMTWAETACYHFPFSPCRLIPFYGGAAYHDYHHYAGGRSQSNFAPLFTYCDYLYRTDKGYRYHKLKQEKLKSLAENSADKGGNYSFDEGKKNRYFCA

SEQ ID NO: 223846 - protein, 146 aa, Zea Mays
MLEEAIEYLKTLQLQVQMMSMGTGLCMPPAAMLLPAMQQQLLHHHPMAHFPHLGMGLGFGMGAAAGFDMLPFPCVAAGAHFPCPPGAMFGVPGQAMPSLPAAFAHMYGAGSGAGPAGQTEAADAAAPARPGEAEQGDQQVQHAKQT

SEQ ID NO: 223847 - protein, 221 aa, Zea Mays
MAAAVALLLLSALGGAAAQVFPPWNGTFPMGPGFGGGSSSGGAAAGAGAGTGVPAMFYARQLDALYGLGARRFVIAGVGSMACIPNMRARSPVNMCSPDVDDLIIPFNTKVKAMVTSLNANRPDAKFIYVDNYAMISQILSNPWSYGFSVADRGCCGIGRNRGMITCLPFLRPCLNRNSYIFWDAFHPTERVNVLLGRAAFSGGNDVVYPMNIQQLAAWQP

SEQ ID NO: 223848 - protein, 805 aa, Zea Mays
MLQRAASNAYSWWWASHIRTKQSKWLDNHLQDMEHRVKCMLLLLGEEADSFSKRAEMYYKRRPEVITQVEEVYRAYKALADRYDIMSGELHKANHTIATAFPDQVQYAMLEEEDDNIPKAFTPVDPRKIHKSTVDGLMMKKKKKGEHPGSMVGGATSAPVNKENAREEISRLQKAILAMQTEKEFIKSSYESGIAKYWDLEKEIHDMQEQVCHFQDKFDESAVIEDDEARALMTATALKSCEDTIVKLQEQRKASAEQAVGESERVKVFREKLKAIMNKHGKSLPVSLDLSEKNTTRKSHGAGMENVCYVKQCAIDAESIIDKIKEHFESDCNISMAEVTERIDEIVNMVVDLDLMVSAQTSQIDRLRQENNELEDSLQGLEDENTTELPSTGSNELIEKLRQAEEELVRAQALESSFHKDESTIRSNFLEAISRLHEISELLLSPVCDSASAARTSQEIESLGPSSSNECCDMEKVVDDPNDALVADSDESSSGSTKLISEQQLDVGQQDRISRERGSLVRLRHISSGNLGGGCDGQEGLSSSAVTDMMKLQERLTDSLDDKEKVLLGEYTSLLEDYKDAKRKLVEMEKKNQDCLNEIRTLREGIIKSSSAAAGEGGSEGSCKRSFSRRGHRRTPSYSSIHQRRPSVSSISRLIRMGSAIQEGAAGSGKQSDLLDDLRLPAIAEAENASPLEEKFRRDIDTLLDENLEFWMKFSSSLQRVQEFQNKHDGLQRKLQLINDQDGKQDGKQEPTRRRRRRTTARLAMAAAAAASPRCRCSRSSSRPNLRRRLCWPVSRQCSRSSRWT

SEQ ID NO: 223849 - protein, 463 aa, Zea Mays
MKEINHKVPLNTKVIATVSYQIVPADTQYAEIPLAVVRSSYQRVGIGKLLYKELSQRLQNVGVTSIFCWADKVSEGFWLKQGFVSVGEVNTKGKIRKIPVRADIKRALCFPGGSTLMVAHLNKELPVMQTWEKPQTSLHTVVPDSISPGDTNVSCENMVLQTYKRRVVRNTAKVATNEVSNAYSESSLSEQEPKKRMYKTSSSSLKSKRIRCSNHDDNCQDMNQIGVHDNNLCSSPENSLHVILKEHHIPSTGAHIYSNGSGSPTIMLMNIADEQKKARLTKVVETLRGFVTCDGHSCTHVVTGKARRTMNFCIALCSGAWIISPNWLKESFREGQFVGEAQYVLEDEEYRMQYKSELRDAVMRAKERPNSLFAGYTFCLSKYIQPSFDVLSAIIKSTGGKIIKKLSELDELSRTIFLVCEEEAELALVAAKSGIKTFSSDWFMSCVMKQELDLEAPQFIVSL

SEQ ID NO: 223850 - protein, 467 aa, Zea Mays
MWKGKKSGPLAPRGRKREFPIRAADYELLEPIGDGATAVVRRARCLPHGGEIVAVKVMNMAHRTESDVNNASEEVKTMIMIDHPNLLSAYCSFTEGEALWIVMPYMAGGSCYHLMKSSYPKGFDDENFIAFVLRETLKGLEYLHENGHIHRDVKAGNILLDQDKGVKLSDFGVTASLYDSIINRHGKRKTLVGTPCWMAPEVMEQKDYDFKADIWSFGITALELAIGHAPFSSQPPAKVFLMTLQHAPPSLHNTKEKKFSDSFKSMIATCLIKDPTKRPPAKKLLKHPFFRRARSDHNAVKCMLNKLPSLAERMQFIKENEAKLQADKKPLDNCKEKASQEEYRRGVSEWNFDIADLKAQAALYPDENEAEDFLRFLFELDIVDETTQLKDIRAESHSINNDGTNVADDGLGKSNSTSPMSSSQSVKQLDKGSPNGLVRSESFEIHSISPAKQLTTAVLRATMLMNI

SEQ ID NO: 223851 - protein, 262 aa, Zea Mays
MGGRGRPRQRQSGVGSTWHPWDPSRIAEWHWVGSTPLHTVTRATARRGAARGASAEREQATAVRRAGHGAAPCFAPSPVRSRLTQVHASTYGILVWDQKRTQQQQRRKARAMDGDAGPEQHGCVHYRRGCKIRAPCCGEVFGCRHCHNEAKDSLEVSVHDRHVLPRHDIKLVICSLCNKEQDVQQDCANCGACLGKYFCAKCNFFDDDKCSLFCFLRFCCRVPWHFRCRRTNFTAMGAAYAGLVAQRISITVADVDAATPLR

SEQ ID NO: 223852 - protein, 124 aa, Zea Mays
MPRVHSPHPPRPPPSSPTRRSRDARIYARDGYAPPLAAPAPSPACVHKKGERRWKYSEHGLNTWSMLDDLLVERLASCPSGTTTDRAPAKSQLTRCGHEFCATPVVIVWRSFPKASLCIFLVFF

SEQ ID NO: 223853 - protein, 51 aa, Zea Mays
MLDDLLVERLASCPSGTTTDRAPAKSQLTRGAMSEFSCTQAAYMIRIHKPL

SEQ ID NO: 223854 - protein, 51 aa, Zea Mays
MAATASLTTTAPSPPALLKASAPLLISFRPVSRHCKNLCIKTKFGRTVGSG

SEQ ID NO: 223855 - protein, 1411 aa, Zea Mays
MTVMSSFTKIEGGCFLHVNMAEATEATYCCQDAPAIDDKRLSDVSLGIHVKNHIKELPVMASDVACDLLPRDLEGGNDDTTLNNVQAHDALPNCTLVPSSSQLNTEILKNKAVGMDSDAEAGIDQVIDKAKSYSGQIKHANQAEGTYISSTSMACVDKSSNESNMSHAVAELHASRDHGVGDDVSDKKQVRVEQQLLEEIQSKDTLSQVKEHKKSRTGFFDASCTSLLKTGTTLVESLNTSNHQEVHETFNVESIQLENPSTVGKKKKRKRRQLSPSKSASAQETIEPSATAVDLLKPTGEGLPNNSLGIQIHNILAMDNLSQEKEHKKSRTSSPDTSSRHLLETDPASLREPLNTSNHQVHDTLHQESIQLENPSAAGKKKKRKRQLSPSKSVSTQITTEPSPGAAPADLSRSTGDEAYNVELNGKDETIVEESGCRLSSSELNDANQGGKSVQFVSDALASIDLICKQEKFGHSLKGCKDPSIANAIYSTSENVAIEGKTTKESCVPLDRGDKHEEKKQHNEGCHNEAVPEISHMEKGGRSTDVSNKRHTNQITSQVKKGKKSKVGSVGMPTVDATGEKDHMYSENAAKQDTVSTKKEIAHEPSVQQMSNIVYQGDSNVVENPSGDGKKKKKRRRHSESLKGMNPSQDLTSSSGFVTNKNSIQCTDAAPIDAKQTTQGIIEGETVNEHMKLSRSLDVAATNIVDGVLADLRPKDSLSKDLDEDLLPGQTHLGSNQNGLEVPESIAVKVGSVTAALPPKCPAAVHFASPVSSPRQKKSKGKKSKVLSTMTDSSHQSSGVSEEDANRELTESDSLRFADKTSDPEDIVTGNVVAQADDKRKTTKRQRKKGSVKQVCDTLALKETNDAEENLVQGGYVVDTPLSTVGEVEQKGKSSQIPTPKIRKTNCSTHGLDSHTTKDNQGVYVTDIIETHDNENAAGTPTLHEVQKYAMVLKSANTNSQKQRKTSSNSELQSQDCALEHGFTADLVNGRTEREVSTTSSASAVKPDYHTVFHRANDGINFLDHFSCSNMNDDPSIAAESKQNNEDEPLREMKNKKKKWKQGTSSIEPNDILESFPSEKASLTGHFGTSKAIVSSVAKESMNIENENVNDGKEKKRKGKANMEVPTAEKDNSNCDNQGIDISTQESLISFVQNERTGQDNGKESNSKVTQNASIMQHGREDPTWNHTPEKNLHQSVDDDQNKLLTEKDHAHISKEVGKFTSQPKPHAKIRKPDEFTIKGKVAPNPKPVSNLMKDFSTSPGASSDSTEGMPQSANRYKVSVQKVPSKMYQETSGNSKKASRKIVSGAISNDSIREGCGDELDTTTVMEGSSDSSSTSADSGISSTAYDESEASDDDGAISLSQKSLKGGLHISSILRGSRSYKKARKKLEELLDDDDTIVPDSQPTDGLRG

SEQ ID NO: 223856 - protein, 291 aa, Zea Mays
MDAGSRSISSAKNRAAAVAAAPRPPLQEAGSRPYMPSLSSGPRNPSAKCYGDRFIPDRSAMDMDLAHYLLTEPRRDKENASGMAASPSKEAYRRLLAEKLLNNRTRILAFRSKPPEPENVSFADTTSSNLQAKPAKQRRHIPQSAERTLDAPELVDDYYLNLLDWGSNNVLSIALGDTVYLWDASSGSTSELVTVGEDSGPVTSVSWAPDGRHMAVGLNSSDVQLWDTSSNRLLRTLRGAHEARVGSLAWNNSVLTTGCMDGKIVNNDVRIRDHVVQRCALCCGTRTRGSC

SEQ ID NO: 223857 - protein, 478 aa, Zea Mays
MVRGKGMAAMYSWSCKRSYKNGFVWHDLSEDDLVLPATDGEYVLKGSELVDQSPSGPFYPVTVSNGNQKQQSRPKEGARQPLPRDQSDPSSPPSVTVREAKARRSPSVPSQDEEDDTPSPCRDRSMSQPQELEPQRNERRTQPPASGSASPVELRAHRPTTGCTDAATQTDDLGRRPAGRRALELPRKKSLSTDHDAVVREIAEYRQSHPRRSADLHGISRELLRQCITTPLTVPSTCAKSESLESLIRADNVMTDSFRILEEEDVVARTCPKLRPASVLMQLVTCGSLSVKGHGDAGVVRTCKPRFPNLRFLPSPLISRTMMMGELDYLSENPRLMGMKLEEKEYFSGSLVETKKTQRDGPAERYSALKRSSSYNAERAGEALDCTRREEDKADDVSSRTRCLPRTPILSSFLHPKGDSLRSPVSDCRRSSSARRDYDAASGDGSRRFADASVASATTGAESFRKEEKLVKIEERLC

SEQ ID NO: 223858 - protein, 148 aa, Zea Mays
MFIYRPVHRYLGSVNSCRAASALSIPLIAAFPFMTHLSGSKLGLALYFATILKAALGITILTGTSLLQNYAVPQHQRGAANGVAATAMSFFKAIGPAGAGALFSWTQKRQDAAFFPGDHMLFFILNLVQCIGLVLTLKPFLAVPKHYK

SEQ ID NO: 223859 - protein, 356 aa, Zea Mays
MRTFGRLGLRLLQERAKSDSFWWPYIANLPETFTVPIFFPGEDIKNLQYAPILHQVNKRCRFLLEFEKEVQQKLHTVPLVDHPFYGQDVNSSSLGWAMSAASSRAFRLHGEVPMLLPLIDMCNHSFNPNARIVQERSVNSLDMSVKVLAEKKIKQNEAITLNYGCYPNDFFLLDYGFVITQNPYDQVELSYDGALLDAASMAAGVSSPNFSAPAKWQQDILSQLNLHGEGAVLKVSLGGPDVVDGRLLAALRVLLADDPEAVHKHDLNTLMSLDVQVPLGPTVEASALRTVLALCAIALQHFHTKIMDDQAILGGGPPLITQLAVQFRLQKKFTIVDVMQNISRRIKMLSPQKSTG

SEQ ID NO: 223860 - protein, 445 aa, Zea Mays
MINQLPMRLKEVSATILANVVASGARFESIPLDHNRQTLVSEDIVHNLLHLISNTGPAIECKLLQVFVGLTDSSTSVQNIVDAIKSSGAIVSLIQFVEAPQREVRMNSIKLLNNISPYMGQELADAFRGNFSQLSSLVKVIVDNNGISEEQAAAAGLVADLPMGDSVLTRRLLQDGAFAAIISKVLRIRQGEIRGGRFVNPFLEGLVRIVSRITFVLDDDPDIIAVARDYNLASLFTDLLQMNGLDVVQIVSAVSLEKLSQQSKHLTKILPAPSPGLCFSIFPCLSQKTVATGVCRVHCGICSARESFCLLEGKAVEKLVACLDNNNEKVVEAALAALSTLLEDGVDIEQGVMVLCDAEGINPILAVLCENRNEALRQRAVWAVERILRTDEIAYEISGNQNVGTALVEAFRHGDSRTRQVAERALKHVDKLPNFSGIFSKMGAQ

SEQ ID NO: 223861 - protein, 101 aa, Zea Mays
MESRSKMSDVNDISTDGNIETMLSVEKGLRELASLKVEDAIMLTLAENRHVKPLSGQASEGRSPSESLVKCGRARRCTLQAGMVDLFLEAGEKSQHRRRYS

SEQ ID NO: 223862 - protein, 686 aa, Zea Mays
MCAAPGSKTFQLLEMIHQSTKPGLLPNALVVANDVDVQRCNLLIHQTKRMCTANLIVTNHEAQNFPGCNLAKFCSKMCMDEAKVQRLEFDRVLCDVPCSGDGTVRKAPDMWRKWNAGMGNGLHHLQVEIAMRGMSLLKVGGRMVYSTCSMNPVENEGVVAEILRRCGDSVELLDVSNELPELARRPGLSTWKVRDRGSWFGVHEDVPRYRKHVISASMFPSGKGSKDSGTGSSSVEVNTDVADADMKDSTDMGEGEQETTVTIDDSNNGDNLKTEEGTKVDCESGEVTTSSSYKKLNSTSIRTEHSDYPLHRCMRIVPHDQNSGAFFIAVLHKLSPLNENQVVDGVRIDQNISKDKTEKLEKDLVSHKASSEENTVHQQVIDNANVLDGEQNRDRDNKSSEDKSSEDSKVNVNEAAKGQAGTRDRRRQQNQGRWRGVDPVIFFKDEVTVKSIVSFYGITDSFPLEGHLVTRNPDTSHVKRIYYVSKSVQDVLELNIKIGERLKITSLGLKIFERQSSKEGSPCTFRLSSEGLPLLLPYITKQILYASAIDFQHLLQYRTIKFPDFVDAKFGEEASALLPGCCVVVLREGHQDIGSIATDPSAIAIVCWKGKTNLCVMVSPLDGKELLERISLRHGLKIPKGDKEKPSQEIAGSDELLDCATEVDDQESLPESKASDIEISDAKEAE

SEQ ID NO: 223863 - protein, 425 aa, Zea Mays
MACVAALFASPALLPFPSTTSSMASCSCRLRPAVVARAPRQQPRGRRALRRFDEVEGVSKKRRGIGGGGGVGAGGSQPSSSRRDRGLSVDFKEPQVAEFDDLEEDKFLNAVVKVYCTHIAPDYGLPWQKQRQHSSSGSAFMIGDGKLLTNAHCVEHDTQVKVKRRGDDKKYIAKVLARGVECDLALLSVENEEFWRGTEALHFGRLPCLQDSVTVVGYPLGGDTISVTKGVVSRIEVTPYAHGTSDLLGIQIDAAINPGNSGGPAFNDQGECIGVAFQVYRSDEAENIGYVIPTTVVSHFLNDYQKNGKYTGFPCLGVLLQKLENPALRESLKVPSSEGVLVRRVEPTAPASSVLRKGDVIVSFDGIAVGCEATVPFRSTERIAFRYLTSQKYAGDIAQLGIIRDGNSMKVQTILQPRKHLGLNF

SEQ ID NO: 223864 - protein, 643 aa, Zea Mays
MKISDGEDENITCHLSKSLGDKNLYVGMNGHTHLSNYFPGVRNTALSTGLSTRASHFVHNAPKLHSSFCHDNSHGDSEKCYLNHGMEQVSHYTAKAFCIDDKTTIQSQVFVSNPSLLSTSAAVTASELATKQKKWSTAYVEKQHFSPSPSSLPDLSGDLDSQFRCLRQVQYHLEYLFDGFLQSVQGASSADKFHKDPFHISACSILLDRDTGSPRLQLLSPARSNGRDPSPVSCSQSTECVSQHSQNGSPWDMASQRSVSVPSGIDIPPNGVSPCSSCADSEVSSVSWFHGSGDSAMMHGSGKDTYFTRKSCYTRWERLASSRKNGKILPNQSVKYKSNQKSAPGARFVSHKEQAAIDSRTKEITIDQALKIHEYIESDMKIVEKLSCHNQKEVRHDNEARQLPNNNQDVCLNKNFLQNRYHVESTRAPRATHQIPKYQPFKIQNTTECDRASLSKNMPRKHSCGTWKEYEILDRPTKQRPICGPLKLENRHVWDCTKKISAGNQKCNNHKDYLSFVRGAVPRSHAASTPNGLEKEAANSNKSADNGSPVRPILPELLLSCHDINSQERSPSSSAHQSYFPAANDRPLETIEFGSLGPFALPLSSLKSNGTTNTEATSKVFTDASPFVLQRSRAAATENSAGG

SEQ ID NO: 223865 - protein, 83 aa, Zea Mays
MRPLPPPLPLLLASWSVFNGRRERKRTERERGRTKPSASSPAVPSHIYSASACTFDLAESSDLKLKGACEAFPCGSAMEWRNV

SEQ ID NO: 223866 - protein, 50 aa, Zea Mays
MSEERPVPRRESPWGLPEGDTRQPKAHRCNDRAEDVVQDGINPIYMSRNT

SEQ ID NO: 223867 - protein, 212 aa, Zea Mays
MHELRLIHTDLKPENILLVSPEYIKVPDYKVSSQSPKEGSYYKQLPKSSAIKVIDFGSTTYDQHDQSYVVSTRHYRAPEVILGHGWSYPCDIWSVGCILVELCTGEALFQTHENLEHLAMMERVLGPLPYHMLKRAEKGRLNWPEGCTSRESMKAVMKLSRLQNLVMQNVDQAAGDFIGLLQGLLKYDPASRLTAREALRHPFFTEGFGRRR

SEQ ID NO: 223868 - protein, 732 aa, Zea Mays
MEVDVQIMILIQPQQLLSTRVQLLRVLETRKTMLRKEQAMAFARAVAAGFDIDNLGYLIAFAERFGAARLMKACSHFIELWKQKHETGQWIEVEPEAMSTRSEFPPFNASGIVFMGDNMKPNLESGSINGEANGEDGAKADQKSSQQMGSHAAYPPWAMHPPSGAVVYPPYPMQGMPFYPGVNPYYPPYPPVDDPRYHYSGRKSSRKHSSDSKDSETLDVESDHCSSDRGSSHGRKSHRKGKRSGKKKPSVVVIKNVNVTSKKHGSSESESQSSSEVESADSDNSHSKSSERKHKSSSSKKKEGRRTTFASGDEYSKDEMSNGHDAEQGNWSAFQNFLLRAEEKTRSSDADLFAGEKEPPSRRKQNVNTADPILLAERDGGIVHERNIVGFDSANGRTRAIRVMSNDELVMSGEGRNYMHSEIKEIEAGGGRYRRGTGDDYMVYGQGSQIARHSLLDPLAEAQYKNPVQQDKNRNGVADESFMIPLRSSLHDNIGAESRTTIDIDVELPSRIHKASDEKAGHQLFYEPDELVPERGSEDVSFGYDPAMDYDSHMQTTVKVEDEKTEDDLPVADNDVQKVEKEKLRNAKDGSDKRRKDALLRRLSAPRTPLNDAQKRAQNLRAYKADLQKLKKEQEEEQIKRLERLKLERQKRIAARGNGKGPGNGSPKANGTNGLSKSVPTFTGLKKEKNGTTESLSDRLKRLSEPKSIAGAEHSLNPKSTGADHSRRRSMA

SEQ ID NO: 223869 - protein, 166 aa, Zea Mays
MDGDGGGAGALHHHTRSPEDVFRDFRARRAGIVKALTTDVEKFYQQCDPEKENLCLYGLPNETWEVTLPAEEVPPELPEPALGINFARDGMVEKDWLSLVAVHSDAWLLSVAFYFGARFGFDKDARRRLFTMINNLPTVYEVVTGVAKKQSKAPNGSSKSSKPNSK

SEQ ID NO: 223870 - protein, 99 aa, Zea Mays
MDEKQANTPRRLTPKKDMVTLSSGSDASPGNSLSRAHEDNHEEGSLSTAKRKNAQQTKTKKTKDAGTKTGADQAGNGDAEDDVQDKLTGNSVKSPRGYH

SEQ ID NO: 223871 - protein, 327 aa, Zea Mays
MSSSPSPAATRLDLDGNPIAPLTICMIGAGGFIGSHLCEKLMAETHHTVLAVDVYCDKIRHLVDPAPPHLAGRISFHRLNIKNDSRLEGLIKMADLEPEFYVLKEDESPCIFGPIVKQRWSYACAKQLIERLVFAEGAENGLDFTIVRPFNWIGPRMDFIPGVDGPSEGVPRVLACFSNNLLRREPLKLVDGGQSQRTFVYIKDAIEAVVLMIENPARANGHIFNVGNPNNEVTVRELAQMMTEVYANVSGEAPLDEPMIDVSSSQFYGEGYDDSDKRIPDMTIINKQLGWNPKTPLKDLLETTLTYQHKTYKEAVKRQMSQASAST

SEQ ID NO: 223872 - protein, 421 aa, Zea Mays
MDRLKKLKSEHGKVQLGNITVDMVLGGMRGMIGMLWETSLLDPEEGIRFRGLSIPECQKVLPTAVKGGEPLPEGLLWLLLTGKVPTKEQVDALSKELLARSTVPAHVYKAIDALPVTAHPMTQFTTGVMALQVESEFQKAYDNGLPKSKFWEPTYEDCLNMIARLPPVASYVYRRIFKGGKSIETDNSLDYAANFSHMLGFDDPKMLELMRLYVTIHTDHEGGNVSAHTGHLVGSALSDPYLSFAAALNGLAGPLHGLANQEVLLWIKSVIQETGSDVTTDQLKEYVWKTLKSGKVVPGFGHGVLRKTDPRYSCQREFALKHLPEDPLFQLVSKLYEVVPPILTELGKVKNPWPNVDAHSGVLLNHFGLSEARYYTVLFGVSRSMGIGSQLIWDRALGLPLERPKSVTMEWLENYCNNKAA

SEQ ID NO: 223873 - protein, 208 aa, Zea Mays
MSAGFNKQILAQKLSKLNSSQQSIETLSHWCVFHHRYCQQVVETWDCEFHAAPGERRVSLLYLANDIMQNSRKEGNGYITEFMRVIPAALNEVLTIRDDFGRNVPKRLIDIWEDRKIFDTQAQSLKDDFFRRLKDIRNKLKNTGSELLEKVVSSYKHVLNAPMDEDTLMRKCQAALINFDELNKTYGNNSVLGFSQNQQTTMVSSITH

SEQ ID NO: 223874 - protein, 337 aa, Zea Mays
MDARAPPPPQPHPSRAPSPQPHLSRAPSPQPPPAPSRRYGVHFSASSFIQAPLTALLEYSGILRPDPGCGIQQPGTGAGPGEVSIRIVAPGEAGTSSERAEEVIVEEEEEDGQATRTRPEDSSPAAGGGEGGRETSSSYQRYDIQQVARWVEQILPFSLLLLVVFIRQHLQGFFVTIWIAAVMFKSNDILCKQTALKRERKIPVLVGITILFVVHVSGFYWCYKNEDLIRPLMMLPPKEIPPFWHAIFIILVNDTMGQMLTIVEYFLLLYRALLPTPMWYRFFLNKEYGSLFSSLTTGLYLTFKLTSVVEKIGKGWCVAAKERTSCFCARKKDAKDL

SEQ ID NO: 223875 - protein, 95 aa, Zea Mays
MHIIEDIVVNCRQVFKGSVNYAWTTVPTYPSGVIGFMLCSTEGPAVDFQHPVFNIEEDEHPMKSKGPLKFYNSEIHTASFCLPSFAKRVIESKAN

SEQ ID NO: 223876 - protein, 208 aa, Zea Mays
MAPAPEPTAAAAGRKRKKPHGPSKIIAKKSADPKRAYAKKKKEKHKQKEKKSRLKPAEPDQIAATIGDGVAGATVLLSALMQPSRQLEFLLRSFERASKMRLSPLELDSYSEGCMVQLAEGAAQDVESFGDHVKGVFGSSWKEELCEGNHIDGEIAVGSPTLLVISSSALRSLDLLRGLKMFTKECRPVKLFAKHLKVEEQILIFPIQ

SEQ ID NO: 223877 - protein, 106 aa, Zea Mays
MAEAEATVGRLMLYSYWRSSCSHRARIALNLKGVDYEYKAVNLLKGEQSDPEFVKLNPMKFVPALVDGSSVIGDSYAITLYLEDKYPEPPLLPQDLQKKALNHQIA

SEQ ID NO: 223878 - protein, 72 aa, Zea Mays
MSTEWVKGKPMDEVLTIKNTEIAKHLSLPPVKLHCSMLAEDAIKAAVKDYEAKKAKMGQKSEDSPSEKAAEA

SEQ ID NO: 223879 - protein, 530 aa, Zea Mays
MARRLLSRGRLIKLDRPILPAALTRLLSRGPPTPTTSEPEDKGKKAAAVLVEAVATNHKKDAEVGRDGSEEDDEDTSPPWRSWRPDVAWLSKALEPALDLYKQYSWKPFASSGRVENIPASTRTFSEILSDLQRSKISIKDWSLSDLTIGLYLIYLSQASSKNSEAFKGVQISSNKMVQELIYHLELARGCYKGNAAGLARYSMLRKRNVVKFVKDSSILRPGYYIGIDPRAKLVILGIRGTHTVYDLVTDLIALSDKKVSPKGFSTHFGTYEAARWYLRHELGIIRKCLEKHKDYELRLVGHSLGGASAALLAIMLRKKSKEELGFSPDIISAVGFGTPPCISKEAAESCASYVSTVVLQDDIIPRLSAASLARLRNEILKTDWVSVLEKEDLKHIVDIVTNAKLVVSSIQDVARKLGDYAKIVSPSTNSGVTKDPTNSTEMATSISRNDVFVPEDLFLPGTLYYLQRDIEDINDVEEESYTLWKGDPGENFQRILLSGNLISDHRCESIYYALREVLKTLPPPRTLDE

SEQ ID NO: 223880 - protein, 56 aa, Zea Mays
MRLRRTSGNSHFLFLMSPRSQKQSIFWSSNIARILLFQVTCGCCRSAWYCKHANSI

SEQ ID NO: 223881 - protein, 78 aa, Zea Mays
MAPLKRMPLVMWEQVAQLYKGWVSKEHTTKEWVICNLSTITEISRTNEDMDLFCNSCSSPRRVFGRSYLLSKTPCGDH

SEQ ID NO: 223882 - protein, 150 aa, Zea Mays
MWESILPRSIYRKSMCNVLGSVFSRITRDMLLIDDMAAEETLQLQGLIHLALENLSSLFLSLVENNDGSTKSLDHDAWIQLDGILPSLKKFCKLAELLDMSLKSIATCWESGDLVRCGFTSSEVQNFIKAIFADSPLRKECLGWIVRTPA

SEQ ID NO: 223883 - protein, 119 aa, Zea Mays
MDAGVEKCGDAAAEGGGDLYAVLGLKKECSDADLKVAYRKLAKKWHPDKCSSSSISVKHMEEAKEKFQEIQGAYSVLSDANKRLLYDVGVYDDEDDEDSGMGDFIGEMTQMMSQVRPMA

SEQ ID NO: 223884 - protein, 234 aa, Zea Mays
MEEAVEAVVAAGVEPFPTVDKCDASGRGAHAVVADLDGALLRSRSAFPYYALVAFEAGGVPRLLLLLLLAPLAAALRALASESACARVLVFAATAGARVRDIESAARAVLPRFYAADVHPAAWRVFSACARRRVVLTAAPRIMAEPFLRDCLGADAVAGTELATWRGRATGMVDSRRGVLVGWSRADALREILAGDDDDDAAPDVGLGNSRSDYPFMSMCKVVDEVCLDAINIV

SEQ ID NO: 223885 - protein, 180 aa, Zea Mays
MLVIMGIHQLNFRSDMGVQILDSLCDDEHLDCNDLLSSITGQNCCFNSSRIDYYLEYEPHPSSTKNLRHLFQMIRKGSFAKYDYGWWGNLRRYGQLRPPSFDLSSIPESLPIWMGYGGLDALADVTDVERTIKELRSTPELLYIGGYGHIDFIMSVKAKEDVYVDLMRFLRAQQGMHSSY

SEQ ID NO: 223886 - protein, 169 aa, Zea Mays
MATTRLLPLLRRRLAAAIAGSPAPYSLRGPSFPAPAAAGLRSLLKAAGASDTATEPQDQQHSETTPPPASVPTPESGLKVRDTSNLKISPRHDLAMIFTCKVCETRSMKMASRDSYENGVVVVRCGGCNNLHLMADRLGWFGEPGSIEDFLATQGEEVKKGEAMRAEES

SEQ ID NO: 223887 - protein, 186 aa, Zea Mays
MATTRLLPLLRRRLAAAIAGSPAPYSLRGPSFPAPAAAGLRSLLKAAGASDTATEPQDQQHSETTPPPASVPTPESGLKVRDTSNLKISPRHDLAMIFTCKVCETRSMKMASRDSYENGVVVVRCGGCNNLHLMADRLGWFGEPGSIEDFLATQGEEVKKGSTDTISFTLDDLAGSQVRPCGQKNP

SEQ ID NO: 223888 - protein, 431 aa, Zea Mays
MDDVEELFLRHFTEGDRRKAMVYLKPNQREESHCTTFFIGVSTGGFIALFIGYCIMARVAGMYTQQSNKVYMSTSYPVLSMFSLFFLHLFIYGCNIFMWRKTRINHTFIFEFTPTKELKYRDVFLICTASMTIVVGAMFAHLAIIVKGNSSGVVQAIPGSLLLVFLFILVCPFNIVYQSSRYQFLRVIRNIILTPFYKVVMVDFFMADQLCSQVPLLRSLEYLACYYITGSYMTQDYGYCTRVKNFRDLAYAVSFLPYYWRAMQCARRWFDEGDINHIVNLGKYVSAMLAAGTKVAYENNNSTGWMSLVIIVSSIATIYQLYWDFVKDWGLLQFNSKNAWLRNDLILKQKYIYFVSMGLNLVLRLAWLQTVIHPNIGSLDSRVTLFFLAALEVIRRGHWNFYRLENEHLNNAGKFRAVKVVPLPFQEVEEE

SEQ ID NO: 223889 - protein, 154 aa, Zea Mays
MASPNADPAQHHASTPPLLLAVRHLPFPGVHRTRALPGPDVLTPLARRLEELASAATSHPLLKPLFAAHSHLSSFSQEAAGGGAACDGAVRGALLRGGARELGGRVGGVQRHQQLPQPLQHGARRQARAHVVPQHAARHRRASQVGAIAALHDM

SEQ ID NO: 223890 - protein, 95 aa, Zea Mays; identical to SEQ ID NO: 222709

SEQ ID NO: 223891 - protein, 145 aa, Zea Mays
MFDLVKNQFAVEAIQKCGGQTIADGSRFRTGGGILWNILKSREPKAYKEIMAKGKELEKQFRCTKRPQISRNEDASSQGSALIDDEIEARDQKETLDDPKQLDDVEIHVSDNKAQRKPLADRIRAPVAYDDLFEEGEIHDGEPRS

SEQ ID NO: 223892 - protein, 166 aa, Zea Mays
MATTATRRWWRRHDGGDDDPDDLVPMDTQEQEELVRSLEAKQAQQGRRWRRVFAGFLLAVPCLLHGRFACTNGHNCRLDSCSSMPICCERITTEFRPIKEVDVVFLLCWHFGSHLLDILHLEVAKNSMGCCMAPTRSFDGWCIEPVCGPCAAGVNARYQHIEKLHV

SEQ ID NO: 223893 - protein, 54 aa, Zea Mays
MFGGSKAIPAAQSPVAIAGAQQSGLDQPDASALGYKVKNLEKKVKSRGKSRKHR

SEQ ID NO: 223894 - protein, 65 aa, Zea Mays
MSYLRDFTTKSLPDCLILFRGTHTHALAPIVPYSMENSVADAMYNKIIVFVFDQVVDTTPWKSWW

SEQ ID NO: 223895 - protein, 64 aa, Zea Mays
MVYKFVVLLWACKKGQFYVLNLFPNIQAEFDLGTRYNMSYLRDFTTKGYPYARACANRALFNGE

SEQ ID NO: 223896 - protein, 357 aa, Zea Mays
MFIVWSPSLPHHLRAFYMQACACHFSPVLAPPRSRISASHSPGMATLKVPATVPPVADDCDQLRKAFQGWGTNEALIISILGHRDAAQRRAIRRAYAEAYGEELLRSITDEISGDFERAVILWTLDPAERDAVLANEAARKWKPGNRVLVEIACTRTSAQIFATRQAYHERFKRSLEEDIAAHVTGDFRKLLVPLVSTYRYDGPEVNTRLAHSEAKLLHEKIHHKAYSDDEIIRILTTRSKPQLIATFNHYNDAFGHRINKDLKADPQDEYLRTLRAIIRCFSCPDRYFEKVARQAIAGLGTDENSLTRVITTRAEVDLKLIKEAYQKRNSVPLERAVAGDTSGDYESMLLALLGQE

SEQ ID NO: 223897 - protein, 299 aa, Zea Mays
MTATSCAKHSKGGARTRRSSSPSSATATPRSAAPSAALTPRPTARSSSAPSRTRSPATSRAVILWTLDPAERDAVLANEAARKWKPGNRVLVEIACTRTSAQIFATRQAYHERFKRSLEEDIAAHVTGDFRKLLVPLVSTYRYDGPEVNTRLAHSEAKLLHEKIHHKAYSDDEIIRILTTRSKPQLIATFNHYNDAFGHRINKDLKADPQDEYLRTLRAIIRCFSCPDRYFEKVARQAIAGLGTDENSLTRVITTRAEVDLKLIKEAYQKRNSVPLERAVAGDTSGDYESMLLALLGQE

SEQ ID NO: 223898 - protein, 121 aa, Zea Mays
MMYSFLKENWRIAKWVALGAVVFEALLFTVAIIVQSGNQTDYDSDDEYIGARSGIRQPLVNQQAAAAAADPRVPNLDYRPIRNDAWSQRMREKYGVDSFDPNRFQPATISPGEQRNRCTIL

SEQ ID NO: 223899 - protein, 385 aa, Zea Mays
MARRSRGSGSVTDAASKADAAAMRMVSRRGAVRLVLVSATAWAMLGLVALAFHLRPCSSRVAFLSALCKKDSKVLSVLDSMGLSSKPLHRCPIPVADDPNVVVIPKRTPNTIVKKLAYITVDKQDKDPSPLFGGRQNWKQREESFKLNSTMKVHCGFMKNSGADMDIIDVKYIQKCKFVVASGIFDGYDIPHQPSNISRRSQKLFCFLMVVDEVSLDFIQKNTTVKIDSAGGKWVGIWRLLTVHRLPFDEPRRNGKIPKILTHRLFPQAWYSIWIDGKMELIVDPLLILERYLWRGKYTFAVAVHKHHRSIYEEGDAIKRRKRYARPLVDLQMKMYYYEGMEPWSPKKKMPGDVPEGAVLIREHTATTNLFSCLWFNEAHEGALV

SEQ ID NO: 223900 - protein, 424 aa, Zea Mays
MSVTHFKKKYEEYDLKGDEQEQIDRLAEDGDIYSKLARSLAPEIFGHEDVKKALLLLLVGAPHRKLADGMKIRGDLHICMMGDPGVAKSQLLKHIINVAPRGVYTTGRGSSGVGLTAAVQKDPVTNEFVLEGGALVLADMGICAIDEFDKMEESDRTAIHEVMEQQTVSIAKAGITTSLNARTAILAAANPAWGRYDMRRTPAENINLPPALLSRFDLLWLILDRADMETDLEMARHVVHVHQNLESPALGFTPLEPSVLRAYISAARRVIPSVPRELEEYIATAYSSIRQEEAKSNAPTSYTTIRTLLSILRISIALARLRFSETVAQSDVDEALRLMQMSKYSLYSDDRQRSGLDAISDIYSILRDEAARTSSMDVRYAHALNLISRKGYSEAQLKECLEEYASLNVWQIHPSTFDIHFIDA

SEQ ID NO: 223901 - protein, 508 aa, Zea Mays
MALRPPHQPSPTLHGSNRLEVPRTTVAGRHRLPRTVAGPPWWKSFSPRPAPRRSSSSSSPPACAARGRRRRGGGRDLTIPCITTRTSRRRRAKPQWQNDTVAAATRSTFGPPGGGWHAPPPDMTSGPHGARPPPPTTPHEALLGLGKGTFSYEELAAATGDFSAANLLGQGGFGYVHKGVLPGGMVVAVKQLKSDSGQGEREFQAEVDIISRVHHRHLVSLVGHCIAGARRVLVYQFVPNKTLEFHLHGKGQPVMEWSTRLRIALGSAKGLAYLHEDCEPSPDHSPRHQVGQHSSRQQLPSQGRRLRAGQADVGQQHARVDPCDGDVRVPGAGVRVEREADGQVGRLLLRRGAAGAPDGAAPHRRRRRALVPRRRRQPRGLGEAGAVARAGRRRLRRRRGPEAAGQLRHHGDGAHGRQRRGSRAPLGQEAPQDESDREGTRGGHLAGGPQRQRGGATWAEHGVRHGGRGLVQGQSSRTVHARRGTDQAGAHGVQRRGGPSLYDRQRRR

SEQ ID NO: 223902 - protein, 584 aa, Zea Mays
MSSNSSTGPRPRPSPSPPPPKSSPSPSHSTAPPPSADSSSPGPSLPSDSSPPPAASRSHGAQASSPAKPHSPREQPSRGSADDGGRPPPAPAHRGGPTMVEIVFAAAGAAALLVILIAACVCCSRKTAPRRRKRPHNPMHYYADFPSSACKATGNSSTYYPNGPQPQWQNDTVAAATRSTFGPPGGGWHAPPPDMTSGPHGARPPPPTTPHEALLGLGKGTFSYEELAAATGDFSAANLLGQGGFGYVHKGVLPGGMVVAVKQLKSDSGQGEREFQAEVDIISRVHHRHLVSLVGHCIAGARRVLVYQFVPNKTLEFHLHGQPVMEWSTRLRIALGSAKGLAYLHEDCHPRIIHRDIKSANILLDNNFQAKVADFGLAKLTSDSNTHVSTRVMGTFGYLAPEYASSGKLTDKSDVFSYGVVLLELLTGRRPIDAGDARSFLDVDDSLVDWARPALSRALADGDYDGVADPRLRGNYDTMEMARMAASAAAAVRHSAKKRPKMSQIVRALEGDISLEDLNDNEGVRPGQSMALGTAAAASYKAKAPGPYTHGVERIRQAPTVYSGAVGRPSTIGNDGDESREPHQ

SEQ ID NO: 223903 - protein, 398 aa, Zea Mays
MGKSCVPPVAMVLVQLGFAGMNVVSKLALDAGMSPYVLIAYRNLIAAAVISPVAYLLERRSGATITKKVLLQIFVSSIFGATLNQVLYFVGLKSTSPTVACALTNTLPALTFVMAAALKMESVRPGTPAGQAKLVGTAVCVGGSMVIPFYKGPVLGLWASPLHWRFVADHAPSPAAAAAHSGAAVLGDVLIIASCVAWAVWFILHTKMSEGFSAPYTSTAIMCLMAGVQCAGVSAAMDRSLDVWKLGCDIRLYSVLYIVKRLLDHGIVGSGIGFTLMSWCIQVRGPLYVSMFSPLLLVVVAIIGWAILGEKIRVGTAVGSVLIVAGLYMVLWGKGREMDRPDLDNDDDIADEETAVGLVGFSGKGGGAVAIASSRVEAISLPVSFSTTSPKRLQHIHG

SEQ ID NO: 223904 - protein, 374 aa, Zea Mays
MGKSCVPPVAMVLVQLGFAGMNVVSKLALDAGMSPYVLIAYRNLIAAAVISPVAYLLERRSGATITKKVLLQIFVSSIFGATLNQVLYFVGLKSTSPTVACALTNTLPALTFVMAAALKMESVRPGTPAGQAKLVGTAVCVGGSMVIPFYKGPVLGLWASPLHWRFVADHAPSPAAAAAHSGAAVLGDVLIIASCVAWAVWFILHTKMSEGFSAPYTSTAIMCLMAGVQCAGVSAAMDRSLDVWKLGCDIRLYSVLYIVRGPLYVSMFSPLLLVVVAIIGWAILGEKIRVGTAVGSVLIVAGLYMVLWGKGREMDRPDLDNDDDIADEETAVGLVGFSGKGGGAVAIASSRVEAISLPVSFSTTSPKRLQHIHG

SEQ ID NO: 223905 - protein, 407 aa, Zea Mays
MGKSCVPPVAMVLVQLGFAGMNVVSKLALDAGMSPYVLIAYRNLIAAAVISPVAYLLESSWGNATKLTQQLCACRRSGATITKKVLLQIFVSSIFGATLNQVLYFVGLKSTSPTVACALTNTLPALTFVMAAALKMESVRPGTPAGQAKLVGTAVCVGGSMVIPFYKGPVLGLWASPLHWRFVADHAPSPAAAAAHSGAAVLGDVLIIASCVAWAVWFILHTKMSEGFSAPYTSTAIMCLMAGVQCAGVSAAMDRSLDVWKLGCDIRLYSVLYIGIVGSGIGFTLMSWCIQVRGPLYVSMFSPLLLVVVAIIGWAILGEKIRVGTAVGSVLIVAGLYMVLWGKGREMDRPDLDNDDDIADEETAVGLVGFSGKGGGAVAIASSRVEAISLPVSFSTTSPKRLQHIHG

SEQ ID NO: 223906 - protein, 830 aa, Zea Mays
MPIGVIFQYIWYQMRSNYDYVCYCCFILVFMWNFSLLSMAYLGALFLYALCVNYGPSYLFWVIILIYTEVNILSQYIYQIIIQHCGLNIHLPLLQRLGFPDNKIKASFVVSILPLFLVYISTLLQSSITAKDGEWVPVTEFSFLSARNNIEEKHCVAYSWREKLKSLPLPVFDLIRMIVRGLSRYWMSLTHGAESPPYFVQVTMEVSHWPEDGIQPERIESAINRVLAIAHEERCQANLPSSCHCCSKVRIQSIEKSKENCNMALAVLEVVYAAPVECQSKGWHKSLTPAADVEREIHESQKAGFFEEINFPYPIVSVIGGGKREIDLYAYYFGADLAVFFLVAMFYQSILKNKSEFLEVYQLEDQFPKEFVFILMVLFFLIVVDRIIYLWSFATGKVVFYLFNLVLFTYSVTEYAWGTELAHRDIGGLVLRAIYLTKSISLALQALQIRYGIPNKSNLYRQFLTSKVTQVNYLGFRLYRALPFLYELRCVLDWSCTTTSLTMYDWLKLEDIYASLFLVKCDTLLNRANHRQGEKQTKTTKFCSGICLFFVLICVIWAPMLIYSSGNPTNIANPIVDVSVKIDIKALGGRLNLFKTTACEKIPWKYLKAYDDVDPLDYLGAYNVDDIQLICCQPDASTMWLIPPPVQNRFIQSLEEREMLFGKMELILNWDFLRARPKGKELVRYESPIEHCPSVDDVKRVLNGTANSFSIIDAYPRYFRVTGSGEVRRLEAAIDSVSGELLLNNGTPWWSFYDTNPSDLAGCQGLNGPMAIVVSEETPQGIIGETLSKFSIWSLYITFVLAVARFIRLQCSDLRMRIPYENLPSCDSKS

SEQ ID NO: 223907 - protein, 370 aa, Zea Mays
MGSFGMDMDWNQKASVLLWDWENLPPAAANGSESHRTTAAAPQFAGLEATGHEPAPSSVSSSIHSLPSAKGNKNKNNMELISFAPAKAPDKDTGSVLSSGEPVVLGLKLGKRTYFEDGCGLGQSGKSSAALGTASAATPPGPAKKAKAAAAAPTAQQQKSYCQVEGCRTDLSSAKDYHRKHRVCEPHSKAPKVVVAGLERRFCQQCSRFHGLAEFDQKKKSCRRRLNDHNARRRKPQPEALPFGSSRLSAMFYDTRRQASLLFGEGPYGQMRSCASSWWDSPGAGGGGFKFAETRGAPWLKPARAAADGLLPLSGQQQQQVWNDSIPHVAHQEDFDGFTVTAFKGISPKTLDHQGNKNAPFSDEHDDIQR

SEQ ID NO: 223908 - protein, 176 aa, Zea Mays
MIGRPCDLCDVLKDLVAGALPLAYKQQRTLDLTEISHPLHVAVEESALRKALSNLIEGALLRTQHGGVVQICAVEAPAGGALVVIDDDGPDMQYMTQMRSLAPFGSDLADGMLEDNMTWNFIAGLTVARELLEEYGCVLRVISPRRTDAVIGTGGSRVEIWLPSFQTQAAKTSQEV

SEQ ID NO: 223909 - protein, 718 aa, Zea Mays
MWRLRIAEGGGDPWLRTKNAHVGRQFAKENPLELDLPAIKLGEHEDVTEEAVSTTLRRAISRLSTLQAHDGHWPGDYGGPMFLMPGLIITLYVTGALNTVLSSEHQKEIRRYLYNHQNEDGGWGLHIEGPSTMFGSALTYVTLRLLGEGPDSGDGAMEKGRNWILDHGGATYITSWGKFWLSVLGVFEWSGNNPVPPEVWLLPYLLPFHPGRMWCHCRMVYLPMCYIYGKRFVGRITPLVLELRKELFKDPYSKIDWDKARNLCAKEDLYYPHPFVQDVLWATLHKFVEPVMMSWPGSKLREKALETAMQHVHYEDENTRYICIGPVNKVLNMLACWIEDPNSEAFKLHIPRVYDYLWLAEDGMKMQGYNGSQLWDTAFIVQAIVATNLTEEFGPTLKLAHNYIKKSQVLDDCPGDLNDWYRHTSKGAWPFSTADHGWPISDCTAEGLKASLLLSKISPEIVGGPIEANRFYDAVSCLMSYMNDNGGFATYELTRSYAWLELINPAETFGDIVIDYPYVECTSAAIQALTSFRKLYPGHRRKEVDSCISKAANFIESIQKSDGSWYGSWAVCFTYGTWFGVKGLIAAGRTFESSPAIRKACGFLLSKELPSGGWGESYLSSQDQVYTNLKGNRAHAANTGWAMLALIDAGQAQRDPAPLHRAAKVLINLQSEDGEFPQQEIIGVFNKNCMISYSQYRNTFPIWALGEYRCRVLGAGKR

SEQ ID NO: 223910 - protein, 530 aa, Zea Mays
MMAAEPSPSVPSTAADALETLALDSSSSSAAATASTSTDPLLRPPTSPTAAASDDPFVIDDFDEDDFSTAPAPNVARQPRAARGDAASPVFAKITVSDPKKHAEPSGGGAAGVIPGSGSYFSYLITTRLAGGGGEVRVRRRFRDVVTLADRLAAAHRGLFVPARPDKSVLEGQVMQRHDFVSQRCAALQRYLRRLAVHPIVGHSPDLRTFLTEPGAVPAFQGEPPRYWTTTLNAAAPLVPTKARRDLFGMFKGLKQTVVNGLVATKPPPVEQETDTEFLAHKARFDDLQQQLTITSQQAEALVKAQDDLRETTGHLGMTLIKLAKFEREQATCNSLRRRAGEIHNFANSVLKMSRSQIKLNSEMVKHLGSIHEYLEMMISVHHAFTDRSNALYYVQSLSADLFSLHTRAGGLESSSARDMGHEWSTYQKVEGLKEAIRSAEAAKSDAVREYESIKENNMIEIKRFDKERRHDFIEMLKGFVVTQVSYSDHFANMWTKFDYLCRRVLFNNLLKERERGRRKHRIRGCHARR

SEQ ID NO: 223911 - protein, 98 aa, Zea Mays
MAGSQSQAMLEKMELRQSYRNVWHTDLTNAVAADLPCAACLCGAARACPTCCADARSTMTCQGTCAAPGTCRAAASAARASARKYALQPRCSAASATR

SEQ ID NO: 223912 - protein, 430 aa, Zea Mays
MRRPLASAALRLRFFSSTSPARLLSPCPFLLSRRDDDGGREASSSPLPPLPPSGSAFSPRPLLFSASAAAGLFSLHGGWWRQALPPAASRPLGSVSDAAPVRLTISRSYSLRVAKGKKKAHFDDEHSHRAVNMALCSRRAPDALHPYGYSKERFVWSLISAVGIFCLGSGATIVHGVQNLWNSHPPENIHWAALVIGGSFLIEGASLLVAIKAVRKGAEAEGMSIWDYIWRGHDPTSVAVMTEDGAAVTGLAIAAASLVAVQMTGNAMYDPIGSIIVGNLLGMVAIFLIQRNRHALIGRAIDDHDMQRVLEFLKSDPVVDALYDCKSEVIGPGFFRFKAEIDFNGVVLVQNYLERTGRGSWAKQFREAAMSKDDTELLRVMANYGEDVVEALGYEVDRLESEIQKLVPGIKHVDIEAHNPEGLALRAEVL

SEQ ID NO: 223913 - protein, 416 aa, Zea Mays
MRRPLASAALRLRFFSSTSPARLLSPCPFLLSRRDDDGGREASSSPLPPLPPSGSAFSPRPLLFSASAAAGLFSLHGGWWRQALPPAASRPLGSVSDAAPVRLTISRSYSLRVAKGKKKAHFDDEHSHRAVNMALWCNFLVFSLKFGVWISTSSHVMLAELVHSVADFANQALLAYGLSSSRRAPDALHPYGYSKERFVWSLISAVGIFCLGSGATIVHGVQNLWNSHPPENIHWAALVIGGSFLIEGASLLVAIKAVRKGAEAEGMSIWDYIWRGHDPTSVAVMTEDGAAVTGLAIAAASLVAVQMTGNAMYDPIGSIIVGNLLGMVAIFLIQRNRHALIGRAIDDHDMQRVLEFLKSDPVVDALYDCKSEVIGPGFFRFKAEIDFNGVVLVQNYLERTGRGSWAKQALNPLTNK

SEQ ID NO: 223914 - protein, 155 aa, Zea Mays
MESPPLTAEAIAFTEKKMDMTLEDIIKMSKKKNPGGKNPPRQPIKKRPFQNANTNKGNGKVQRFMESRSTIRQGVLAQRRSNLGGSQFAATKQAAKKAAAMPMRSGAVYWKKPSSIHGVIYSCWMSAIFGHQCLRFTLVLFVNYGWKDRRRCDND

SEQ ID NO: 223915 - protein, 182 aa, Zea Mays
MAFFLALVCILILLAIASYVQYTRWQKGKGRFGGHGRSAPLKLPPGSMGWPYLGETLQLYSQDPSFFFASKQKSIISFTFREAVADVEYKGFLIPKGWKVMPLFRNIHHSPDYFQDPHKFDPSRFQVAPRPSTFLPFGHGVHACPGNELAKLEMLVLIHHLVTGYRCVHLLSDPLHIFPLVL

SEQ ID NO: 223916 - protein, 350 aa, Zea Mays
MAFFLALVCILILLAIASYVQYTRWQKGKGRFGGHGRSAPLKLPPGSMGWPYLGETLQLYSQDPSFFFASKQKRYGEIFKTHLLGCPCVMLASPEAARFVLVTQAHLFKPTYPRSKERMIGPSALFFHQGDYHLRLRKLVQGALGPDALRALVPEVEAAVRSTLASWDAGHVRSTFHAMKTLSFDVGIVTIFGGRLDERRKAELRKNYSVVEKGYNSFPNSLPGTLHYKAMQVILESLRMASIISFTFREAVADVEYKGFLIPKGWKVMPLFRNIHHSPDYFQDPHKFDPSRFQVAPRPSTFLPFGHGVHACPGNELAKLEMLVLIHHLVTGYRCVHLLSDPLHIFPLVL

SEQ ID NO: 223917 - protein, 223 aa, Zea Mays
MAFFLALVCILILLAIASYVQYTRWQKGKGRFGGHGRSAPLKLPPGSMGWPYLGETLQLYSQDPSFFFASKQKRYGEIFKTHLLGCPCVMLASPEAARFVLVTQAHLFKPTYPRSKERMIGPSALFFHQGDYHLRLRKLVQGALGPDALRALVPEVEAAVRSTLASWDAGHDGEHHLVHVQGGRGRRGVQRVPYPQGVEGDAALQEHPPQPGLLPGSTQVRPF

SEQ ID NO: 223918 - protein, 216 aa, Zea Mays
MAFFLALVCILILLAIASYVQYTRWQKGKGRFGGHGRSAPLKLPPGSMGWPYLGETLQLYSQDPSFFFASKQKSIISFTFREAVADVEYKGFLIPKGWKVMPLFRNIHHSPDYFQDPHKFDPSRFQVAPRPSTFLPFGHGVHACPGNELAKLEMLVLIHHLVTGYRWQIVGSSDEVEYSPFPVPKHGLPVRLWRQNNPVDRKGRETDDDHVERIFI

SEQ ID NO: 223919 - protein, 383 aa, Zea Mays
MEEGGRHDHDAGDRISSLPDDLLFSILLRIGSIRAAARTSVLSRRWRHVWARLPELRLGTCDEQPGATFLDFVDAVLDACSAPAVHRLEVAMYCHGLRVHACRLVPWLRFASQRRVGDIHIQVPSQKKFFLSKPIKEELELPVCDGATRITLSLERRWSLRLCPAGSFMSLTDLHISCATMAGSELGNLVSEQCPLLRNLYLFVRLAAASNVSIHSNSLQSLSFNVQNTQKLEVMAPKLEVLAVCDATKAHISAPKLSVVSWDNDTGYNPLCHHFANAARHLRLLHLGSKCVSASLMRQFDEVDVLKLKLNLLNIKGTEAYTNLLNETAALPKCEELKLRVSLRASQHNFASIMFHILRSCNNTRRISIKIDSSMLNLRDKKG

SEQ ID NO: 223920 - protein, 521 aa, Zea Mays
MGGERTVKRLRLSRALTVPESTTVLEVCRRMAARRADAALLTDSNALLCGILTDKDIATRVIARELKIDETPVWKVMTRHPIFVLSDTLAVEALQKMVQGKFRHLPVVDNGEVVAMLDIAKCLYDAISRMERASEKGKAAIANVAAGDDKYSIVEALKEQMFRPCLSAIIGEDSTVVMVSPGDSVLAATKRMVEAHATSAVVAVGSKPQGILTSRDILMRLVAKNLSADATPVEKVMTPDPEFATVDMPILDALRTMQERKFLHLPVMDRDGSIISIIDVIDIAHAAISICVCAQRACDGTLQVESSGGGGDGSAGSDEAASSMFQRFWDSAMALGPLDDETDTQSQMSEASRSQMMMSDVHHHHHHHDSAGGGSEAGFSLSSFSFKLQDRRGRMHRFSCEVQSLTPLVTCILRRLGADIDPDRLPQILYEDEDRDKVVLASDDDLAAAVEHARLAGWKGLKLFLDYSGTTGRRKAVATPRGAMAVGMSSRDAWAAAYSGVAAGAALVTGIGVMAYLRRSA

SEQ ID NO: 223921 - protein, 279 aa, Zea Mays
MTLLHAAMVLIIYRKWYLGLVVFSGAVSIKMNVLLFAPSLLLLMVKAMSIKGVFFALLGAAVVQVLLGMPFLLSHPVEYISRAFNLGRVFIHFWSVNFKFVPEKVFVSKELAIALLILHLTTLMIFAHYKWLKHEGGLFGFLHSRFKNAKSIKQLVSSQPRPSSLSAEHIVTVMFVGNFIGVVCARSLHYQFYSWYFYSLPFLLWKTRYQTPLRIILFLVVECCWNVYPSTAYSSLLLLFVHLCILFGIWFSPAEYPYIISKGTKRTYQEVAKLDFPAK

SEQ ID NO: 223922 - protein, 321 aa, Zea Mays
MMQGAAAGGTSVSGASWARATRGRAAVLASRHVGVGASSSDYYYNHFGPRGATAAPLLRARGGGRLRPLPLLSGSGKNGEVAKAAAAAASVPADDASAAAVTTDGGGIAATAQLGAMIVAWYLLNIYFNIYNKQVPSLPVLGSLVPIVGGVALASFTEVSFNWTGFWSAMASNLTNQSRNVLSKKLLAGDKDVMDDINLFSVITVLSFLLSCPLMIFAEGIKFTPGYLQSTGLNLQELCVRAALAGLCFHGYQKLSYLILSRVSPVTHSVANCVKRVVVIVSSVLFFSTPISPVNALGTGAALAGVFLYSRLTRTKKPKDA

SEQ ID NO: 223923 - protein, 653 aa, Zea Mays
MNLLLSPQNLSVDHTCHTVFLRHPSFVPPCAADLLHVLAQASDVICSSPQVASVDVWEQLQRSSETTVSRPQYAPLSDNRARNDHSEPHYASGVNLSQSAPSTNQVSQAASGNQMSTEAYRAKHEITIIGNESPAPFMTFQSTCFPSDILREVLQAGFSAPTPIQAQSWPIAMKGRDIVAVAKTGSGKTLGYLLPGFILLKRLHHNSREGPTVLVLSPTRELATQIQDEAIKFGRSSRISSTCLYGGAPKGPQLRELERGADVVVATPGRLNDILEMNKVSLRQVSYLVLDEADRMLDMGFEPQIRKIVKQIPPRRQTLMYTATWPKEVRKIASDLLNNPVQVNIGNTDQLVANKSITQHVEVIPHMEKSRRLDQILRSQDPGSKIIIFCSTKRMCDQLARNLSRQYGASAIHGDKSQAERDSVLNDFRSGRCPVLVATDVAARGLDIKDIRIVVNYDFPTGVEDYVHRIGRTGRAGATGSAYTFFGDQDSKYASELVKILEGANQSVPPQLKEMALRGGYGGRSRRWASSDDSYGSQGYGAKRSTDSFKNSSFGNQAGGGSSFHSSFHNSSSGNQFGDTTSFHASYGNSSQNNQTGDNPSFPPSSSNNQSGDGLSFHERFYGSRGRDESRSNNDGFRARSRSPGKPVEVSNW

SEQ ID NO: 223924 - protein, 108 aa, Zea Mays
MVLLLLQQQRRLALGAHADLLGGAEAADVALVLAAGDAEQWRVAALRDDAAEQRAHALAVCLVQQPGLYIYFHASSSIMVHVHLLLFVLDVAWCMPGMQAPWLPLPAL

SEQ ID NO: 223925 - protein, 1042 aa, Zea Mays
MLLSYTIEVHYKQFRWRLYKKASQVLYLHFALKRREFLEEFHEKQEQVKEWLQNLGIGEHMPVVHDEDEADDVNVPPQSDDNSIRNRNVPSSAVLPVIRPALGRQNSISDRAKVAMQEYLNHFLGNLDIVNSREVCKFLEVSCLSFLPEYGPKLKEDNVSVGHLPKIQKDRKKRCCSCGLFNCCKSNWQKTWAVLKPGFLALLEDPFDPKLLDVIIFDALPHMDITGEGQVSLAKEIKERNPLHFGFQVSSGGRTIKLRATSSSRVKDWVTAINAARQPPEGWCYPHRFGSFAPPRGLLEDGSMVQWFVDGQAAFKAIASSIEEAKSEIFITGWWLCPELYLRRPFQHHGSSRLDALLEARAKQGVQIYILLYKEVALALKINSLYSKQRLLNIHENVKVLRYPDHFSSGVYLWSHHEKIVIVDNQVCYIGGLDLCFGRYDSPEHKVADSPPEMWPGKDYYNPRESEPNSWEDTMKDELDRDKYPRMPWHDVQCALYGPPCRDVARHFVQRWNYAKRNKALNEQAIPLLMPHYHMVIPHYKGRSKETNDEAEGKQYNDKDVDIGKPVLTSRTSCQDVPLLLPQELEPRELSSSDLRVNDLDINHSDRLNKKNFNQPLLNRKAKLDSSHQDLPMRSFVDNLSSLEPSSVRRFDSSKDDRNHIDKKWWEMQERGNQVASLLDIGQVGPRVTCRCQVVRSVGQWSAGTTQIEGSIHNAYFSLIEKAEHFVYIENQFFISGLSGDDTIKNRVLEALYRRILRAEREKKRFKAIIIIPLLPGFQGGIDDGGAASVRAIMHWQYRTICRGSNSILQNLFDVIGPKAHDYISFYGLRAHGKLHDGGPLVTSQIYVHSKLMIVDDRITLIGSANINDRSLLGSRDSEIAVVIEDKEVVNSKMDGRPWEAGKSSLSLRLSLWVEHLGLHPGEVSHIMDPIDDSTFKNIWMATAKTNTMIYQDVFGCVPNDLIHSSFAHLRDKIGHTTIDLGVAQEKLEAYQEGDLKSINPMDRLQLVRGHLVSFPLDFMCQEDLRPYFSESEYYTSPQVFH

SEQ ID NO: 223926 - protein, 404 aa, Zea Mays
MNNMGHCNFELVPNWLFKWFPPLKYLMYTPSFHSLHHTQFRTNYSLFMPFYDYIYNTMDKSSDTLYEKSLKGKEETADVVHLTHLTSLHSIYHMRPGFAEYASRPYTAKWYVRMMWPMSWLSMVLTWSYGSSFTVERNVMKKLKMQSWVIPRYSFHYGLSWEKEAINSLVEKAICEADKKGAKVVTLGLLNQAHNLNRNGELYLQKCPKLGVRLVDGTSLAAAVVVNSVPQGTDQVVLAGNISKVARAVAAALCRKNIKVVMTNKQDYHFLKPNMAEDAAENLLFSKTTTAKVWLIGDGLDASEQFKAQKGTQFIPYSQFPPRMARKDTCTYSTTPAMVVPKTLQNVHSCENWLPRRVMSAWRIAGMVHALEGWNEHECGDIVLDMEKMWSGALLHGFRPVAQV

SEQ ID NO: 223927 - protein, 172 aa, Zea Mays
MVPSSQVSHVHTLFRTNYSLFMPFYDYIYNTMDKSSDTLYEKSLKGKEETADVVHLTHLTSLHSIYHMRPGFAEYASRPYTAKWYVRMMWPMSWLSMVLTWSYGSSFTVERNVMKKLKMQSWVIPRYSFHYGLSWEKEAINSLVEKAICEADKKGAKVVTLGLLNQEPVSNV

SEQ ID NO: 223928 - protein, 1115 aa, Zea Mays
MQLAVFAAYHLSLETSFLADEGATLPKVPSISVTGAPNISASPTDHGTSDSLKNAEETYPQNSTISQIFEVISASSTLLPLAGVSQGIMPECRASKFLVDPLNSQDPSNLCHPNVSCNGDLISPCSVSGFRATYVGTQHGGSNKSLQSSIAADVWRDGALTLKHSQPCHSENHSSNPAAGNTDDKDKLSAGYLSGTDNNQSILVSLSSTCIPKSFACQRSHLVRIKFYGSFDKPLGRYLREDLFDQAYCCPSCKEPSESHVRCYMHQHGSLTISVRRLQSQKLPGEHDGRIWMWHRCMRCKLKDGMPPATHRVIMSDAAWGLSFGKFLELSFSNHMTANRIASCGHSLQRDCLRFYGYGNMAAAFHYSPMITLSVNLPPPVLDFNTHATQDWVKREAVEVFHTMDLLHTEVYDALNNLEKSIITDDDSTKTSIQRQIVEMKDLLNVERNEYEVLLLPVIMGSSHSFKPNIDILELNRVRRSLLLDAHTWDRRLCGIDSLEADSHISRTDPFNLEKTQGINEGRSDLLQTVRKHGGTYEEPCPQHSSESPRKSLLSTEGHLNDKKYVMVETDLPVGLVDGDAGLDLIFNKLNTCEEGRCLSKYPSKTGPVERLPSLASILADKIDMAWSGFGELDYNLPHGLSKANENTSLNLFGNPSYKKATGPVRIHSFDTVLRLHQREQTGVIPASLHSALKSIDSFRDLTSLVKDPMTNMRRAFSQISPRTRGNLNTVLTRAPKYITSASRMVNDGARLLLPNISCEGSVFVTVYDDEPTSVVSYAMTSQEYAEHVTHKMNANTSFSDFTSSNGLDGSLSSHEELSNFRGAHFRLSFDDDASPTDSTKFSVTCYFARQFAALRKKCCPSNSDYIRSISRCKRWSAQGGKSNVYFAKTMDERFIIKQVTKTELDSFVEFAPHYFRHLTESLTSRSPTCLAKILGLYQVSIKNSKGGREVKMDLMVMENILFQRSISRVYDLKGSVRSRYNSDASGHNKVLLDSNLIEALHTKPIFLGSKAKQRLERAVWNDTSFLASLDVMDYSLLVGVDEEKKELVVGIIDFLRQYTWDKQLETWVKASGILGGPKNESPTVISPIQYKKRFRKAMSRYFLAVPDQWTSKGG

SEQ ID NO: 223929 - protein, 186 aa, Zea Mays
MSSTDKQYIVAYNNLKVLKLPYQQGADKRQFSMYILLPDAKDAIWSLAEKLSSEPEFLENHVPMHKVPVGQFKVPKFKISFGFEASELLKGLGLQLPFSAEADLSGLVDSPEGRNLSVSSVFHKSFVEVNEEGTEAAAASAATVVLRSFTMPQDFVADHPFMFLIREDLTGVVLFVGHVVNPLLAP

SEQ ID NO: 223930 - protein, 64 aa, Zea Mays
MLALNFGSMYVRHGGQCCYLKDSEQMLMFIANKSMLMFIKFILNELIISLLFRPCDCFSSRKNL

SEQ ID NO: 223931 - protein, 247 aa, Zea Mays
MEVASGDEDLESLLQNFHRVSQGYKDALMQVQVLRVNCSTEFKRREALESHITDLKKDNERLRRQYTETLFKVTNQVKFRAEAQSLKEELDKANSRLLSMEEEHKRETEQLKHSSEMNINALENKLSHALVQQARDEAAMKQLKLELSAHKSHIDMLGSRLEQVTNDVHSQYKNEIQDLRDVVSVEQEEKKDIHRKLQNVENDEDHEDEAGGAAKGFCLGPARGDAEAEGHEAPEGERVPEEEAGEL

SEQ ID NO: 223932 - protein, 396 aa, Zea Mays
MEPGVVSLADILGTRVADHVPQTPNKISEDMIRCIAAIYIRLRDVPSAAAQHAFFPSPCSSFSSASGLSSKYTADVWSWSPRCRRESFTEAWQVQDNELGLGGGEARDSGLQYDSVIEVSALCKGDQRSADVKDMLRKYMSLVQLLESVDLGGMKNEEKLAFWINVHNAMMMHAHIEYGIPQSNSKRILLTKVSYIVSGQRVNAELIEYQILCCRAHSSGQWLRLLLHPKWKSGRDRDEELQGFAVDRPEPLVHFALSSGSYSDPVVRLYSPKSLFQQLEAAKEEHIRANVAVGVRGRGQRKIILPRALELYARDAGLGAQEVVAAVACHLPDGLRDAVRRSPPAGRARGGVEWKPHNLAFRYLLAKELVGGSPACGRQQLKKCGPPIGAPLRADR

SEQ ID NO: 223933 - protein, 565 aa, Zea Mays
MRRALEKALGYKPCAVHASSVNCIPEPTEELIKEIAVLELEVICLEKHLLTLYRKAFEQQLSPVNSACDAENNKQPARSFSGILSEASVLSFSTPRKHQPVQSSRMVLARKSTPTASTSEASSEKINIGRSHSSLLHRSVRVSPSANNLARALKPCHTSPLSFVEEGKCMEPGVVSLADILGTRVADHVPQTPNKISEDMIRCIAAIYIRLRDVPSAAAQHAFFPSPCSSFSSASGLSSKYTADVWSWSPRCRRESFTEAWQVQDNELGLGGGEARDSGLQYDSVIEVSALCKGDQRSADVKDMLRKYMSLVQLLESVDLGGMKNEEKLAFWINVHNAMMMHAHIEYGIPQSNSKRILLTKVSYIVSGQRVNAELIEYQILCCRAHSSGQWLRLLLHPKWKSGRDRDEELQGFAVDRPEPLVHFALSSGSYSDPVVRLYSPKSLFQQLEAAKEEHIRANVAVGVRGRGQRKIILPRALELYARDAGLGAQEVVAAVACHLPDGLRDAVRRSPPAGRARGGVEWKPHNLAFRYLLAKELVGGSPACGRQQLKKCGPPIGAPLRADR

SEQ ID NO: 223934 - protein, 697 aa, Zea Mays
MGGGEHDHEPDEPEPARDKEHEHDEASVEALFAGQSPAPWWRQVTVRSVTASVFVGAVFSFMSMRMGLTIGLVPSFNMSASLVSFFVISSWTRLLGRCGVATQPFTRQENVVVQTCVIACATLSLYGGFTSFLPAMSPPVAKSAGAPGTGNNVYTLHLGKMMAFSFLTGFTSLFITLPLTKVMILDYKLLFPSGSAIAGLVNSFHTPAGAATAKLQIATLLRSLGGSFSWAVFQWFYTGGDGCGFQAFPLFGLEAYKKRFYFDFSPSLVGIGMICPPMVNFSLLLGAVVSSAILWPILQGKRGEWYDADASPSSLRGLNGYKVPMGISLVLGDCLFQLAAVSIRAARGFHHRRQHQQDEDDGGQQSLSYDDRRRIHNFQSEGMPTHVSLAGYAILAGIATVFLPGIFPQIRFYHVAVCYAMAPLLAFCSSYASGLTDWSLGTIYGKLAIFIFGAWVGEASGGAIAGLVAGGVVVVVIGNSSELMHDFKSAYLTLTSPLSMFASQVIGTTLGCILNPLLFLGFQEMAGGADHLGEAGSLYAAPMAMAYRGIADLSVEGIKTLPRHSVMLCVPCFLVALCVDALAAVAAANGWRIKGYVPNIMAMAIPFFVGPTFAIDMCLGSLLVILWRRRNKQAANLLSVVVASGLICGDGLWALPSSLLAIFKVEPPMCMKFLSNYQTEQMRKHLILAAAARRRTS

SEQ ID NO: 223935 - protein, 697 aa, Zea Mays; identical to SEQ ID NO: 223934

SEQ ID NO: 223936 - protein, 280 aa, Zea Mays
MEDTIMAPSTWRKLKGTMLVKRAVEEFYIKSRLLLRDPEKALTLFGKQDESVLQGVTHVICCTGTTAFPSKRWDGENTPERVDWNGIRNLVSALPQTIKRLVLVSSIGVTKYNEIPWSIMNLFGVLKYKKMGEDFVRNSGIPFTIIMYSGDKLVGEVSRLVVAEACIQALDIESTEGQIYEINSMKVARRAYHSPLCSSQAVSLEVAATATGTGAKPSRFVVEYRYRFCCRLADTTQNKMQKDHFQRCRMERQLANLERFRIIYVLLRMVRYWLLPRKTS

SEQ ID NO: 223937 - protein, 256 aa, Zea Mays
MKLSSFFSEKQNEICHKGEQNNQNKDIEFQPSSAQEGSQYQSGDCESEASMDTLELSKDSLSSDEQKASAFEERESGDFTVDEGEYDYETACSESRNDTDGNLGVPQSPNAKSRCSNLFSTRSTGSHLSLSLEKSAAKPSGRPHSTLTDPNFVENYFKYSRLHFIGTWRNRYRKRFSNLLEAKGIKLSADHSGKKKTIIHIDMDCFFVSVVIRNMPELHDKPVAVCHSDNPKGTAEISSANYPARNYGAAILFSIN

SEQ ID NO: 223938 - protein, 234 aa, Zea Mays
MKHYTYSNLSDNSQRFVSAFFHLLSSLAETFVFIYMGFDIAMEEHSWSHVGFIFFSIIFIVVARAANVFSCAYLVNMSRPEHRRIPVKHQKALWFSGLRGAMAFALALQSVHELPEGHGKTIFTTTTAIVVLTVLLIGGSTGTMLESLDVVGDENTSRENYEDNNGYMPPSYEEGTSSGGGLRMKLKQFHKSTTSFTALDKNYLTPFFTSQTDDDNDDDFSQQPQNRRLAFYDQ

SEQ ID NO: 223939 - protein, 283 aa, Zea Mays
MALELSLASASPPAGGGLAQPPPLAPPGKEQQVAGVGILLQISMLVLSFVLGHVLRRHRFYYLPEASASLLIGLVVGGLANISNTETNTRTWFNFHEEFFFLFLLPPIIFQSGFSLSPKPFFANFGAIVTFAILGTFIASVVTGVLVYLGGLTFLMYKLPLVECLMFGALISATDPVTVLSIFQELGSDVNLYALVFGESVLNDAMAISLYRTMSSVRSHAAGGENFFMMILQFLETFVGSMSSGVGVGFISALYSNMLDWTLIICRTWSAAFLFSFLTFRTC

SEQ ID NO: 223940 - protein, 302 aa, Zea Mays
MLEKTLVDLLHEHNTPEYKGNNGWTPDAWNKIAKEFQERERYAGFSKVQIQEKEKELKRDYRMLKDARKQSGVSWDEKRCMIQVDPPIWDNIIKSFPRAKKFRNKSFPLFEALGELHDGNTAEGTYNFTSTQPNGPDLTQIGSGDVPINIEDREDVGDPLADHRQNEVEDKVYEVEGVDVNADRQDERSKRTFVVSRNEEEKGLKRPKKSSNIEVLMERYLNIRSKQAEDETTQLAREREARGGDDFSIKNCIAVLNTLEVTKEEKVKAYKVFKDPDNRQIFLSACNDDREAALMWLRDEMA

SEQ ID NO: 223941 - protein, 89 aa, Zea Mays
MKHIFKIAAILVAISAIWIALLETSTVPRSYTWLLPIYLVVALGCYGLFMVGFGLMFFPTCPREAVLLQQDIVEAKEFLGKRGVDVGSE

SEQ ID NO: 223942 - protein, 163 aa, Zea Mays
MWWVGNLLLSQQFGGQHTARLCVPEKISSLRLRQRRVDRRRREALNRLVDLKGIVRVFYRARPLVHTNSLHAQSPVTVEQERITVRAAGIKEFGADRVFGQESTQGLYACLSLFLTHLFQCVVHADDMFEEVKPILRSTLDGHNICILAYGQTGTGKTYTMEG

SEQ ID NO: 223943 - protein, 194 aa, Zea Mays
MGGMGGGRAARNRPMQGDDESYNLVLNFKEAMFGVEKEIEITRLEGCYTCDGSGAKPGTKATTCKTCGAQGQERRPSWDLYVFIDVLSDPILKRDGTNILYTCKVSYIDAILGTTVKIPTVDGTVDLKIPLGTQPGTALVMSKKGVPLLGKSNARGDQLVRVQVEIPKRLSSDEKKLIEELANLNKAQTTNSRR

SEQ ID NO: 223944 - protein, 258 aa, Zea Mays
MPRGNMENHLFRRGSYFQPLSWNLRMKVALGAAKGLAYLHSAEAKVIYRDFKTSNILLDTDYSAKLSDFGLAKDGPVGEKSHVSTRVMGTYGYAAPEYLSTGHLTAKSDIYSFGVVLLEMLSGRRAIDKNRPQGEHNLVEWARPYLTHKRKIFRILDTRLEGQYNLNGAQTIAALALECLSYEAKMRPTMDAVVAILEELQGSGEAEKKLQEPKAGTKQAPAAVSASMSSSRKPRRKSLGDTKETVGVPDPKPLAHSR

SEQ ID NO: 223945 - protein, 538 aa, Zea Mays
MMGCFTVLRSKKKKSHFDNPLVPSKKSVDARESTSSRLPEPEVHVPSLQSAPPSFRNRVKISESSNEVSNRNSRARVLSAPSALIVVDQFGFPYSEYRDQDDSRDKEGLTKGHRFSNPLPLPLPSREGHSFRNSGSFKASNVSGPLEMSGPLPLPLKKCDGLRIFSYEEISSACQRFSSDQCVSETLGSTSYKATFRDEFIDTRTTEATVARLLPSTQSLKEFKTQATTLASLQHPNLCKLIGYYAKEDSNERMLVYERLYHGSLDKLLFGRSDGRFMDWSKRLKVALGAARGLAFLHDEGPFQAMYSEFSTLNIQIDKGFTAKLSGYGCVGFNTEEISNAPVSAANLSVETLEKGLLTPKSNVWSFGVVLLELITGRKNLDPNYSKEERNIVNWSRPFLTDDSRLSLIMDSRIKGRFPTKAARIVADIILKCLRKDPSERPTMRDVVEALARVQEIKVPCRYPLQEPSAAPRKVMLKSTSLNGIVPHHPVITFSPSPPSHNQHLISPRSSTSALFHPRACSSTLDDPSAGGGRTIKI

SEQ ID NO: 223946 - protein, 555 aa, Zea Mays
MEGSSYASRSYSELAAAASGGGRTLRVIPLRHPLGSLSTSSTSPWWRAVVGRARGMGPLDWAEAALPCVAWTRNYRWKQDLQADLASGITVGVMLVPQFSWPPFVMGSIFLAILLIMKNTGKSNKRLHFLRVSGPLTAVVLGTIFVKIFHPPAISVVGEIPQGLPRFSIPQGFEHLMSLVPTAVLITGVAILESVGIAKALAAKNGYELDSNKELFGLGIANICGSFFSAYPATGSFSRSAVNHESGAKTGLSGIIMGIIIGGALLFMTPLFTDIPQCALAAIVISAVTGLVDYEEAIFLWAIDKKDFFLWAITFITTLVFGIEIGVLVGVAFSLAFVIHESANPHIAVLGRLPGTTVYRNTLQYPEAYTYNGIVVVRIDAPIYFANISYIKDRLREYELNLPSSNKGLDVGRVYFVILEMSPVTYIDSSAVQALKDLHQEYKARHIQIAIANPNRQVYLLLSRSGIIDLVGAGWCFVRVHDAVQVCLQHVQNSSSNALKLPVQASGVLTDSVSTPKPEQQHQKQHGLFKDLWKAQDSNADAGGEVQPLLRQNLV

SEQ ID NO: 223947 - protein, 181 aa, Zea Mays
MADSATSRPTVLVTGAGGRTGQIVYNKLKERSEQFVARGLVRTEESKQKIGAAGDVYVADIRDADRLAPAVQGVDALIILTSAAPKMKPGFDPSKGGRPEFYYEDGMYPEQVDWVGQKNQIDAAKAAGVKHIVLVGSMGGTNPNHPLNSMGNGNILVWKRKAEQYLADSGIPYTIISKEAF

SEQ ID NO: 223948 - protein, 66 aa, Zea Mays
MSGASTDDGTEMQEGSHSLPFLKSSILLMSMSNFCPSVVRVLVPDANCLVASQLPFIHILPNIAVI

SEQ ID NO: 223949 - protein, 843 aa, Zea Mays
MAGVEDEDEFKDASVAADPPPCSPKPASKSMTATGSGGGLGRRLFASIPLPATLSAAIGRFSGPNPLATNVGLGLLLDAGPAASSDGPLASDAASGGSSLHLPSLPALQRQHGDDQVAGRGAGEWEEELGLLPAEEGWDTAEDSREKEGLAVDGRSANRNCFPTRGQEEGAQRQRPGDELGAAVAQDQEVVVKQQGATEDCAAVVEDESNYSAVEQCAGDETRAVKASNAVEINKRVIEQECAGGILDEAKYGVSLGLQEENAMVEEQGVDVISVQNQRVAMEQCAGDQLTTTTGGSAVQEVVVEQEGDTECYTAVEAVEQCTNHGSRADKDGNVVKRKEKAVEQEVSVGVRDAAKDCVTVEPQEENVVVVEHGEDGISVQDQHKAVEQCTSGQLRTTMDDTAAEGQRVVEQGGAIFYLDATAYDIAVEDQEKEMKESDGDESRSTRDRNPAEVKDKEVNQEDVVDRHNVIKDGSGVELLENNIVAIEQGEDGISLSDEDNMVELYTSDQLRATLDDHAAANRKVVEQEGDIVERVVTTDGISIEDYEKEVEQSTGDESRETEAENAVEYNKKVDQEDTINRQGTAKEDSGVEPQEENVVDPDQGVDDFSVLDEGNVVAQCTSDQLRTTMEDNAAEMQEVVEQEGAIFEKGVTSDGITVEDQDKEMEQSAGDESRVTKGENAVKDKKVYQEDAIDKQGAAEDGSGVKSQEDNMVVPGQCTDGLPVLDEGNVVPQYTSDQLRTTTDNNAAVDPELVEQEGVDSIVGAAKVGIAVEESREDIMVEKQVEGVLLQDQDEAVEQCTSDQLRTITDGNDVEDQEVHREKGGAHMGHRATSIIHGSKQN

SEQ ID NO: 223950 - protein, 1256 aa, Zea Mays
MAGVEDEDEFKDASVAADPPPCSPKPASKSMTATGSGGGLGRRLFASIPLPATLSAAIGRFSGPNPLATNVGLGLLLDAGPAASSDGPLASDAASGGSSLHLPSLPALQRQHGDDQVAGRGAGEWEEELGLLPAEEGWDTAEDSREKEGLAVDGRSANRNCFPTRGQEEGAQRQRPGDELGAAVAQDQEVVVKQQGATEDCAAVVEDESNYSAVEQCAGDETRAVKASNAVEINKRVIEQECAGGILDEAKYGVSLGLQEENAMVEEQGVDVISVQNQRVAMEQCAGDQLTTTTGGSAVQEVVVEQEGDTECYTAVEAVEQCTNHGSRADKDGNVVKRKEKAVEQEVSVGVRDAAKDCVTVEPQEENVVVVEHGEDGISVQDQHKAVEQCTSGQLRTTMDDTAAEGQRVVEQGGAIFYLDATAYDIAVEDQEKEMKESDGDESRSTRDRNPAEVKDKEVNQEDVVDRHNVIKDGSGVELLENNIVAIEQGEDGISLSDEDNMVELYTSDQLRATLDDHAAANRKVVEQEGDIVERVVTTDGISIEDYEKEVEQSTGDESRETEAENAVEYNKKVDQEDTINRQGTAKEDSGVEPQEENVVDPDQGVDDFSVLDEGNVVAQCTSDQLRTTMEDNAAEMQEVVEQEGAIFEKGVTSDGITVEDQDKEMEQSAGDESRVTKGENAVKDKKVYQEDAIDKQGAAEDGSGVKSQEDNMVVPGQCTDGLPVLDEGNVVPQYTSDQLRTTTDNNAAVDPELVEQEGVDSIVGAAKVGIAVEESREDIMVEKQVEGVLLQDQDEAVEQCTSDQLRTITDGRCSYGSSCHFNHPRLKAKLEVSSFPSEQRNHEAEFLELNRVGLPIREGARKCIYYMRNGTCRYGKKCCFNHPEQVLDVQRHTATGWDDTNLQSSPHSKKSPEHKTMDDISSGSEVLPPNILRMLLPPQNVPPSTKEKEIRIKKDPDWASASDDSDGCCSADSSDGPLCKQEHEDYPERPECPFLLRFGNCKFASSCQYYHPKDKFPSTYHPEDKFQSRYHQKEKSSRHHPKKEPALSGELMVYPDRPSEPDCPFYVKTGSCKFGANCKFHHPKDITPNMQGPASPKRSVAAKEHHAAARATLQDQMYQQQKFPERPGQPDCRYYMQFGKCKFQSACIFNHSKDILSSGWHPAECPFYMKTRTCQFGSACEFYHPKDRCSGRGGVIDGTDYGHDFATKSRNVLQELAIYPERPDELECSHYMKHGYCKYKMNCKFHHPRDRLPKK

SEQ ID NO: 223951 - protein, 217 aa, Zea Mays
MVLNCWSLWQIFLCTFLVRTGNPQPSTLLAPTKVPSTVGQSMDLLLVLKFDRGIHDISCSLIPFVSCSLVHCYDIFAPFAGNDRPTMEWPTRLKIALGAAKGLAHLHEDCHPKIIHRDIKASNILLDFKFEYKVADFGLAKFTTDNNTHVSTRVMGTFGYLAPEYAASGKLTEKSDVFSFGVMLLELITGRRPIDTTQLALLAISTYVLPFACSKKK

SEQ ID NO: 223952 - protein, 604 aa, Zea Mays
MAHEREPLLQQRQTGVGNACGAKDSSSAPAPSAAALPSLARTVLKFLMWAVFLTWAAGIFLYPTKPVQAVFRKWVGLTRDSMFGIAGGIFLTFSAPILIIALLAYVYISFFPSEHVVEKRKLRSLSFRLWTFPVLVDGPFGVVSAVEFIGIVLFIVFVVYSMTYYAVEAVSLVSKFDIPSMTESELILDVIGLRLGAVGLFCMLFLFLPVARGSVLLRLIDIPFEHATRYHVWLGHLTMALFTLHGLFYVISWSMQGRLREELRQWKEIGVANLPGVISLAAGLLMWVTSLHPVRKRFFELFFYTHQLYVVFVVFLAFHVGDFIFSICAGAVFLFMLDRFLRFWQSRAKVDIISAACRPCGTVELVFSKPASLHYNALSFIFIQVRELSFLQWHPFSVSSSPMDGRYHMSVLIKVLGTWTEKLRSIITDVQEKNGGDSELQCGRMTACVEGPYGHESPYHLMYENLVLVAGGIGISPFLAILSDIIHRIEEGKQCMPKNVLVLWSVKKSKELSLLSAVDAQTISSSVSDRLQLDIQAFVTQEPHPPLEDGIVGDDQKVPGMFVKNGTAMSGLVGTGDNFWAAMYFLASTLGFLLAYALVQKEKE

SEQ ID NO: 223953 - protein, 536 aa, Zea Mays
MWVTSLHPVRKRFFELFFYTHQLYVVFVVFLAFHVGDFIFSICAGAVFLFMLDRFLRFWQSRAKVDIISAACRPCGTVELVFSKPASLHYNALSFIFIQVRELSFLQWHPFSVSSSPMDGRYHMSVLIKVLGTWTEKLRSIITDVQEKNGGDSELQCGRMTACVEGPYGHESPYHLMYENLVLVAGGIGISPFLAILSDIIHRIEEGKQCMPKNVLVLWSVKKSKELSLLSAVDAQTISSSVSDRLQLDIQAFVTQEPHPPLEDGIVGDDQKVPGMFVKNGTAMSGLVGTGDNFWAAMYFLASTLGFLLAYALVQVYYVKPHNVVAWWYLGLLFMLCMVAGVALPGGLVVLLWHLSEKQRLEDDKWDASQSPRAEQTGPLAAAGGGDDDAAPSVSLAALRTTRYGCRPNFEARPGELNDRPICLWTNFSGVRGVRGARRGRGGRGRAGVRTAGAADERSEGVQGAEPPPRRLGGGQEQERRGLPFQQPQLRPVNYVRLVWSVQRSSVHVAQHTRTDDSWMYMLIRHNLISCIYMYS

SEQ ID NO: 223954 - protein, 302 aa, Zea Mays
MALRTFPPRVLLLSVVLLAAPAAGAGTGSEFDDGTSPKFPGCDNTLQKVKVTYWVDGDERSSLTGISARFGAVLPDAAPDDEKQRAAVPSPESGCAKSSTPLAGSVAVAVRGECTFIEKAKAAEAGGAVALLLVNDEDDLQRMVCSDKDSPPNIGIPVVMVSKSAGDKVQSAIGDGSKVDILMYAPLKPSFDGAIPFLWMMAVGTVACASVWTVVVVGEEPTKQGDVSLGGEENPDAEVVELQANTALVFIVTSSLVLLFLFFFNSNWSAWLLVCLFCLGSLQGMEFVVSSLVVRCVHLRTA

SEQ ID NO: 223955 - protein, 150 aa, Zea Mays
MAAALFSSSLSPRFLALSSPKPAAPAATAFLPFRLPPRAVSAPGRRVFEPVAVAVSSEYKTEGAEQEGEDGSEEFSEDLKLFVGNLPFSVDSAQLAGLFEQAGSVEMVEVVYDRMTGRSRGFGFVTMSSAEEAEAAVEQFNGYVRILSLF

SEQ ID NO: 223956 - protein, 137 aa, Zea Mays
MDDCYSSNDKQRHLTPFRRHGWESKLSSRWVPKVKVRSVSFADPIVTAVWPQEDKCGQAEDIGDRSGSMGAVILEPVRSPATTTCKLARHFSRPLTKEQMEAIMELATLGKEKEGIKKKGSKVTPLKAPIIEASEML

SEQ ID NO: 223957 - protein, 73 aa, Zea Mays
MPLVASRPFQPKRWAALPSSVLTTHSSPSSSASDLRFDLPLRRGDVPVCYRRIITFSASPLGPGLEEGSQSAL

SEQ ID NO: 223958 - protein, 338 aa, Zea Mays
MLGVDRLDMIKGIPQKILAFEKFLEENPDWNNKVVLLQIAVPTRTDVPEYQKLTSQVHEIVGRINGRFGTLTAVPIHHLDRSLDFHALCALYAVTDVALVTSLRDGMNLVSYEYVACQGSKKGVLILSEFAGAAQSLGAGAILVNPWNITEVADSIRHALTMPSDEREKRHRHNYAHVTTHTAQDWAETFVFELNDTVAEALLRTRQVPPGLPSQMAIQQYLRSKNRLLILGFNSTLTEPVESSGRRGGDQIKEMELKLHPDLKGPLRALCEDERTTVIVLSGSDRSVLDENFGEFKMWLAAEHGMFLRPTYGEWMTTMPEHLNMDWVDSVKVCLFHE

SEQ ID NO: 223959 - protein, 809 aa, Zea Mays
MCLCPHVFFIPIFSVFFIIDQDQNVTGQQGAHAVRRSPRVENKRKQLDKNELKERKKRLRLKVPPIQDAESDDEKDTEFVPGGDGSGDDNVGIVGGDENKGITKTRAIRCSPGKFIKLVNSLSDELKSQVVAKGFGGLLRFKPHLLSRKLLSWLMRKLNPETMKLEIGGGKEIQITEHSVWCVLQLPNVGSDPPPMSDADARSLRDELGEQICGKSYRRISGINISVITDRLQKRTLNGELGLRAFFMAAFQCLLFSNTDTRIRIDDVKYTQDIQNMGNKNWCKAVVDRLSIAARLYRKDFAEKGINAPISGCGIFVAMLYVDNLQHGLDTSPFSIPRCAFLDSKMIDAIANMDLRGDVPPGTTEFGHLRPHPAPGAAADAPLSRWLRRLEAFLSAAGLAASTPLGVAAAASALAVVGLALPAAAVALSPCRGGAAACGDFEVEVFEVCVLLSQAAAAAVALACVSRKVAVHGLRRFLFVDPDLGMRIRFQKEYVARIQDFFRTLTWWIVPCLAVKVTREVSRFAHILQQGSSSAWTWRACAVLFASVASWTYLTTIILSSCMLFNLVCSLQVIHFDDYGKLLEQDADPLVYLKEHLQLRHNLSKISHRFRVFLLLLFLSVTAGQFAILFKTTAYSGPINFTNGGDIAVSSVVQVVGLVLCLHAAAKISHRAQNIAALASRWHALATCSTDSTYVTTPNSSGNLAPFPAHLFLRDYSGSDLESLDSASVQGSSHGTAQLASYMSSYHKRESLVLYLLANPGGITIFGWIVDRAFLNTILMLELTLVLFVLSKTVVIPAKTLVHSYIGYP

SEQ ID NO: 223960 - protein, 253 aa, Zea Mays
MAIGVPSMELHRSSPLLSGGRGGNTCLQKKPFFVQAKRLVGMEKASTRPGTQESGQTKKRAPLVRGTVSPPLPVPGNIPRPPYVGTEYVPEIAKEIQMHDKEGIVHMRAACELAARVLDYAGTLVKPSVTTDEIDKAVHKMIIDAGAYPSPLGYGGFPKSVCTSVNECMCHGIPDSRELQDGDIINIDVTVYLNGYHGDTSKTFLCGEVDEASKRLVKVTEECLLRGISTCKHGTSFKKIGRRIREQQTGPDD

SEQ ID NO: 223961 - protein, 223 aa, Zea Mays
MASEAAIARAQCLLRFRRWSPLPLLPLPSPPATTRAASCRRSVRMASSLFKQWLRNLQSEKGVLTYGRLSLTRVLIQGVDMFGKRVGFLKFKADIVDEETKTKVPGIVFARGPAVAVLILLESNGETYAVLTEQVRVPIGKFLLELPAGMLDDEKGDFVGTAVREVEEETGIKLNIEDMVDLTALLDPATGGRMLPSPVTGQNFYSPGWLRRRDWPVPVQGPR

SEQ ID NO: 223962 - protein, 51 aa, Zea Mays
MHQNHQNQHLLFQTVPQYVRRHQFSLGNQGLELQYDSSDFRNQRTLLFQWK

SEQ ID NO: 223963 - protein, 352 aa, Zea Mays
MGVGGSFWDLLKPYARHEGAGYLRGRRVAVDLSFWVVSHSTAILARLPRARRPHLRTTFFRTLSLFAKMGVFPVFVVDGEPSPLKSQARAARFFRGSGMDLAAFPSTEAESSVTAAPVKRRNAAFTRCVEECVELLEYLGMPVLRAKGEAEALCAQLNNEGHVGACITADSDAFLFGAKTVVKVLRSNCKEPFECYHIADIESGLGLKRKQLVAMALLIGSDHDLHGVPGFGLETALRFVQLFDEDEILDKLHEIGKGVYPFLKGFDNPHIDDLPSSSKKSPIKSPHCSHCGHPGSKKNHIKDGCNYCLVDSLENCVERPAGFKCECPSCDEKRVFPCLVGVSLMLKLWLTY

SEQ ID NO: 223964 - protein, 209 aa, Zea Mays
MAASSLLRSFTRRSCAGPSAFAYRHHQRQQPWSPFSTSAAAVTQDEAAKRFPGLGPTAKGEKARVVVLGTGWAGSRLMKDLDTQGYDVVCVAPRNHMVFTPLLASTCVGTLEFRSVAEPVARIQPAVSKSPGSYFLLARCTGVDPDGHTLQMVRKIPWSHGNSRLLMTSWFLPVELRHQLLGYMVLPTMQSFFAKFIMLKRFGDGSSLI

SEQ ID NO: 223965 - protein, 304 aa, Zea Mays
MAASSLLRSFTRRSCAGPSAFAYRHHQRQQPWSPFSTSAAAVTQDEAAKRFPGLGPTAKGEKARVVVLGTGWAGSRLMKDLDTQGYDVVCVAPRNHMVFTPLLASTCVGTLEFRSVAEPVARIQPAVSKSPGSYFLLARCTGVDPDGHTIDCETVTDGEKDSLEPWKFKVAYDKLVFACGAEASTFGIHGVTDHAIFLREVHHAQEIRRRLLLNLMLSDLPGISEEEKCRLLHCVVVGGGPTGVEFSGELSDFIIRDVKQRYSHVKDYIHVTLIEANEILSSFDVRLRQYATKQLIKVNRFFSA

SEQ ID NO: 223966 - protein, 171 aa, Zea Mays
MQLQILENIFDQGNGTPSKQRIKEITAELSHHGQISETNVYNWFQNRRARSKRKQAASLPNNAESEAEVDEESLTDKKPKSDRSLQDNKAMGAHNADRISGMHHLDTDHDQIGGMMYGCNDNGLRSSGSSGQMSFYGNIMPNPRIDHFPGKVESSRSFSHLQHGEGFDMFG

SEQ ID NO: 223967 - protein, 910 aa, Zea Mays
MGVVARARSSQCARAWRRPCLSRRRVRSSALPRPAVREGAGVTASRSSAISLCPARGPAVKLLGRWDLETWAPTVSVHMYDFLSGMAGAFGRRERGRGACGCRGAQWPRLNIRCNPQDVLVCIQIMNERQRQAVVRKGFFNILDMTIDALGSRTHLCWLMEKLDPKDMTLRIGPGKELKITKETVHLILGLPNTGGGKPLNIDEVNAAVNLRSSLGISKDEFGVAKLQERLRLGGDDDLSIRCFFLILFNRLLFPTASWSISNNEVLLTEQLDRFPHIDWCHLIFNDLCEAAHKWHNRSTTNVSATIYGCSIVVLVYYLDHLHHAVAPNNKSDTPRIKYFDKKTIKALSMADKRKPRQGGEPFGHCDFRSSSETCYAPTPEFHGQFEFQFSSDAFDVAQNAPCGHHTISIQVPLIKDMISSKIQQLPAYHHPKFEAKLRAYDSEVGKSFATINQRLSKIVKKQYDLADTFGELIDEVLRAEINSPDNKDDMIEPSNPSASGQSSSYYICILYPSINYTNTSSAGLTCSSLKIVSIHTLDPLMTATQLESQMIVTQVEAIYKRQQEMCRAFESSRDESVTPQNIRGDTTEDDALQLDSGLVLDQILSGNETYMMHKTRHDSVPLTQMDCVRALRQFLCAKVMDLNRNVIDFGEYVGTCRDIQRSFADGECLDNVFMQCFIDCVRDDATNHIPPLTAHQLILDAIVGAILNFEEQEQHSNTHRPYDPAILENYLSKTLPSFKQLDEYKSIMVPMLRAGHWTLYVINFQNRCIHILDSNPYGPELGETTWESYHYVQMDIGKRKLPWARLIMVRLNMALQHVRPRSNLPRFDNFPIDMAPNCPTMKAGSNDCGFFAMRYIQYYDYMDGAINVVIDSDNSGDLRALALYYLIFHRLNKNRSLSPELERFKFPHY

SEQ ID NO: 223968 - protein, 510 aa, Zea Mays
MGVVARARSSQCARAWRRPCLSRRRVRSSALPRPAVREGAGVTASRSSAISLCPARGPAVKLLGRWDLETWAPTVSVHMYDFLSGMAGAFGRRERGRGACGCRGAQWPRLNIRCNPQDVLVCIQIMNERQRQAVVRKGFFNILDMTIDALGSRTHLCWLMEKLDPKDMTLRIGPGKELKITKETVHLILGLPNTGGGKPLNIDEVNAAVNLRSSLGISKDEFGVAKLQERLRLGGDDDLSIRCFFLILFNRLLFPTASWSISNNEVLLTEQLDRFPHIDWCHLIFNDLCEAAHKWHNRSTTNVSATIYGCSIVVLVYYLDHLHHAVAPNNKSDTPRIKYFDKKTIKALSMADKRKPRQGGEPFGHCDFRSSSETCYAPTPEFHGQFEFQFSSDAFDVAQNAPCGHHTISIQVPLIKDMISSKIQQLPAYHHPKFEAKLRAYDSEVGKSFATINQRLSKIVKKQYDLADTFGELIDEVLRAEINSPDNKDDMIEPSNPSASVFYRALHTVY

SEQ ID NO: 223969 - protein, 299 aa, Zea Mays
MMHKTRHDSVPLTQMDCVRALRQFLCAKVMDLNRNVIDFGEYVGTCRDIQRSFADGECLDNVFMQCFIDCVRDDATNHIPPLTAHQLILDAIVGAILNFEEQEQHSNTHRPYDPAILENYLSKTLPSFKQLDEYKSIMVPMLRAGHWTLYVINFQNRCIHILDSNPYGPELGETTWESYHYVQMDIGKRKLPWARLIMVRLNMALQHVRPRSNLPRFDNFPIDMAPNCPTMKAGSNDCGFFAMRYIQYYDYMDGAINVVIDSDNSGDLRALALYYLIFHRLNKNRSLSPELERFKFPHY

SEQ ID NO: 223970 - protein, 354 aa, Zea Mays
MAFEIDNNLIDVHSSGSGTSLDDLSRFRAQVPPIAVPRRNPFDLPYDSEEAAIPGSAPSILHARKNPFDLPLEQSNDSVVVHAHDILNSGEPATSRRDMIFRRHESFNFGRMDVIQEKRFSRLKPYFVPETVEWNASNFERQFNDKSESKMSSVTKSDIASSVADQEDHKDQDEKDLADVGSECSDGINSIDVELDHSDIDDREIALQQFVFERAQEREAHWLPKGKGREEDYAPESAGSSTMPFHAVPDLLSWEDGDGDNSLGAKPSFQLNTEVKCSEWVSSSRPPVEGESDSGDLPEYLDTEVASSSNTAILGANNAAEKGTYTLSQRRELLRTSTCKKIMKQQFLLIQLLP

SEQ ID NO: 223971 - protein, 242 aa, Zea Mays
MFAGFATHFSPRLPQHGPYGKEREGGSGIDRGKPSLCFRDNSGDAMAMAALRREGRRLLLAPTVPNPSSAAASAAVTRSSAMSQPEMAPIGARSISTQVVRNRMKSIKNIQKITKAMKMVAASKLRAVQTRTENSRGLWQPFTALLGDTPSVDVKKNVIVAITSDKGLCGGINSTSVKVSRALHKLTSGPEKESKYVILGEKGKVQLLRDSKNSIEMTASELQKNPINYTQAQMKLSAVTIM

SEQ ID NO: 223972 - protein, 203 aa, Zea Mays
MTGSMLLIREFCDRFVPAEKATRTRVFFPEANEVSFARQSAFEGCSLKLDYLTKPSLFEDFGFTTKVKMADRVKPQDETFLVAYPYFNVNEMLVVEELYKEAVVGTSRKLIIFNGELDRIRSGYYPAFFYPKLAELSKTFLPKLDTVYYIHNFKGAKGGTLFRCYPEPWKVLRKASSGNYVCLHQQEEMPSLKEVALDILPSV

SEQ ID NO: 223973 - protein, 324 aa, Zea Mays
MGGMAGALPKTTGAPMGSGGYGVGGRPMKPVGMAATAAAQPMGQQRDPFGSIDPFAAKPGSMNAVKQANSVKPDQGFGAFQGVNSSVAAGFGSFQSTDAGSGGFQSAGTTTPSNFTPPPAPASMPTPVSAAVNSSMDPLDNLFASTTSAPTAAAASNGDSGGDMFGEMDGWVDVEAEFAGGDSGGTTTELDGLPPPPSGLTISAAKAKGMDSYKGGQYADAIKWLSWAVVLIEKSGKDADIVEVLSSRASSYKEVGEYKKAITDCSKVLDQDKDNVSVLVQRALLYESTEKYRLGAEDLRLVLKIDPTNRLARSTIHRLNKLAD

SEQ ID NO: 223974 - protein, 614 aa, Zea Mays
MPALYAYGDDGCLVSAPAELAGLFCRGAVQQRKRTLVAASAVAAAAAECVRAAKKQRQLPSLDALPDECLFEILRRVPGRRGAAACVSRRWLALLGSIRVSEFGQAAAAADTPSLPDLNEEFVMEEDKEEVPADRCVDRVLEGKEATDVRLAAMAVVAGSCGGLEKLSVRGSHPARGVTDQGLSAVARGSPNLSSLALWDVPLITDAGLVEIAAGCPLLERLDISRCPLITDKGLAAFAQGCPDLVSLTIEACSSVGDEGLRAIGRSCMKLQAVNIKNCPLVGDQGISSLVCSATASLAKIRLQGLNITDASLAVIGYYGKAITDLSLTRLATVGERGFWVMANAAGLQNLRCMSVTSCPGVTDLALASIAKFCPSLKKLYLRKCGHVSDAGLKAFTESAKVFENLQLEECNRVTLVGILAFLNCSQKFRALSLVKCMGIKDICSVPQLPFCRSLRFLTIKDCPGFTNASLAVSSESGLIKVDLSGCKNITDVAVSSLVKRHGKSLKKVSLEGCSKITDASLFTMSESCTELAELDLSNCMVSDYGVAMLASARHLKLRVLSLSGCSKVTQKSVPFLGNLGQSLEGLNLQFCNMIGNHNIASLEKKLWWCDILA

SEQ ID NO: 223975 - protein, 417 aa, Zea Mays
MRLKARTASHLPYNRNGLKFFTSDGGLNKADIKDILERASKIYEESAHNNLKEQGEASKGVVTNVDYMSIYASDLVQAVRKSAGDKEKPLEELHIVVDAGNGAGGFFVDKVLKPLGAVTTGSQFLEPDGLFPNHIPNPEDKTAMKFITQAVLDNKADLGIIFDTDVDRSAAVDSRGRELNRNRLIALMAAIVLEEHPGTTVVTDSVTSDGLTVFIENKLGGKHHRFKRGYKNVIDEAIRLNSIGEESHLAMETSGHGALKENHWLDDGAYLMVKLLNKLAAARTLGSSIGSKVLTDLVEGLEEADVTVEIRLKIDQNHADLKGGSFRDYGESVLRHLENAISKDPNLRKAPVNHEGVRVSGYGGWFLLRLSLHDPVLPLNIEAQSNDDAIKLGLAVLAAVNEFPALDVTALNKFVHQ

SEQ ID NO: 223976 - protein, 388 aa, Zea Mays
MQMAAAVAPTDAPASASAAAAPSRPHAHAAAAVAAASPHPHALHPHHHMPQPRWVVIPYPPPHHPMVAAPPPPSLQFVKHFTPPSSVTPPPPTGSGGNGGEDNRTIWVGDLQYWMDENYLHSCFGSSGEVVNIKVIRNRHSGVSEGYGFIEFYTHVSAEKALQNFSGHVMPNTDRAFKLNWASYSMGEKRSEISSDHSIFVGDLAVDVTDAMLLELFSNKYRSVKGAKVIIDANTGRSRGYGFVRFGDDNDKIHAMTEMNGVYCSTRPIRVGPATPRRSQGDSGTSPPRQSHVDSTNRTVYVGGLDPNVSEDELRKAFAKYGDLASVKIPFGKQCGFVQFVNRVDAEEALHGLNGSTIGKQAVRLSWGRSPASKQRLITPLCSRKGMR

SEQ ID NO: 223977 - protein, 1210 aa, Zea Mays
MMTQTLQGKVMAYTPSSFPVQQQILPEDLEMLQLDNMDQGTSPVRAVIIKRIETCLRNREEFCNLCPDSLLKASEIIDNLLYKIDPQPQYMDLDTIEARVNDLLRSFLYGNQRDPWISSAVPSTKDLRQLPGIQMTDSSVYHNRVVPGFTNLPARPGGIPSHAVFTAQRYVPLNHNMTAASFALVERPESFMSTVVAPSVSGLPNCISGPGGIDSSGLQNGYSKDHFPGDAYHVDSPQLSMSGSPSPLSALCDPITSSGAMIRSSMDFIPKASGQKLFTGKGQMFQQYREYEKELDGAWSHPTEKPVHSNRTTQSDEIYLKGECGPDTLTEMKENYGRISDSRDPCDPEREIVERSEQTSNITVSKATSPISDESSGRRPAKRLKADAPRLVNVNQVESPQEQKPVVNENHVSGGETVQSEITELPAKPPCSSLGDINAESNNMLEQGSEDVPNMDIVKEEELSRAKGDIEMKDAKTVALDHTPKGVNLSSRRKRGASILYGLTAEELRDHMSSLINRHTCQSKVTSQEFPSIDGLPDQNTCSLCGMEKLLFEPPPRFCALCFKIINSAGCYYVEVENGTEKSSICSKCHHLSSLRAKYQKKFNYAETDAEAEWWVQCDKCKAWQHEICALFNRKCEGAKAEYTCAKCFLKEKDSGDIQALESSTVLGAQELQRTKLSDHIEQRLSERLEQDRQQRASASGKVAEEVPGVKGLTVRVVSSAERLLQVQPRFRGFFKQGKYPGEFPYKSKAILLFQKIEGVDVCLFAMYVQEYGSDCPPPNQRHVYLAYIDSVKYFRPEIKSATGEALRTFVYHEILIGYLDYCKKRGFVSCSIWACPSTKRDDYVLYCHPTVQKMPKSDKLRSWYQNLIKKAIKEGVVVERNTLSDFFLQPTNECKANISAACLPYCENDFWPGEAERLLEKKDDNASQKEETQLGERMRTMKEDFIMLCLQQFCKHCHHPILSGKSWVCTSCKNFHLCDKCHAEEQNTAQKDRHPATTKQKHAFERMEVQPLPETDDGDPTMESKYFDSRIDFLKHCQDNQFQFDTIRRAKHSTMMILYYLHNSTCSACHRAVDQCLVWRCLECLGCTFCGQCYKQNGQGLHIHELRQIDTRETSQKHTLQDYIDGLVHASRCYDPRNCTHPLCLTLKKLFAHGARCHVRACNSGGCKKCLFMWKLLFRHSKDCNDGDCAVPRCRDVKAFIAEKMKLKI

SEQ ID NO: 223978 - protein, 155 aa, Zea Mays
MTKRQASPSPPPPVHLLVLLRSRTQLAYPPRHYKNPPPPHRASTVPHTRARAGKHQKGKAEAARRAPAAAKSPLVVVVASSPPPACLLYFAIFASVSWIGDASVSGSREGIGHDDGAGEDGAEADRERDEPAGDLLEAPQRAAQEGLRALRALRC

SEQ ID NO: 223979 - protein, 286 aa, Zea Mays
MQEILDQQVAEEAAEAEGAGAMATITNQRRTAKKGAGATVTPRKGTQEKSKVQGKGYKDKCYESIRMAVEARFNKLLTELVFVEDLMEALEEAKAIGDELGDIYDYVAPCFPPRYEIFQLMVNLYTERFIQMLRLLSDRANDIQNINILKVTGWVVQYQENLIGLGVDESLAQVCSESGALDPLMNMYVERMQATTKKWYSNILEADKTQPPKSTEDGKLYTPAAVDLFRILTEQVQIVRDNSTDVMLYRIALAVIQVMLDFQAAERQRLEEPASDVGLESLCALS

SEQ ID NO: 223980 - protein, 1149 aa, Zea Mays
MQKQIHSAGKRGFFSKKSVGPQTREKFTLEDMLCFQKDSIPTSLLKISNDLVSRSIKLFHVILKYMGIDSPAIISLEERIEFVEKLYKHTLKRSELRDELFAQISKQTRNNPDRGWSIRAWELMYLCASSMPPSKDIGAYLSEYIHFVAHGATTDADVRVLALNTLNALKRSVKAGPRITIPAWEEIEALLTSRKLTTIVFFLDETFEEITYDMATTVADAVEELAGIIKLSVYSSFSLFECRKVVNGSKSSEIGNEEYIGLDDNKYIGDLLSEFKSAKDRNKGEILHCKLVFKKRLFRESDEAVTDPMFVQLSYVQLQHDYILGNYPVGRDDASQLSALQILVEIGFIDNPESCVEWISLLERFLPRQVAITRAKRDWELDIISRFQLMEHLSKDDARQQFLRILRTLPYGNSVFFSVRKIDDPIGLLPGKIILGINKRGVHFFRPVPKEYLHSAELRDIMQFGSSNTAVFFKMRVAGVLHIFQFETKQGEEICVALQTHINDVMLRRYSKARSGNSVTSQNDVNQAYKPPNIEMFEKRVQELTKTAEDSQKKADQLREDLQLKTKQETEMQEELEGLRDTLQSERQSSKDIKNELDKLKSLCDEKESALQAALMEKSRLETRLTSGQGRERDTLTTVGSINNDIEDACKLEEELKSYQKELDASKEVSKKLMLEKNILDQKVQRLERMKNEEKSAMEKVYADECCKLKSQIAELEQKLEVATRSLNVAESNLAVRNAEVDSLQNSLKELDELREFKADVDRKNQQTVEILKRQGAQLVELENLYKQEQVLRKRYYNTIEDMKGKIRVFCRLRPLSDKELSFEEKNIVCSPDEFTISHPWKDEKSKQHIYDRVFDANTSQEEVFEDTKYLVQSAVDGYNVCIFAYGQTGSGKTFTIYGSENNPGLTPRATSELFRVIKRDGNKYSFSLKAYMVELYQDNLVDLLLPRNAKQLKLEIKKDSKGVVTVENVTVVSISSIEELRAIISRGSERRHTAGTNMNDESSRSHLILSIIIESTNLQTQSYARGKLSFVDLAGSERVKKSGSAGKQLKEAQSINKSLSALADVIGALSSDGQHIPYRNHKLTMLMSDSLGGNAKTLMFVNVSPAESNLEETYNSLMYVLLCSLSLMFPRLLDLLFVTVSIYVVLIY

SEQ ID NO: 223981 - protein, 60 aa, Zea Mays
MGYQGSPDHIWMKERKKTMYKRYIEDQREKKKRGRKRKKRRRKLCMMLLFRFIHGQLFRD

SEQ ID NO: 223982 - protein, 100 aa, Zea Mays
MPRIPLIRFPKRNLKAPSPSAPAASQPADQHATLMFRLGAKAEAPSSGEIKNYRFRSDVPCPPSHTAVGGPASLLPKRKPLTEEEIEAIMGLIERSTNRQ

SEQ ID NO: 223983 - protein, 178 aa, Zea Mays
MHVPSVSYFPAQPVFFRGLVRGGNSIRFALLTVSFFSDRACNMHHPYHTLPSAAVGDGRLPRRDGRHDEPGHANVHPSTCRRASRSCSSCSWTCSRTTWTAPGSSAGFRRAAVPRVLAAPRCHRRRRHCGRRLLQEVRVRKHRRRLTALGGGVRRRSGRGPVGLAWNRIWASLDSVSW

SEQ ID NO: 223984 - protein, 263 aa, Zea Mays
MALAASSPLHAVPPAPALHTPPEKRGGTPSTGCTAGRHSVAHPSRWSGPPPSQHDSTSGDQVLGSQRPAVPAVQHDSDSTSGPRLRAFCCAGSSVLLSTAPRVQEDVYSKFWYSKFTALLGGKILFGGSAIESEGNFVQPTIVEITRSAPVVKEELFGPVLYVMKFQTLKEAIEINNSVPQGLSSFIFTKWPDIIFKWLGPHGSDCGIVNVNIPTNGAEIGGAFGGEKAAGGGREAGSDSWKQYMRRATWREVLEVVSHLFTP

SEQ ID NO: 223985 - protein, 406 aa, Zea Mays
MVWSRVKTHGHHPSPRAGCCGALCGTKWYIAGGGSKKKRHPETWVFDVLESRWSVCVVPPSSSITTKKGFSMVPLYYRDKIVLVAFGGNKKEPSDKVEVLVVLQNEHCFSWRSAPEVEPLLYDESPPGSRELADHLSSCAPPYPTSSAARSGLAATAENSCGRKPLPDSLLRTSNLGGSSLRRQFRQEEECSSLAQKLQKPIDDDRYKDAADECSEHQPPSATNPKPRNDARRSSPEVVVDAKARRLLGRSSSDMNNHQDARVAALVRRNVALEEQLSAALASKDEAEKNLSLVIDSKDGLEKRLAEKDREVEALREKATGLELAQEEANSLSNTVHADNVRLEREVAFLKAVMDETQKELHSTRGVLAGERARAFQLQVEVFHLKQRLQTMEGRSPAAPRKPQNA

SEQ ID NO: 223986 - protein, 595 aa, Zea Mays
MVGSKMVVFGGDSGQSLLDDTKILSLDKLTWDSVAPKVRPPLNGRSLKLRPCRGHCLVSWGKNVILVGGKSDQPYDKISVWTFNTESELWSHMEAKGDIPVSRSGHTVIRAGPVLILFGGEDAKGKKLHDLHMFDLKSLTWLPLNYKGAGPSPRSNHVAALYDDRVLLIFGGQSKSKTLNDIHALDFETMVWSRVKTHGHHPSPRAGCCGALCGTKWYIAGGGSKKKRHPETWVFDVLESRWSVCVVPPSSSITTKKGFSMVPLYYRDKIVLVAFGGNKKEPSDKVEVLVVLQNEHCFSWRSAPEVEPLLYDESPPGSRELADHLSSCAPPYPTSSAARSGLAATAENSCGRKPLPDSLLRTSNLGGSSLRRQFRQEEECSSLAQKLQKPIDDDRYKDAADECSEHQPPSATNPKPRNDARRSSPEVVVDAKARRLLGRSSSDMNNHQDARVAALVRRNVALEEQLSAALASKDEAEKNLSLVIDSKDGLEKRLAEKDREVEALREKATGLELAQEEANSLSNTVHADNVRLEREVAFLKAVMDETQKELHSTRGVLAGERARAFQLQVEVFHLKQRLQTMEGRSPAAPRKPQNA

SEQ ID NO: 223987 - protein, 466 aa, Zea Mays
MWRLKIGEGGPWLKSGNGHIGRETWEFDEDFGSEADREAVDSAREEFSKNRLRMRHSSDLLARMQIAKENGFSLDLHKTRDDDGRSPLLVATTGSSTVSETLRKALDYFAAIQAHDGHWPGDFPGPLFTTATMITVLYVTGSLDSTLSSEHRREICRYLHNRQNADGGWGLHAEGESSMLSTALNYTALRLLGEGGDGGGGPGMSSSSMLIRARKWIRDRGGATMIPILGKVWLSVLGVFEWSGVNPIPPELFLFPSWVPIQPGRLWSHFRMAFIPMSYLYGKKFVGPITRLVVSLREELHVHPYEKIDWKAARNSCAKEDVYSPHTWLQECLSHCLYSFGEPFLTRWPISYMRKKALQQVAEFLKYEDENSQYICIGAAQKALSMLCCWIEKSNSDAFKRHLARVADFLWIGEDGMKVRVCAGQLWDVAFAVQAILACNIAEEYRGTLKKAHDFIKASQKVPPHI

SEQ ID NO: 223988 - protein, 402 aa, Zea Mays
MSALGTLSGGAAGVSGLIRLRRRVAPALAAPSHHAAGTLNCAALPDAAPLVWGRQLRPSLLLPATLLPSSSQGARRHTPRRPAAAAGEAKSVGFLEKYPALVTGFFFFMWYFLNVIFNILNKKIYNYFPYPYFVSLIHLVVGVVYCLISWSVGLPKRAPINGTLLKLLFPVALCHGIGHITSNVSFAAVAVSFAHTIKALEPFFSAAATQFILGQQVPFSLWLSLAPVVIGVSMASLTELSFNWTGFINAMISNISFTYRSIYSKKAMTDMDSTNVYAYISIIALIVCIPPAVIFEGPRLMQHGFSDAIAKVGLTKFVSDLFLVGLFYHLYNQIATNTLERVAPLTHAVGNVLKRVFVIGFSIVVFGNKISTQTGIGTSIAIAGVAMYSYIKAKIEEEKRSA

SEQ ID NO: 223989 - protein, 356 aa, Zea Mays
MELFPAHPDLQLHISPPPATKPTELGFWKRALDTTPTATTTAAAATTAPSLAFASSAPTAVGHHAAAGAHHNDHHHQVPTTSSHSHLVGLPFLHHTQPILLPEGRGGGLRRDLAAARPIRGIPVYNASQPLLHFLQSHTHCHDAIVGAAGPRLSPKAALRLAAKRGARAPRMRWTTSLHARFVHAVELLGGHERATPKSVLELMDVKDLTLAHVKSHLQMYRTIKTTDHKPANSASSYGMYGTGKQQPRNRSSTSPTPTTTACSTSSPPAPGLISRRRRLSTLTLTAAAATSMAPACALCGAAPRQASAGGAGSMTDQETMMPPLPVPATTSNPSRTCNHTAFLTMSPTSTRRRSR

SEQ ID NO: 223990 - protein, 461 aa, Zea Mays
MASEGAPTPAAERIRVVGKWAGALEVDLGSWTVSMLRAEVARRVGDGVEPECVGLIFGGRVLKDDPPASLREAGLKANAKVLSSLTSPDRAKEIDAQAAKAKAEEEHAAKLVRLWEAAKALSQRHTDGSYLAEEDYNLDLEDQSGQKVMFGSVDDKNYVRLELLEGVVAYHNGHVEKARESLTSAHAKYLQLQVPDEAISMLMDMGYEARSAKRALKMTGYDIQSSVELLCEEREKKLRRREEDRVRQREILKQMAYGKTPMNKAVDMQKLKGLTAIGFEKYLAAEALRINENDADKALDLLTNPEQNCILQSKIQARRSRASCGFGAGSSRSRAAVARAAPAINNSQTLDNAPPHPADGDAPPHAADGGAPPHAADGDAPPMNNEEIANQDEIMIGEVAVDDEDEDANSHPVPARDASMESELANELKGDALDDYDIDVSNEGQAIAEYLSLLEAAPSSS

SEQ ID NO: 223991 - protein, 850 aa, Zea Mays
MTAVELRIGPLEWAMDDESPGVGDEDGKDEDWALDMERKGRGKRKRSAPRRRSGPKRRRAAAAMAPAPARSQSEPCPGTAEPSPEHGFNAAAAAAGVKEENGVRKEEGENVAPSTSGRGGGGGRKPGARRSCHQCKRVKRLKEMVRCQCCDERIYCDLCIRNRYAMMSPDAVREQCPFCRGLCNCTRCLNKDRDKQLGPENLVLRKCNSNESSKREKRPTSAGVISPQAHSAAPCTKEIGLSFVTTNRMNNVSAMWAKVDTSDVRAEEVDPETKRKYASYLLHYLLPCLTQLNKDQMEEREAEAKIRGLQLSELIVEKAVSWNDERVFCNNCKTSIFDLHRSCSNCSYELCISCCKELRGNFLKINCQKGLVPEHKSRGIDYMHGGDCKPPNLENDRETDRLIKLEMEALRLSNQIEPSDISSIDICECSCSANNVSSRKAATRENSTDNNIYCPISDNGGPDDLKHFQKHWVKGEPVIVQGVLSEMSDLRWEPEKMWAEVHDANTSSEMKSVKTTDCMSCCEVEISAKDFFNGYYHGRMYHNLWPEMLKLKDWPTSDHFENILPSHGKTYINSLPFQPYTNLKSGLLNVSALLPGDVLKLDMGPKSYIAYGYAEELIRGDSVTKLHCDLSDAVNVLMHTAKVVPSEEQKEGIRDLKIRHAEQDKKECLGNSSIDGNKTSMEHAHISSVSCEDGGGALWDIFRREDVGKLKEYLTKHSKEFRHMYCCPVEKIFNPVHDETFYLTNKHKRKLKEEYGIEPWTFVQRLGDAVFIPAGCPHQVRNLKSCTKIALDFVSPENIQQCLSLTEDFRRLPVGHRAKEDKLEVKKMIVYAVEHALAILKEPCTPRESA

SEQ ID NO: 223992 - protein, 875 aa, Zea Mays
MTAVELRIGPLEWAMDDESPGVGDEDGKDEDWALDMERKGRGKRKRSAPRRRSGPKRRRAAAAMAPAPARSQSEPCPGTAEPSPEHGFNAAAAAAGVKEENGVRKEEGENVAPSTSGRGGGGGRKPGARRSCHQCKRVKRLKEMVRCQCCDERIYCDLCIRNRYAMMSPDAVREQCPFCRGLCNCTRCLNKDRDKQLGPENLVLRKCNSNESSKREKRPTSAGVISPQAHSAAPCTKEIGLSFVTTNRMNNVSAMWAKVDTSDVRAEEVDPETKRKYASYLLHYLLPCLTQLNKDQMEEREAEAKIRGLQLSELIVEKAVSWNDERVFCNNCKTSIFDLHRSCSNCSYELCISCCKELRGNFLKINCQKGLVPEHKSRGIDYMHGGDCKPPNLENDRETGLSSYQSKSIKWEADPGGTIYCPPSELDGCGNHVLELKQIFETDRLIKLEMEALRLSNQIEPSDISSIDICECSCSANNVSSRKAATRENSTDNNIYCPISDNGGPDDLKHFQKHWVKGEPVIVQGVLSEMSDLRWEPEKMWAEVHDANTSSEMKSVKTTDCMSCCEVEISAKDFFNGYYHGRMYHNLWPEMLKLKDWPTSDHFENILPSHGKTYINSLPFQPYTNLKSGLLNVSALLPGDVLKLDMGPKSYIAYGYAEELIRGDSVTKLHCDLSDAVNVLMHTAKVVPSEEQKEGIRDLKIRHAEQDKKECLGNSSIDGNKTSMEHAHISSVSCEDGGGALWDIFRREDVGKLKEYLTKHSKEFRHMYCCPVEKIFNPVHDETFYLTNKHKRKLKEEYGIEPWTFVQRLGDAVFIPAGCPHQVRNLKSCTKIALDFVSPENIQQCLSLTEDFRRLPVGHRAKEDKLEFLQELRMV

SEQ ID NO: 223993 - protein, 756 aa, Zea Mays
MDIERCRIWWPRQELQFKQKPFSPRLILFGWFFSSAGSIDIVISAAVPQVHILHSFATLDTLQTIILSSNKRMPVSLQESAAFTILGDCVRHPPKELEGYCFNKLEQLPLDANFVQKEHFGTRRNNVMIGSVGNGDQGPSYDHRRWGCDCCVLDGFLEVCRKSAVKEGSWVHLYWKFGENFKSNLNQVPVLHHLYLDGQQIENNRCHVILYEVPTIGRNHFSLGLDAPRTLNVSFKKPNWINDLQKQPSFLDLDSIVLALNCSNAARLPDTQECSTTCSGAYFIFASVYDVLVQVTWHCVGIFLASSSTILYIMILMSRKCLSHMPQYLMLNKVFRHSWNNIHLRSCQILYWPIVFQDASLSSTVNVEYAHKAAIRKHALWSSIIVDLLMGFVLGAAFLLNTETICIWTIALVHHMTEAILRSGCVWLMGVPAGFKLNTELAELLGMISLNAVQIYSTLWFFVGGYLRHIIQGIAVSGIILGLTAPVSFFIDIIQLATLHVTILHWLISSLYSRQIQTVASLWRLFRGRKWNPLRQRLDSYDYTVEQHVVGSLLFTPILLLIPTTSVFYVFFSILTTTVIWVCVMLEIVIALIQSTPYAELTLWVMRRHRFPAGLFFFHLPSNGHTFEDDDLSSHSVGCCNETRKEDLIDKLSESLVSELHCSYATFVQVIRSNYERVFNRTGYSFCKQLAYGILSGERVPSSLHLQTSPSFPWMNIGITEYWMHCYVCVLQCAPKRYMMIAFERTLVLFGGFGFK

SEQ ID NO: 223994 - protein, 147 aa, Zea Mays
MTLGSSGAGSSVVVPRNFRLLEELERGEKGIGDGTVSYGMDDADDIYMRSWTGTIIGPHNTVHEGRIYQLKLFCDKDYPEKPPSVRFHSRINMTCVNHETGMVDPRKFGLLANWQRDYTMENILTQLKKEMAASQNRKLVQPPEGTS

SEQ ID NO: 223995 - protein, 561 aa, Zea Mays
MASQVAGSTPAVAALGFLLPTFWEIEVTCAAAMILVALYVAYELLNPRSSQAAAAGDADELLVRGLDGADKFKGGVSGPSAYVVKLELLAAKNLMAANLNGTSDPYALITCGAEKRFSSMVPGSRNPMWGEEFNFFVDSLPVKINVTIYDWDIVWKSTILGSFTVTVESEVPSGPIWHTLDSTSGQVCLHIKVIKVHESSSRAINSSAEAGARRRISLDKQGPTVVHQKPGPLQTIFELPPDEVVDHSYSCALERSFLYHGRMYVSSWHICFHSNVFSKQIKVVIPLRDIDEIRRSQHAVINPAITIFLRMGAGGFGVPPLGCPDGRVRYKFASFWNRNHTFRALHRAMKNFVMMIDAEKQERAQSALRAHSSSRKNSKKEINVPEDCAALTGKLQPFVKEEVLVPVFNGTFPCTAEQFFSILLSDDSNYITEYRTDRKDKDINLGQWHVADEYDGQVRELNCKSICHSPMCPPYSAMTEWQHIVLSADKMDLVFETVQQVHDVPFGSFFEVHCRWCVKTISSNSCSLNISAGAHFKKWCIMQSKIKSGAVDEGSSTLIDM

SEQ ID NO: 223996 - protein, 556 aa, Zea Mays
MASQVAGSTPAVAALGFLLPTFWEIEVTCAAAMILVALYVAYELLNPRSSQAAAAGDADELLVRGLDGADKFKGGVSGPSAYVVKLELLAAKNLMAANLNGTSDPYALITCGAEKRFSSMVPGSRNPMWGEEFNFFVDSLPVKINVTIYDWDIVWKSTILGSFTVTVESEVPSGPIWHTLDSTSGQVCLHIKVIKVHESSSRAINSSAEAGARRRISLDKQGPTVVHQKPGPLQTIFELPPDEVVDHSYSCALERSFLYHGRMYVSSWHICFHSNVFSKQIKVVIPLRDIDEIRRSQHAVINPAITIFLRMGAGGFGVPPLGCPDGRVRYKFASFWNRNHTFRALHRAMKNFVMMIDAEKQERAQSALRAHSSSRKNSKKEINVPEDCAALTGKLQPFVKEEVLVPVFNGTFPCTAEQFFSILLSDDSNYITEYRTDRKDKDINLGQWHVADEYDGQVRELNCKSICHSPMCPPYSAMTEWQHIVLSADKMDLVFETVQQVHDVPFGSFFEVHCRWCVKTISSNSCSLNISAGAHFKKWCIMQSKIKSGAVDEIQV

SEQ ID NO: 223997 - protein, 63 aa, Zea Mays
MVHPNVPCMLFTPICPHSLSFRPVILPDSARLELKMRQEAMHGFRLMAKGGSNCQEEILFVYP

SEQ ID NO: 223998 - protein, 414 aa, Zea Mays
MGFFVFKTVQEISQHPRSHDAQRERSLLRDWLLPVEGAVALSIVLAFAWQKAVRAWPRAMVRVILWSSFGVTLAVGALLMCFSMLATVGLGVAMVVFSIGTGLYACWVTRRVGFTARVFERAVQPVDKFHGLNGPAYLMVAAGFAWISVWCVAVIGAVNFRFPGLTILGLVVSLAWTAEVMRNVANLTVSRVIALYYLRGMQSSVQFSFHRALSHNLGSACLGSLFVPTIEALRILARGLNLLEGEDEFMFSCAHCCLHVMNAIFSFGNSWAFVHIAAYGRGFVQASRSTWSQFEALPGMAALVDSDITSSVCFLTGVTSGALCVALAGSWAFATHRHYTATVSLLAFYVGYLMTRIGMALPQACVGCYYVCYAENPTSRLFDGNIPNQLSKMQESRGPSVPTPRFPHRQHVGA

SEQ ID NO: 223999 - protein, 89 aa, Zea Mays
MEYAIRYNAVMESWGMLLNWGQDGGGGQGIALQIRDVRVRVLGEVAWVNMKANVLFHVTNVYELCNGRWYMVHHHSSLMADPPPHNMFA

SEQ ID NO: 224000 - protein, 785 aa, Zea Mays
MAPRDPKEDGFGVGGAADPEADIEAPLLVSSGSSFLLDPALEDGGGGDEEQRRRRRRFLHGSHTHSNTTSQVALVGADVCPIESLDYELIENDVFKQDWRARGRGHILRYVALKWALCFLVGALAAAAGFVANLGVENVAGAKFVVTSDLMLDGRHGSAFAVFLASNFALTMLAAVLTVYVAPAAAGSGIPEVKAYLNGVDAPNIFSLKTLIVKIVGCIAAVSSSLHVGKAGPLVHTGACIASILGQGGSRKYRMTCRWLRYFKNDRDRRDLVTCGSAAGIAAAFRAPVGGVLFALETVSSWWRSALLWRAFFTTAMVAVVLRALIDFCQSGKCGLFGKGVFGGILGSLYNFFLDKVLRLYNLINKGKAYKLLLAATVTVCTSCCLFGLPWIAACKPCPTDTREACPSIGRSGNFKKFQCATDEYNDLASLFFNTNDDTIRNLYSAGTDDEFHISSILVFFIASYFLGIFSYGLALPSGLFVPVILTGAAYGRLVGMLIGSQSTLDHGLFAVLGSAALLGGSMRMTVSVCVIILELTNNLRMLPLVMLVLLISKVVADAFNANVYDLLVRLKGFPHLEGYAEPYMRQLSVSDVVTGPLQTFNGIEKVGHIVHVLKTTGHNGFPVVDEPPFSDTPTLYGLILRDHLLVLLRKKDFIRSCTASTLNALNHFSHAEFAKRGSGKHDRIEDIELCPEELEMFVDLHPFTNTSPYTVLETMSLAKALILFREVGLRHLLVLPKSSKRAPVVGILTRHDFMPEHILGLHPFLFKSRWKKVRLGKVKVTNIF

SEQ ID NO: 224001 - protein, 233 aa, Zea Mays
MARAFGDFCLKDYGLISVPEISYRLLTEKDEFIILATDGVWDVLSNKEAVDIVASAPSRATAARALVDSAVRSWRLKFPTSKSDDCAVVCLFLDRAGSAQESESEAIVETAEPTGEEVCRRDAGEVDEDMAVADAGVHVVSSAEHSAEATPLQHSTTSRELDDEIVPADEHEPPVVLKEPARCGSARSLAECISTSEEEEWSALEGVTRVNSLLNLPRIMSGDRRSASWRKRR

SEQ ID NO: 224002 - protein, 370 aa, Zea Mays
MEYGAVLAAAPLVARPNWLLLSPPPLAPSIQIQNRLYSISSFPLKAGPVRACRALASNYTRQTSETVDLDWENLGFGIVQTDYMYIAKCGTDGNFSEGEMVPFGPIALSPSSGVLNYGQGLFEGLKAYKKTDGSILLFRPEENAERMRTGAERMCMPAPSVEQFIDAVKQTVLANKRWIPPTGKGSLYIRPLLMGSGAVLGLAPAPEYTFIIFVSPVGNYFKEGLAPINLIVEDKFHRATPGGTGGVKTIGNYASVLMAQKIAKEKGYSDVLYLDAVHKKYLEEVSSCNVFVVKDNVISTPAIKGTILPGITRKSIIDVALSKGFQVEERLVSVDELLDADEVFCTGTAVVVSPVGSITYQGKRLNIIFA

SEQ ID NO: 224003 - protein, 548 aa, Zea Mays
MVVLVRVLVACAKFRCPAANLLLSASTSRVRAQPGGPLLRQRTSKVSLRSIAMSTTQASEAAADKGLPLAVDATMIDEYASQSKLLQEFVKIPTIGKAWIFNSKDDDMSKAVVSIGKSDLLANKRRQFLLNTHISKSPSKSVDFQWSPFPTEISGVSAIVPSPSGEKLLLVRNSEDDSPTKLEIWGPCQLENEIHIAKSVHGSLYTDEWFEGISWNQEETFIAYVAEEPPQPKPVFNDYGFKKEGLSEKDCKSWKGQGDWEETWGETYSKKRIPALFVINISSGEVRPVKQIPRSLSVGQVIWAPSSSYSLVFVAWSSDNGFQGTPRKLGIKYCYNRPCALYAAPDPFGQEAEKSLTEGNKGETTTMIKLTANLSSAFFPRFSPDGKYLVFISAKSAVDSGAHNATNSLHRIEWCTDGKLDGSLGVADVVPIVLCPKDNCFPGLYCFGLLRDPWLTDGQTMIISSVWGSREVILSVNVVSCELSRVSPQDSDYSWNVLAVDKNNILAAALLHSLRCTMGLRFLRLKAIGSGREFQLLSQSHLIRSAPY

SEQ ID NO: 224004 - protein, 414 aa, Zea Mays
MIKLTANLSSAFFPRFSPDGKYLVFISAKSAVDSGAHNATNSLHRIEWCTDGKLDGSLGVADVVPIVLCPKDNCFPGLYCFGLLRDPWLTDGQTMIISSVWGSREVILSVNVVSCELSRVSPQDSDYSWNVLAVDKNNILAVSSSLITLPQMYYGIKVSQTESNWEWQGVSTPFPKPSDKISSVLAEHKFSILKIPISNPSDELANGAKLPFEAIFVSHKDSASNPTIVVLHGGPHSVYPSSYSKSLAFLFSQGYNLLVVNYRGSLGFGEEALQSLPGNIGSQDVNDVLTALDLVIKRGLIDPSRVAVVGGSHGGFLTTHLIGQAPDTFVAAAARNPVCNLSLMVGTSDIPDWCFVEIYGKEGKKYFSESPSVDDLCQFHQKSPISHIAKVKTPTLFLLGAQDLRVPVSNGLQA

SEQ ID NO: 224005 - protein, 220 aa, Zea Mays
MIKLTANLSSAFFPRFSPDGKYLVFISAKSAVDSGAHNATNSLHRIEWCTDGKLDGSLGVADVVPIVLCPKDNCFPGLYCFGLLRDPWLTDGQTMIISSVWGSREVILSVNVVSCELSRVSPQDSDYSWNVLAVDKNNILAVSSSLITLPQMYYGIKVSQTESNWEWQGVSTPFPKPSDKISSVLAEHKFSILKIPISNPSDELANGYVTFLEASTLPTL

SEQ ID NO: 224006 - protein, 100 aa, Zea Mays
MANSASGMAVSDECKLKFQELKSKRSFRFITFKINEQTQQVVVDRLGQPGDTYDDFTGSMPESECRYAVFDFDFTTDENCQKSKILFISCDSLSPYLDIM

SEQ ID NO: 224007 - protein, 99 aa, Zea Mays
MANSASGMAVSDECKLKFQELKSKRSFRFITFKINEQTQQVVVDRLGQPGDTYDDFTGSMPESECRYAVFDFDFTTDENCQKSKILFISCDGRSIELHL

SEQ ID NO: 224008 - protein, 380 aa, Zea Mays
MNLHMPSCHTISRRARTISDLVKILIPMFGLMSLLHLVYLVFGKKTSRRPHLSQRSFGEHFEKVTYNDLAKATRDFSEYNLIGRGSYGSVYSGKLKEVEVAVKVFNLEMQGADKSFLVECETLRSIQHRNLLPIITACSSIDTTGNSFKALIYELMPNGNLDKWIHHKDNEALPKRLSLAQRIAVVVNVADALDYLHHDCGRPTIHCDLKPSNILLGDDMNAVLADFGIAHLYSDSQSTWTSSFSSIGVKGSIGYIPPEYGGGGSVSTSGDVYSFGVVCLEILIGKRPIDPVFIGGLDIISFVKNSFPDQIFHIMDSHLVEECEHLIQDNKVTNEEMYQCLVDLLQVALSCTCSLPSERSNMKQVASKLHAIKTSQIGYK

SEQ ID NO: 224009 - protein, 450 aa, Zea Mays
MNVDEEVESGEEEEEDLFYESLDRILSSSGSSTSASDDDGADSPRRRRGCDAPVAAAAAALDLWTSQPSPVQERRRRLLQLMGLIGDPSLAGFETGRSASEDAAGPPPASPVSRSRSGGAALGSAGKPPLGGVRLRSSLSDGPDPADEDPRCLIRNLDDGREYVVKEEFGLREVGTGRHLTVEELARSPIVQELMRRQAFSTPNSNCNSNSQSGASTPIERSSSGSSNGGSRSKRRSSWLRSIRCAAGSLVTHSRDRSSSDEKDTSSEKGGHHSSSATDDSQDSVPRHGPARVKVRQYGKSYKELSGLFMTQEIHAHNGSIWSIKFSPDGRYLASAGEDCIIHVWEVLEFKRAGKEREVKENGVCNPLVAMVYSESSETMVASGAPSGSHWEKKLRSKVLQGGGSVSSDRLMVPEYVFALSEKPVITFAGHSEDVLDLSWSKSQVMYTDF

SEQ ID NO: 224010 - protein, 450 aa, Zea Mays; identical to SEQ ID NO: 224009

SEQ ID NO: 224011 - protein, 345 aa, Zea Mays
MLQPSTSMNGDSLMRVPASPISFSSNNISGSSVIDGCIMQQSPPQEQVQKQRSSSVTSQPVIDAGGALHAQKKSRIDVCQGGITEQQLIQQLLHGQNSLHYQGQQNPQLQALMQHHKLAQLQQRQQQHPFSQMQQPQVGIPRQPQLRPPLAQTGMQLGGPVRSPIESGICSRRILQYLYHKRHRPENNPITYWRKLVEEYFAPRARERWCVSSYENRGNSSAAAPQKALDTWRCGICNTHGGKGYEVTYEVLPRLCQIRFDHGVIDEYLYFDSPNEFRLPNGQMVLEHAKVVQKSVYEHLHVIHEGHLRIIFTPELKIMSWEFCSRRHEEYTTRKTIAPQDTMVV

SEQ ID NO: 224012 - protein, 701 aa, Zea Mays
MDPAPATPRWNLERPYLTGRFHQEAKAAAAAQGLGSKPFSLDSFSRGAGAGSVIGSYAVSVQELLVIDDLLSALVGIEGRYVSIKRVRGKEGYVVFQIDSSMDLALQELTRRIFPLCEDYVLVSQFVESRSHFKNGLVNHALAAALRAFLLAMVAQLEHQFRLGRLSVQGLWFFCQRMMSSLNALAVLVEKATSNNTNGSATLNLLQSQAKAMGGDSAVRSLLEKMTEYASAAYLRMLERWVYEGVIDDPYGEFFIAENKSLQKESLTQDYDAKYWQQRYSLKEGIPSFLTNVAATILTTGKYLNVMRECGHNVQVSLSDNSKLMSFGSNHQYLECIKSAYDFASGELLTLMKDKYDLIGKLRSLKRYLLLDQGDFLVHFMDIAREELTKKPEEISAEKLQSLLDIALRSTAAASDPSHEELICCVERSSLLKKLATLKDLDPADKLAAADVDRSMQLSITGLETFCLSNKVQWPLSLVISRKALTKYQLIFRLLFHCKHVSRQLCAAWQIQQAFRSVKILGTPILRSSILCRSMLKFVNSLLHYLTFEVLEPNWHLMHDRLQTARSIDEVIQIHDFFLQKCLKECLLLSPELLVKVEKLKGLCLQYATSIQILMPSIDVANSENTSKSRKSRSRIDKSQDRDQQLKLASENVVMSESILKFEAAFNSELQSLAPTLSNSSQAEPYVTHLAQCILGVRIGQ

SEQ ID NO: 224013 - protein, 490 aa, Zea Mays
MRKVAGNSFVNMPASPPQALTPPPNPRGRPDDRRGPTSAPTVPETPIDPDDKKMQTGPLVGIAVGSIAAASCVLFALVLCLHNARKKPDDGSSEAKASSREVMDSSHDNAAVATSDLQLIQPAGKMTPDDRAHGPNGCTAKRPKQQVTVTTVSSYTVAALQVATNSFCQDSLLGEGSLGRVYKAVFPNGKVLAVKKIDSASLSLYEEDNFLAVVSNVSRLRHPNIVPLAGYCVEHGQRLLAYEYVGNGTLHDMLHFSDDDGMTMPGKTTRLAWNTRARIALGTARALEYLHEVCLPPVVHRAFKSSNILLDDEYSPRLSDCGLAALSPNPETEREAFAGVVGSFGYSAPEFAMSGTYTAKSDVYSFGVVMLELLTGRKPLDSSRERSEQSLVRWATPQLHDIDLLAKMVDPALDGLYPAKSLSRFADIIAICVQSEPEFRPPMSEVVQQLVRLMQRASIVRRQSDDQLGYSYRVPERDGGGTVGGDVVVA

SEQ ID NO: 224014 - protein, 754 aa, Zea Mays
MKPRTATLAAGLLQLVALAAVAEADTDAGDVAALGNLYSSWNSPARLAGWSASGGDPCGAAWTGVSCSGSAVTSIKLSGMELNGTLGYQLSSLQALKTMDLSNNYLHDSIPYQLPSNLTYLNLAKNNFSGNLPYSISNLVSLEYLNLSHNSLFQEIGELFGSLSSLSELDISFNNLTGNLPFSMGSLSKLSSLYMQNNQLSGTVDVISNISLATLDIASNNFSGMIPQEFSSIPNLIVAGNSFVNMPASPPQALTPPPNPRGRPDDRRGPTSAPTVPETPIDPDDKKMQTGPLVGIAVGSIAAASCVLFALVLCLHNARKKPDDGSSEAKASSREVMDSSHDNAAVATSDLQLIQPAGKMTPDDRAHGPNGCTAKRPKQQVTVTTVSSYTVAALQVATNSFCQDSLLGEGSLGRVYKAVFPNGKVLAVKKIDSASLSLYEEDNFLAVVSNVSRLRHPNIVPLAGYCVEHGQRLLAYEYVGNGTLHDMLHFSDDDGMTMPGKTTRLAWNTRARIALGTARALEYLHEVCLPPVVHRAFKSSNILLDDEYSPRLSDCGLAALSPNPETEREAFAGVVGSFGYSAPEFAMSGTYTAKSDVYSFGVVMLELLTGRKPLDRERSEQSLVRWATPQLHDIDLLAKMVDPALDGLYPAKSLSRFADIIAICVQSEPEFRPPMSEVVQQLVRLMQRASIVRRQSDDQLGYSYRVPERDGGDQSWRTLLLLHKALHSLYIFINKRASKRKEKQLDMDGSFTFC

SEQ ID NO: 224015 - protein, 237 aa, Zea Mays
MTGLCKGYGFIQFARLEDAKAAQSLNGQLDIAGRVIKVSAVTDHVGVQASGATTGDLDDDEGGGLALNASSRAALMLKLDRSGTATSLTGGIGAAGVAVPATSVIGAAGAASLLSPTVSAVGSVPGAPVLPITAQNVIMSTPTEFLLLKNMFDPSLETDPDFDLDIRDDVQDECSKFGAVKHIFVDKNTAGFVYLQFDSVTAAGKAQQALHGRWFAGKMITATFMSDQEYSTKFPNL

SEQ ID NO: 224016 - protein, 497 aa, Zea Mays
MEFDEYEYLEKAVEPAPPPANGSGSGEKDRGSRRREGDEGRISKRSRSGEDRERGRHRSVREHRDRDKDDGKEKERSRDSRGKDRDREGREREKERGDRHRPREREVERERRSLSRSERRRIEEEEMVRELEMERERSERHHYRDRDVRRRKDDGAEPEVDPERDQRTVFAFQLSLKADERDVYEFFSRAGKVRDVRLIMDRNSRRSKGVGYIEFYDVMSVPMAIALSGQPLLGQAVMVKPSEAEKNLVQSNATSGGAASGGARKLYVGNLHSNITEDQLRQVFEPFGQVELVQLPLDAMTGLCKGYGFIQFARLEDAKAAQSLNGQLDIAGRVIKVSAVTDHVGVQASGATTGDLDDDEGGGLALNASSRAALMLKLDRSGTATSLTGGIGAAGVAVPATSVIGAAGAASLLSPTVSAVGSVPGAPVLPITAQNVIMSTPTEFLLLKNMFDPSLETDPDFDLDIRDDVQDECSKFGAVKHIFVDKYCYIFPKLSQC

SEQ ID NO: 224017 - protein, 713 aa, Zea Mays
MAALADIDSSALPPSESSKGKGKMDEEEEDEAEGAEKMCGICYLDGRRAIRGELDCCAHFFCFVCIMAWGRVESRCPFCRARFHTIRRPPVAGRFPDERIVSIQERNQVHHPQGNGSSIVGGDPYVNTICTVCSSSSDDELLLLCELCDSAAHTYCVGLGTTVPEGDWFCKDCGTIRDDQLRWQAENQGEFEISMDVPGAEPVPAPSISGVVDEDHDLERPYARSGGGSTDDPVPSIYEIVGDDFATSAGIFRRRIAEDIGSQGTSAGSQCPRSTQGRDNGLAAYHAHIRLEVERARTLRNSRNLDKRIRELRENWAALRAGSVGFAPHMPVRRRKDMAGSASVATEHQRYAEPVTLSSRNGAAAASVPLPMPFSEETNTSLGHSKKVLQKDTRDARKAWKRLEMAKSSGGRKTSKTPASINCCPPFSMGNRSTSYSPIDTIVGHKNGNLRSKSCQQNYSICGHVTKVEHTLPTNNSRGCHSLPENSRALDHERMVSSQNRINQESFSGKVASSTHIQHVDQALVSTFNTHRPEKLVSDMLHPLKYGSSSGQSAVTSSLQLGSSVGSGSQSTMPVNPEEPSAVCAEDIAATIEVTKSSSLDQHERKRKHSSERCSDQRSKRSRSTCKIAKSSDRFKEVARTATHSILAACRFEHSPSQSLALSRPVCKHSPKVKQLNSSAITDFCRECLHNFVKEAVSLALSGGQMDQTGTPC

SEQ ID NO: 224018 - protein, 153 aa, Zea Mays
MNNYQEYVKLKARVEVLQHSQRNLLGEELAPLSPSELDQLESQVDKTLKQIRSRKTQVLLDELCDLKRKEQMLQDANRVLKRKLHEFEAEAASPPQLAWQGGGGMLSHDPPQPEHFFVALESNAPLQPTYHTMDMNQQPEPAPGGCYPPAWMA

SEQ ID NO: 224019 - protein, 62 aa, Zea Mays
MKIGALLHFKFSISPIHSMWNDANVQWPHCARCLSCPAKMCLSSVHNTKGVLQSSNATSQQS

SEQ ID NO: 224020 - protein, 109 aa, Zea Mays
MIRMKLTHMLIKSKQNSADPCYVVKKLDANIKKYGINSRKVITSKNLTMLMGLIDQEIEEINAEKRKRSGHPAGGQPELKDDDGQLRANSVKARDAELRCERAVKLRRL

SEQ ID NO: 224021 - protein, 304 aa, Zea Mays
MMSMTVEKFREFLLSKDFVGIHTPKLISGSSEGGAAVFKLLYNGQPACLAQSPQLHKQMALCGGFERVFEVGPVFRAENSNTHRHLCEFVGLDAEMEIKEHYFEVCDIIDGLFVSIFKHLTENCNKELETINRQYPFEPLKYLDKTLKLTYEEGVQMLKEAGTEIEPMGDLNTEAEKKLGRLVREKYDTDFFIMYRYPLAVRPFYTMPCYDNPAYSNSFDVFIRGEEIISGAQRIHTPELLTKRATECGIDVSTISTYIEVFSYGAPPHGGFGVGLERVVMLFCALNNIRKTSMFPRDPQRLVP

SEQ ID NO: 224022 - protein, 320 aa, Zea Mays
MGCVSSKQFHGGDDHGDGKPRRRPSSNSLKRLVSYSSSKRHEELEEEDEVGAAVAATSSSGGRRAGNDASTARLIRKPPALVVEAVPALSEEAATLAVGVVDAERAVAAATGNRKRPPADVHINGAAEQGLSSVGVRTEGEAKPRIRDVPNGVQGEHVVAGWPRWLTEVAAEAVRGWQPRRAESFEKLDKIGQGTYSSVYKARDLENGKIVALKKVRFANMDPESVRFMAREIHILRRLDHPNVIKLEGLVTSRMSSSLYLVFEYMEHDLAGLAATPGLKFSEPQVKCYMQQLLSGLDHCHNRGVLHRDIKVTLWYRPPE

SEQ ID NO: 224023 - protein, 214 aa, Zea Mays
MARLAVAARAFSAAASGGGVSLVQGASRGIGLEFLLRRSDGGRVVATCRTPGSAAELQKLREEHAPGRLTVLPLDVTDESTIEAAAASITETHGSLDLLINSAGILSIPNVIQPETTLSKVQKSSLMLAYEVNAVGPILVIKHMWPLLKIGGRSETRRGFALVANMSARVSSIGDNALGGWHAYRASKTALNQCECSIVLFQVFNDLCALISLE

SEQ ID NO: 224024 - protein, 230 aa, Zea Mays
MNAMVFQVYAVLSRSLGPATSEPPSYASVALAGVSTGALQTLILSPVELVKIRLQLEAASGHGPVEMVREILRREGLRGVYRGLAVTALRDAPAHGVYFWTYERARERLHPGCRRSSSSQDQDGDEGLGTMLVAGGLAGVASWVCCYPLDVVKSRLQAQGAASASAPRYRGVVDCFQRSVREEGLPVLWRGLGTAVARAFVVNGAIFSAYELALRFIASGGGPRLVMEDK

SEQ ID NO: 224025 - protein, 207 aa, Zea Mays
MAAASTSLPLGFSSHHRPTPRIRPQPQSQSQPLKAKPLNPLRFSLALTPATAKPRLAAMPDDVAVANFVEKDWSFLESAGANLQRALASGALSPASRVLALTPTASFVRSLLASSPCELLVAAHESMYVLAGVKEAHDEVRCFHLEGGGGGRGGGVVEAVPERFDDFDVVFVCYFPGMGVSAGALLKSLAKRCSKGLKLCQHQEHIY

SEQ ID NO: 224026 - protein, 409 aa, Zea Mays
MGKNMRIKTAPKANRVPLLGDGETSRALSDLEEGSDVQPANVGFCRVIKLAKHDAGKLVLATAALLVASLSNLLVPKYGGKIIDIVSRDVRRPEDKAQALEDVKGTILYIVTIVLVGSVCTALRAWLFNSASERVVARLRKDLFSHLINQEIAFFDVTRTGELLSRLSEDTQIIKNAATTNLSEALRNVTTTAIGLGFMFSTSWKLTLLALVIVPVISVAVRRFGRFLRELSHQTQAAAAVASSIAEESFGAIRTVRSFAQEYHEISRYGEKVEETLKLGLKQAKVVGLFSGGLNAASTMSVVIVVIYGANLTINGYMTTGSLTSFILYSLTVGSSVSALSGLYTTVMKASGASRRVFQLLDRVSSMTNSGDKCPINEKDGEVELDDVWFAYPSRPSHMILKDDIYGNF

SEQ ID NO: 224027 - protein, 277 aa, Zea Mays
MVRKLNEYFRGYMHQDAHEFLNFLLNEIVDILEKESSSAKDSPGTTSSENVSNGAAVDGVRKEPLVTWVHKNFQGILTNETRCLMCETITAKDETFFDLSVDIEQNSSLTSCLKNFFSTETLNADDKFFCDKCCSLQEAEKRMKIKKAPQILVIHLKRFKFIEQLNRHKKLSYRVVYPLELKLSSNSADADCEYSLFAVVVHLGSGPNQGHYVAMIKSHDHWLSFDDDNVEMIPESTLQTFYGSYHEYSGNTDHGYILFYGRIGGSGNEKTDSSDGV

SEQ ID NO: 224028 - protein, 356 aa, Zea Mays
MLPKKYLFMRSNGCDGVIFFIKALYYCAPFREQLLEYYRRNRNLEDAEENLLTCLADLFSQISASKKKTGVIAPKRFIQMVRKLNEYFRGYMHQDAHEFLNFLLNEIVDILEKESSSAKDSPGTTSSENVSNGAAVDGVRKEPLVTWVHKNFQGILTNETRCLMCETITAKDETFFDLSVDIEQNSSLTSCLKNFFSTETLNADDKFFCDKCCSLQEAEKRMKIKKAPQILVIHLKRFKFIEQLNRHKKLSYRVVYPLELKLSSNSADADCEYSLFAVVVHLGSGPNQGHYVAMIKSHDHWLSFDDDNVEMIPESTLQTFYGSYHEYSGNTDHGYILFYGRIGGSGNEKTDSSDGV

SEQ ID NO: 224029 - protein, 478 aa, Zea Mays
MPKRHRDSEGRQRSSSSRRRRSPSPSDSDAASSDYSGSPRRSRGRHRHRSRRRRDTPSTSSDASGSGSEDSRSDSGRRGRSGGRRRRNVTEEQIIEYMAKKAQKKAEKVAKKLKANSVSGYSNDSNPFGDPNLTEKFVWRKKIEHDVSQGQKVDFSVKSEKKKQLERMAEIEKVKKRREERAIEKAQHEEEMALIARERARAEFQDWEKKEEEFHFDQSKVRSEIRLREGRTKPIDVLLKNLSFSDEFDIELNEPYLVFKGLTVKEMEELCDDIKMHLDLDRESQTNVKYWEDRKREAVVLEHQRKVQEAMKTKARVPDEMEMKAIKTMGAMEEGDAVFGAGAEVNLDSQVYWWHDKYRPRKPKYFNRVHTGYEWNKYNQTHYDHDNPPPKIVQGYKFNIFYPDLVDKSKAPTYSIEKDGSAGETCFIRFHAGPPYEDIAFRIVNKEWEYSHKKGFKCTFERGILHLYFNFKRYRYRR

SEQ ID NO: 224030 - protein, 845 aa, Zea Mays
MAAGSGGGGFLGDVNDPWLKPRLLRAVVTGRLPQPGAAAELSPTEVASILEVVRTHGLLTEDLPGRGALVNPKLAEAWRAAVDAWVERVVALVESDSQSSSFQLVIVISCTSMSDLFVRLAKFSNLKKEGSSFAGRVVEPVLRLLNQNGLVADEAIDLLRTVIKLYPSSVNRHYNKVESAIAAKIMSNVKPSEKFARTLALLPSVRVSEDSWSLMIRRILIVVNNLLNDAFIGLEEEKKGHDIMLLLVPPGTDPLPTLGDEVMPGGNVHIMKKFRVFTVPTISALTLCCSVMLTSYYPVNVPIHALIALMRRVLLVDGSLHNKLFPSTTSLHQELICFDLPSLHSTFLDLLNATIKGMRSQLLPHGASIIRLITEYFKIAKLPTLRTKTYSILQLLLTSMGVGTSLHLLEATVRNAVADLNDDGEINMTMINTNSSQLTNESSSKVYSKKRKQEPQMQNSTISGSEKVAISPRKRKGSSIPITSKGVAPESTGDVTLSTPHSVKIAALETLEVLLNVGGSLRMDRWRSEVDMLLINVARSACGMGGSYEQKPSTFGEPNISDFQLASLKGLLASFLSSHARPPYLANGIELFRKGKLEIGTKVAEFCSHALLALDVLVHPRALSLERTVPASSGFNYTAQKKTVFGAGTHQISPFGDQPQAMEVEDMYDDWLISNNNEPPEVPVNGSDAVVSKGVLVEDGKQLNPIAEDPKVDPPRITDAAQDAPASTKTDVKVVDAAAATAAKPNTAENPSSSNAVPSPVRTTDSDSRKHASFPEQDSPHENKSAAVHPGEASATPGVGSSHHRHEAPEARSASFTELFGSESGIESESEDLMPDIVDGDPDSD

SEQ ID NO: 224031 - protein, 186 aa, Zea Mays
MGSCPSLSSSSRRACWRRPSPSSRRSSPPQSLTGACALRPWLRRSRSRRSRRRSPSARSRRCSRPRTPCLGTAPWMVLPPTSATCCSSSISSLTSASSTSAFDGYLSALSPIQLVRSNSRRFMPSQANEEIHQLSFLQKHMANILTLLADSVEGEGDDSLGYWQNFTIGIVPGFHELQHLTSSLAS

SEQ ID NO: 224032 - protein, 165 aa, Zea Mays
MRFISKDPEGYVVAGFKKIKALVQSNSMLASALRTSSKLVVSDDGARVKREQPFTESDLEELQARIVVAENLPDDHCYQNLMRLFSVVGSVRTIRTCYPQTPNGTGPATNRSAKLDMLFANKLHAFVEYDTIEDAARAIVELNDERNWRSGLRVRLLSTCMVTFH

SEQ ID NO: 224033 - protein, 74 aa, Zea Mays
MKPATVALLILLNMMCIVAYFDHGTMAEETTLLANSYGRNEGTKGIHHGRKLMDNSIGSNQLFLTEIRLLDKKT

SEQ ID NO: 224034 - protein, 122 aa, Zea Mays
MAARRGREWDGDEQGAALPTPAPLGAPVVCLLSSAGDLAAGAFVGSLVGYGKGLITNQGTKACLSIAGSSAKTFAALAGVQSFIMCLLRRLRGKDDMINAGMAGCCTGIALSFPDRRREKSE

SEQ ID NO: 224035 - protein, 124 aa, Zea Mays
MEEKLHQTEADPAIIALLLEKTNPWISENIVYVAGDRVVTDPLCKPFSMGRNLICVYSKKHMNDFPELIEMKRRSNTRSLKEMALLLRGGSQLIWIAPSGGRDRPNPSTGEWYPANETRWYRQL

SEQ ID NO: 224036 - protein, 448 aa, Zea Mays
MHAPPLVAFAGGACPASAASSLSPWLASLRPAIVAAPARLLWFRRGALRLEAKAAWRATGGGRGPRVPAKGAVLASYMGAEEVVGPLSLLDEEELILHIRKERDNGKLPADVAINLEELYYNYRNAVLQNGDPNAYEIMLSNMTALFDRVLLDVQQNPFTFPPYHKAVREPFDYYMFGQNYIRPLVDFRNSYVGNISLFHDMEEKLHQGHNVVLMSNHQTEADPAIIALLLEKTNPWISENIVYVAGDRVVTDPLCKPFSMGRNLICVYSKKHMNDFPELIEMKRRSNTRSLKEMALLLRGGSQLIWIAPSGGRDRPNPSTGEWYPAHFDSSTVDNMRRLLEHAGVPGHIYPLSLLCYEVMPPPQQVEKEIGEQRVISFHGVGLSATEETKYGDITCHTKNADEGRELFTNTLYNSVVNQYNVLKSAIFRDRGAAVSNNAISLSQPWR

SEQ ID NO: 224037 - protein, 406 aa, Zea Mays
MHAPPLVAFAGGACPASAASSLSPWLASLRPAIVAAPARLLWFRRGALRLEAKAAWRATGGGRGPRVPAKGAVLASYMGAEEVVGPLSLLDEEELILHIRKERDNGKLPADVAINLEELYYNYRNAVLQNGDPNAYEIMLSNMTALFDRVLLDVQNPFTFPPYHKAVREPFDYYMFGQNYIRPLVDFRNSYVGNISLFHDMEEKLHQGHNVVLMSNHQTEADPAIIALLLEKTNPWISENIVYVAGDRVVTDPLCKPFSMGRNLICVYSKKHMNDFPELIEMKRRSNTRSLKEMALLLRGGSQLIWIAPSGGRDRPNPSTGEWYPAHFDSSTVDNMRRLLEHAGVPGHIYPLSLLCYEVMPPPQQVEKEIGEQRVISFHGVGLSATEETKYGDITCHTKNADELTG

SEQ ID NO: 224038 - protein, 268 aa, Zea Mays
MGLRDSNINNVDQVIADPGLRMPIEQIDANIRDAVRRAYIAKGPCQPKGHKYPKRMISNRNRSFHDEWYVNNPWLEYSIAKDAAFCFYCYLFKQQRAENYGVDAFTVVGFRRWKDGRETIGAHGNGIDHNKSRRSYEDYKNQRQSVSHVMNRGGKKMEEEYKGRLLVILGVVRFLLLQALAFRGHDESSTSSNKGNFLELLHWYKDKDKNVANLLRTNQMTSPDIQKDICRACAEQTTKAIISDIGNRNFSILVDEARDVSRSKWRLF

SEQ ID NO: 224039 - protein, 226 aa, Zea Mays
MGDGGGALESAATDAARSVTNFSTGLRADVEAHLTASDAATDARLRQIEVDTGSRLTAIESAVQLFDCWRPRVDSSLDAMKTNLDRLCSEASRMEVVGFQGVFGGFPGVLGSPGSGATSSGLLGSPPSFAPTGAVPVRPSATVDHSDAYRFGPSYENYLRDSGLRYPDCRWPLPGHGISRLVSSTLRSDDGLLFPERCCLWRLNLYLSHLGYHTQFGFFGSNPIAR

SEQ ID NO: 224040 - protein, 278 aa, Zea Mays
MRKTRGATAEMMALARLRASATVDESRRRGGGIAARSPARRRPSCACSWTSTPRRDVRVTCGGRRCCFWARSAYESTSHKLGFIQQRSPVTTGMMVSFAKNVADFINSIGKNHIVIISSLDSGKRRVIDASSDMQVYYLSSCNEDGSDPEYEKLGWKKLEDYDPSQKRWNCLASLVEGGGLSEDLDDDTDEMTINDYYASLPFAALFSACKAKGLKVSCVLCYCSEGDNMPESFQLAEAICKLLGHGPEKFHGNGSNGWIVPLSWKSVYGPPPDMSIF

SEQ ID NO: 224041 - protein, 487 aa, Zea Mays
MTRVIHDSGDGMQKEALDLVSSDVNFPKGCFPDYRIGPNNQIIDPEETHEAVPLKEVVAKETAQLLEQHRRLSVRDLKEKFEKGLSSASKLSEEAKRREAASLDRQVLLKKLRDVLDTLKGRVAGRNKDDAEEAISLVEALAVQLTQREGELIYEKAEVKKLANFLKQATVDARKVAEEERALALAEIEKARAAIEKVEKAFHVHDSTKSSREEEIEELRKEVREARRIKMLHQPIKVMDMEFELQALRTLISQKTQLCNQLNKELATIKRLEVDSSDLFELEGSNTLGSQFCIIPRVDGAPNIANCPIQWYRVISGGSRGLISGATKFTYAPEPFDVGRLLQAEIILNADKIIVQTDGPIDNGLEHYVDSLMKRTDIEFNVVVTQMNGKDYSSNSVHVFHIGKLRIKLQKGWSTKARELYSTTMKLCGSRGGGNAAARAVFWQARKGLSYTLAFETDRDRNAAIMIARKFASNCNIALAGPGDQDT

SEQ ID NO: 224042 - protein, 383 aa, Zea Mays
MTRVIHDSGDGMQKEALDLVSSDVNFPKGCFPDYRIGPNNQIIDPEETHEAVPLKEVVAKETAQLLEQHRRLSVRDLKEKFEKGLSSASKLSEEAKRREAASLDRQVLLKKLRDVLDTLKGRVAGRNKDDAEEAISLVEALAVQLTQREGELIYEKAEVKKLANFLKQATVDARKVAEEERALALAEIEKARAAIEKVEKAFHVHDSTKSSREEEIEELRKEVREARRIKMLHQPIKVMDMEFELQALRTLISQKTQLCNQLNKELATIKRLEVDSSDLFELEGSNTLGSQFCIIPRVDGAPNIANCPIQWYRVISGGSRGLISGATKFTYAPEPFDVGRLLQAEIILNADKIIVQTDGPIDNAAGLEHYVDSLMKRTDIEFN

SEQ ID NO: 224043 - protein, 115 aa, Zea Mays
MKRTDIEFNVVVTQMNGKDYSSNSVHVFHIGKLRIKLQKGWSTKARELYSTTMKLCGSRGGGNAAARAVFWQARKGLSYTLAFETDRDRNAAIMIARKFASNCNIALAGPGDQDT

SEQ ID NO: 224044 - protein, 431 aa, Zea Mays
MASAAAETLASFPIASPSRSLLRPFPRRPAGARTGAPSIRISAVPPRGLGLALVHRRCPPAARANVERDGDGASGNGEPSSSSGDGDRDAAAESGGDSTSTSTTSTAATPPPPSSKRNENKWRRRLTKGGGVGRWLWEPIVQGREMGFLLLQLGFAIFALRMLRPEIALPGSEPRPQTTYVSVPYSDFLASINKDQVKKVEVDGVHIMFRLRPEVESQVRVEQTPTQRGADYVIDNAGVSRRIVFTTTRPVDIKTPYEKMVENMVEFGSPDKRSGGMLNSALVGLIYVVLIAVVLQRLPISFSQQSPGQLRNRKNSNSGGAKVSESSDIVTFADVAGVDEAKEELEEIVEFLRNPERYIPFISCSASEFVELYVGMGAARVRDLFAKAKKESPSIIFIDEIDAVAKSRDSRYRIVSNDEREQTLNQLLTLP

SEQ ID NO: 224045 - protein, 459 aa, Zea Mays
MASAAAETLASFPIASPSRSLLRPFPRRPAGARTGAPSIRISAVPPRGLGLALVHRRCPPAARANVERDGDGASGNGEPSSSSGDGDRDAAAESGGDSTSTSTTSTAATPPPPSSKRNENKWRRRLTKGGGVGRWLWEPIVQGREMGFLLLQLGFAIFALRMLRPEIALPGSEPRPQTTYVSVPYSDFLASINKDQVKKVEVDGVHIMFRLRPEVESQVRVEQTPTQRGADYVIDNAGVSRRIVFTTTRPVDIKTPYEKMVENMVEFGSPDKRSGGMLNSALVGLIYVVLIAVVLQRLPISFSQQSPGQLRNRKNSNSGGAKVSESSDIVTFADVAGVDEAKEELEEIVRGVLLVGLPGTGKTLLAKAVAGEAEVPFISCSASEFVELYVGMGAARVRDLFAKAKKESPSIIFIDEIDAVAKSRDSRYRIVSNDEREQTLNQLLTVGQCPFLFLEHSPN

SEQ ID NO: 224046 - protein, 477 aa, Zea Mays
MRRPTLSLALGLGLGLSLVALFAARGAHASIHEYGGGDFAPRANSFFFHGGSEGLYASDHSSNSSASFIRFDTVVFRRTLESASRHEEMQQKTGLVEAIIVEIQDRGKIGGSYLHSDAICCTPELDKEKSCRVGEVIIRPNPENPDWPKRIQTFFDGKNEETTMVTQIVSINKTGMYYLYFMFCDPQLKGLKITGRTVWRNPQGYLPGKMAPMMTFYGFMSLAYLVLGLLWFIQFVRCWKDILQLHYHITAVIALGMCEMAFWYFEYANFNSTGTRPMGITLWAVTFTAVKKTVSRLLLLVVSMGYGVVLPTLGGITSRVAALGFIYFVASEALELVENLGNINDFSGKTRLFLVLPVAVLDATFIIWIFSSLSRTLEKLQLRRSMAKLELYRKFTNSLAVSVLISIAWIGYEVSFINSKVHLCGPCNVDMIKRSKAMESNCIMGMSGGARAKFYVVFPLLCGDHKIGLEMSIDTSF

SEQ ID NO: 224047 - protein, 96 aa, Zea Mays
MEAFALDKICGSGRSAVTTQERVMEAQSSTCFSKVVGPNLWYGDRTRLTPKQEEAALGLSRACGSGIPAYICTMKKSNVVKRQMAGTWSAVSSTSQ

SEQ ID NO: 224048 - protein, 152 aa, Zea Mays
MWETSVQHADVASKIMSFSQHGTHGVCVLSANGSISNVTLRQTATSGRTVTYEGQFEILSLSGSFFLAEDGVQRSRNGSLSVSLAGPDGRLLGGGVAGLLVAASPVQYWEASILEAERSHKSRLLQNPHRLHRGLLRQPGWEDPAALLQEAH

SEQ ID NO: 224049 - protein, 118 aa, Zea Mays
MNFLLTTIGSWRINKNSWKEPIAFLSTTLLEADDRAVRMAAGEALALCFELNLLDVSSREDDGVNTGGTTGSKNKLFLDMQALKAKISGLATNLSTEARVQGAEPEKIIMLKYVSRTQ

SEQ ID NO: 224050 - protein, 80 aa, Zea Mays
MRQLMAGPPGLAMAPLQLPSLSLSLLRGGSATEGRRSVYTHRQRALEWVECGEEGDDGAIATERGDRSQVKSRCPRGGLL

SEQ ID NO: 224051 - protein, 105 aa, Zea Mays
MRQLMAGPPGLAMAPLQLPSLSLSLLRGGSATEGRRSVYTHRQRALEWVECGEEGDDGAIATERGDRSQGDQLGQALPEVCSFTTSGIVTRASLPFPCQDKEPKT

SEQ ID NO: 224052 - protein, 293 aa, Zea Mays
MQSEVNFLGRLSHPNLVRLLGYCWEDKELLLVYEYMAKGSLENHLFGSEPRKGGGGAVQPLPWSLRLRIVTGAARGLAFLHSSEKHVIYRDFKASNILLDTHFNAKLSDLGLAKDGPAGGSSHVTTRVMGTYGYAAPEYVATGHLYVKSDVYGFGVVLLEVLTGLRALDTDRPTAQHSLVDWAKPYLADRRKLARLMDPRLEGQYPSRGAQRAAQLTLRCLAADHKNRPSMREVVAVLEEIESMSSRAATRLDGSASPRPTPLRNGHSQRPGSSGSTLDWAGPAPAPSARVTR

SEQ ID NO: 224053 - protein, 199 aa, Zea Mays
MDAQVAYGFHQLRDEKPFLASGPLSNKLIYAGYTCKQGWFFTQCISDPELRGLRNIICLSIKRMDSSEWENIPVPSSVRAIVALNLHNYASGRNPWGNLKPEYLEKRGFVEAQSDDGLLEIFGLKQGWHASLVMVELISAKHIAQAAAIRIEIKGGYWHDAFMQMDGEPWKQPLSSEYSTFVDIKKVPYPSLIINGGDR

SEQ ID NO: 224054 - protein, 199 aa, Zea Mays; identical to SEQ ID NO: 224053

SEQ ID NO: 224055 - protein, 261 aa, Zea Mays
MHCIPPLPSAASLRRHRRPSQVLRLSLVSSPATSTHQGTGLRMQSLVRNVCRAGSRGAAARLLEAAAVHPGAAQPSSAVRHLRHPCGFARPIGVDQPKPVQRRTILRDGGRVPAAASGFGLCAKVLVATRGLSTAGNAAEVASDSDDSTSPAVEHPPRIKFKRPDKTARHIMNILNKEAVEKVRSERAIPDVQPGCIIQMRLQVPENKRRESTLKGIVIGRRNAGINTTFRLRRLVAGVGVESVFPLSWTGRKSGELSCIT

SEQ ID NO: 224056 - protein, 334 aa, Zea Mays
MPASRDDMMDLDGPLDNTFQRSLLPESFRAPFALMDPNFQDQFFDRVGSTDGVIREPLVSHPREVREIPIEVKDGDPQTGSSGQDVTGNESSNGPEVPETIIIDDVDGGLLSAPSVPHPIIPSNTSTVPTAPPLVHVNDYDEDIEEEMIRAAIEASKKDSEGLANIVEQGGQHQEEVNLRDHSSDKAGMETANGIVERQGLASEKAGTSRQPIDDESFQEEAEDVEEQPLVRRRSRRAPSEDNELPKIVHPGASPVLNNHQYNGDDFPSEWGGISSEEHDEAVMLEAAMFGGVPEGPTYPFSMPSHRTSTYYPPISHSPSPALTEQRLLREQQV

SEQ ID NO: 224057 - protein, 165 aa, Zea Mays
MDGGREQQAPPESQPGKNLIKIPSYQEVFGTGASTSSSKPPSYNPPVATSAAAAASSSSSSSGSFSQAFSFLKSSEFYSPPPPPPPQPTTTPRPTQASPSAPTPQSKNSILVSHRQRGNPLLKHIRNARWTFADVVPDYVLGQSSCALYLRSGTIFYIQTTCTIG

SEQ ID NO: 224058 - protein, 171 aa, Zea Mays
MPTSAKGQREDEVEPQHLGSILAQNHPVDGGTPQATHLIGGAVTVPATHLIGGTVMVETGHTLHMTEGDHTLLTAGMNHIPLTMAGDHTHLTTADGIVQGPHTATEDAGHLLFRHTTAGTESERSTSYSPKKGSKREPSRSRYSGKSRHSRESHSHSRSSYSRSVSRERSA

SEQ ID NO: 224059 - protein, 189 aa, Zea Mays
MPREISRSPPPFRRRGSPPLRYASRRNRRDRSRSPYASRRQKEAEFKLLEEELARRVEEAIRKNVEERLKSEEVKRDIEHRIEEGIRKLFDEVDAQLQKEKAVALYEARQKAEQERREREELDRMLEENRRKVEEAQRKEALEQQQKELERYLELERIQRQREEALRRKKMEEEEERANKLRLLGKNRG

SEQ ID NO: 224060 - protein, 218 aa, Zea Mays
MPREISRSPPPFRRRGSPPLRYASRRNRRDRSRSPYASRRKTRSPSPLWDRSNSPSPRRHRSPLSPRRHRRQRSRSTTSSLENNPSSPSHASEKINSSVKQRLEEEKKRRQKEAEFKLLEEELARRVEEAIRKNVEERLKSEEVKRDIEHRIEEGIRKSWIECSKRTGVKWRKHKERKLLSSSRKSWNDIWSWKGYKGKERKRCAERKWRRKKREPTS

SEQ ID NO: 224061 - protein, 135 aa, Zea Mays
MYFGLMGDGQPIGRYDDMWAGWCVKVICDHLSLGVKTGLPYIWHSKASNPFVNLKKEYKGIFWQEDIIPFFQNVTIPKDCDTVQKCYIYLSGQVKEKLGTIDPYFVKLGDAMVTWIEAWDELNPSTPAAANGKAK

SEQ ID NO: 224062 - protein, 694 aa, Zea Mays
MHADAETGEVYAQMTLQPLSPEEQKEPFLPIELGAGSNQPTNYFCKTLTASDTSTHGGFSVPRRAAEKVFPPLDFSQHPPVQELVARDLHDNEWKFRHIFRGQPKRHLLTTGWSVFVSAKRLVAGDSIIFIWNDNNQLLLGIRRANRPQTVMPSSVLSSDSMHIGLLAAAAHAAATNSRFTIFYNPRPSEFVIPLAKYVKAVYHTRVSVGMRFRMLFETEESSVRRYMGTITCISDLDSERWPNSHWRSVKVGWDESTAGDKQPRVSLWEIEPLMAFPMYPTAFPLRLKRPWASGLPMFNGGRSDEFARYSSLMWLRDGNRGAQSLNFQGLGASPWLQPRIDYPLLGLKLDTYQQMAAAALEEIRAGDHLKQISSLLPVQQPQNLSGGLDPLYGNPVLQQMQFQSQQSSLQVVQQGYGPNASDSGFLQNQLQLQKQQEPLPQQQQQALQQQSHQEMQHHLSASCHDIANVASGVSESGSASQTESSLLSGSSYQQIYDGNSGPGLHLHNGFHNCSSQESSNLLNLSRSGQFMASEGWPLKRLAVESLSGHELQPVQHKFEKVNHQSNVSHISSTLPPLSARDSYSAQASGTNDQSHLLSSSFAIHDGLTAVRSGGVGSGTDAITIASLRYNDMNLLPENPIATSSCLGESGTFNSLDDVCGVNPSQGGTFVKVCNLTYAVCSLFIKWHVKLPSW

SEQ ID NO: 224063 - protein, 220 aa, Zea Mays
MGASESLLSRQQLQQPRPQWADEITTVSEGRRDDADADPLVRRIRSLTIAPPLLSSQSEAEAESSLTDILVGKPSNSSATSGNLNPNVLAELFAMYREWQEENAKKISRKQDPTWNVLVQEEIENKIETADALAVKLLQRFNYCLTYMRSTSHNLAEVHPLQIEVGESKGRLTEVISNCDALCKRIAAEGPESLRSSVQPFMAARAEAEGSGSLDPKQES

SEQ ID NO: 224064 - protein, 320 aa, Zea Mays
MEQSSDGLPISQRRANSSTKHSSKSDEVAEDMLQSNIPHETVRLCQGVESEEIEGPPHKKIVQNFTESSSSKNKKHRWSSEEDEALKQMVKKYGTKNWRTIACAIPGRNANSCLSRWKYLLDPAINKEPWSQQEELRLIRAQQVYGNKWCKMVKHFPGRTNDALKEHWRSPMKRKLDSYLASGLLEHVPDLQDDVSFPQTQNNQSDIPKDCKAASDRNRFSSRLSTDPKLKQELTELDENGNTSARKSSDLFYAKAPDTHSAKISEMRMAKSQQCAGTRKKLAFLSTPVELKSVVPHETTKHCQDMEPEKTDGHAVLTQQ

SEQ ID NO: 224065 - protein, 224 aa, Zea Mays
MSCPHISGVVALLRSLHPNWSPAAVKSALVTTASVHDTYGFGIVSEAAPYSQANPFDYGGGHVDPNRAAYPGLVYDMGASDYVRFLCSMGYNVSAISSVAQQRETETCQHAPKTQLDLNLPSIAVPELRGRLTVSRTVTNVGSALSEYRARVEAPPGVDVSVRPSLLAFNSTVRRLAFKVTFRAKLVKVQGRYTFGSLTWEDGVHAVRIPLVVRTMVGRFYANS

SEQ ID NO: 224066 - protein, 402 aa, Zea Mays
MPREIITIQVGQCGNQIGMEFWKQLCLEHGIGKDGLLEDFATQGEQFVDDIMDMVDREADGSDSLEGFVLCHSIAGGTGSGMGSYLLETLNDRYSKKLVQTYSVFPNQVETSDVVVQPYNSLLTLKRLTLNADCVVVLDNTALNRIAVERLHLSNPTFAQTNSLVSTVMSASTTTLRYPGYMNNDLVGLLASLIPTPRCHFLMTGYTPLTVERQVNMIRKTTVLDVMRRLLQTKNIMVSSYARTKEASQAKYISILNIIQGEVDPTQVHESLQRIRERKLVNFIDWAPASIQVALSRKSPYVQTTHRVSGLMLANHTSIRHLFSKCLGQYEKLRKKQAFLDNYRKFPMFADNDLSEFDESREIIESLVDEYKACESPDYIKWGMEDPGEANVVAALDSKLVV

SEQ ID NO: 224067 - protein, 488 aa, Zea Mays
MLDVGMLNYTGDRLNFGLAAEQAKSEGYKMEMVIVGDDCALPPPRGIAGRRGLAGTILVHKVAGAAADAGLSLAEVAAEAKHASEVVGTMGVALSVCTLPGQITSDRLGPRQMELGLGIHGEPGVAVVELQPVDVVVEHVLKQILSQETQYLPVTRGCNAVLLVNGLGATPIMELMIAARKAVPELQLVYGIAVDRVYTGTLMTSLDMAGLSITIMKSGESILKRLDAPTKAPAWPVGSEGNRPPAKFPVPLPPSPSMKDDEILAPSQELSKQGCILEAVIEASATEIINLMDSLNEWDSKVGDGDCGSTMYRGATAILEDMKKRYPMNDAAGTINEIGATIRRVMGGTSGILYAILCKAAYASLKQSSTVTANKWADALEASIAAVSKYGGASAGYRTMLDALIPASAVLKQRLEAGDDPVTAFIASSEAASAGAESTKQMQAKAGRSSYIAPDLLASIPDPGAMAAAAWYRAAALAVKNKVHGSKS

SEQ ID NO: 224068 - protein, 466 aa, Zea Mays
MEEPTESRPAGAEDLANGAKDPEGPPPEVEEEEVEEPPRSATAKQEEAKEVLGSEGSRPFTMRELLGELREDGETAVGGSTARSAFGDGNGVGSADAEGSSYSVTGVDEEGRSRQRILSFAAKRYVNAIESNPDDPDAYYNWALVLQESADNVDPNSSSSKDALLEEACKKYAEATRLSPTLYDAYYNWAIAIADRAKMRGRTKEAEELWKQAILNYEKAVQLNWNSPQALNNWGLGLQELSAIVPARDKQTIIKTAISKFRAAIQLQFDFHRAIYNLGTVLYGLAEDTMRSGKPDVSPNELYSQSAIYVAAAHALKPNYSVYRSALRLVRSMLPLPYLKVGYLTAPPANNSIAPHGDWEVSQFILNHEGLQQADASDQPPSQSPGHLDRGRKPVRINVADIVSVSACADLTLPSGAGLCIETIHGPTFLVAHSWEALDGWLDAIRLVYTIFARGKSDVLAGIITG

SEQ ID NO: 224069 - protein, 222 aa, Zea Mays
MQQLAKELEVVIPVSFFEEANNAHYNSVAIIDADGADLGLYRKSHIPDGPGYQEKFYFNPGDTGFKAFKTKYATIGVGICWDQWFPECARAMALLGAEILFYPTAIGSEPQDCNLDSREHWKRVMQGHAGANLVPLVASNRIGRETVDTEHGKSSITFYGNSFIAGPTGEIVKLANDKDEEVLVAEFDLDEIKSIRHGWGIFRDRRPELYKVLLTLDGEKQS

SEQ ID NO: 224070 - protein, 222 aa, Zea Mays; identical to SEQ ID NO: 224069

SEQ ID NO: 224071 - protein, 321 aa, Zea Mays
MRRKLLQFPSLVAQHALRGAPTPRFQPQPHHHRFLHSPSAPTSASPSSSPSAHLIWNRLSGSTGISPLPRTAADVAAAARTAASRWLATARGARSLDLFSLPRWRRASGRQFSPSPFLQGATWASWMESADGAVWMLIGANVAVFLLWRVADPGFMRKHFMISLDNFKSGRLHTLLTSAFSHAEFNHLFANMFGLFFFGSSITNVFGPAFLLKLYVGGALTGSVFFLLEKAFLAYRKQDYVGWDTSRAAELGASAAVNATMLLQIFLYPKGLVYIYFVIPVPAALMGAGLIGADLVRLKVHLALERELSLLLSRMNIACAI

SEQ ID NO: 224072 - protein, 166 aa, Zea Mays
MIKFKKGELTNLESWNPVKMLITDTRVGRNTKALVAGVSERASRHPDAMASVFHAVNSISEELSSIVELAAEDEIAITSKEDKLAELMEMNQGLLQCMGVSHSSIETVLRTTLKYSLVSKLTGAGGGGCVLTLIPTCILFYISPGCIFSFMVLYKINTIQLMCDFC

SEQ ID NO: 224073 - protein, 91 aa, Zea Mays
MATRRTVAASVTAQRPAWAAVARRMEGVSRYFSDKASGRLLSEEERAAENVYIQKLEKLRRKEDKAKAEAAKRAAAAARGDTKNGEEAHPS

SEQ ID NO: 224074 - protein, 179 aa, Zea Mays
MQPILGHVLWQTHTHTHTHTHTHTHTHTSFAVATKLYTGRQAASFLQSLVQKPEEMASPNVTFLAFFVALALSALHTDAAAAAETLHHRSDTWCVAKPSTQEAALRGNLEFACSESDCGAIQGTGGCAQPDSLLSRASVAMNAYYQARGRNSWNCFFNGTGIITITDPTLGFFSLDPLL

SEQ ID NO: 224075 - protein, 670 aa, Zea Mays
MFTNQSTVKPDNVVQKFVTDAQHIPFSKGKKETVRERWVTTNGIQDSVELTKDRVMQAPMSADMCPMPMTHKKKAATTRDFFGHKRMVKAKALGHQQRMFASGSKSKRDDEVASNLKIHDIFREIVLNERNLELYLNSSSGLPSVRCQRQYRYMNADARSRFKMLCRMFEFVCRTLVQTMEQRSLKMRIDNEAAKVMKALPGFTKHGPIVGQVPGVEVGDEFLYRAQLAIAGLHSEYRRGISTTTYRNGMLIAISIVASGGYPDELGCSGELIYTGSGGKSAVKKKDEDQKLKCGNLALKNCIKTKTPVRVIHGFKCRNTDRGSHSGAKLIPKYTYDGLYLVVDFWMDGKPGSRVFKYKLKKIHGQPELPMHIAKRLKSFKSRPGLCMTDISQGKEATPICVINTVDDVQPGPFQYTTRIRYPFGLTEKHNQGCDCTNGCSDSESCACAVKNGGEIPFDLSGAILNEKSVIFECGSSCKCPPSCRNRVSQHDMKIPLEVFRTTKTGWGVRSLWSIPAGSFICEYIGEVQHQKAADKRRNNNYLFDVGLNYDDENVSSVLLSNVSGLNSSSSCSQAMEDVRFTIDASVYGNIGRFINHSCSPNLQAQNVLRDHGDKRMPHIMFFAAETIPPLQELTYDYNNSEIDRVQGVNRRMKSKVCQYSSSLCRRRFY

SEQ ID NO: 224076 - protein, 106 aa, Zea Mays
MPSCLKKSCKRLLAPQVSGDGGKRAVPLPTRGPALLGFVRSNFLPLALIGGIILGLLDPTLGCLAHKYSLSKYSTFGIFVISGLTLRTRELGAALEAWPAGLYGLV

SEQ ID NO: 224077 - protein, 182 aa, Zea Mays
MITHHPSLIRPSVLTLRADVLRRRPTLHAVASAPPPRLWSLRATTGGTSPVSGDGGKRAVPLPTRGPALLGFVRSNFLPLALIGGIILGLLDPTLGCLAHKYSLSKYSTFGIFVISGLTLRTRELGAALEAWPAGLYGLFLYFYWSSMEHPAPAISLLMVSYVLLHANNTIKWSHTNTACWW

SEQ ID NO: 224078 - protein, 52 aa, Zea Mays
MRVSLSSCGEDCIYARVALLIIIIVRLLLEEIGPSCSLFPASGWLPGYQHLF

SEQ ID NO: 224079 - protein, 93 aa, Zea Mays
MLNIVTVRCGHCTSLLSVNLRGLIQSLPVQNHHYSQQQENFTVQNMGFTENYPEYAPSYRMPTTLSAKGDLDHMLHVRGSNDCGFFVMSYMKS

SEQ ID NO: 224080 - protein, 823 aa, Zea Mays
MATTTSPPLQLASASRPHASASGGGGGGGVLLAGGSGGGVAPGWGRGRLQRRVSARSVASDRDVQGPVSPAEGLPSVLNSIGSSAIASNIKHHAEFAPLFSPDHFSPLKAYHATAKSVLDALLINWNATYDYYNKMNVKQAYYLSMEFLQGRALTNAIGNLEITGEYAEALKQLGQNLEDVASQEPDAALGNGGLGRLASCFLDSLATLNYPAWGYGLRYEYGLFKQIITKDGQEEIAENWLEMGYPWEVVRNDVSYPVKFYGKVVEGTDGRKHWIGGENIKAVAHDVPIPGYKTRTTNNLRLWSTTVPAQDFDLAAFNSGDHTKAYEAHLNAKKICHILYPGDESLEGKVLRLKQQYTLCSASLQDFPSKVAVQMNDTHPTLCIPELMRILMDVKGLSWSEAWSITERTVAYTNHTVLPEALEKWSLDIMQKLLPRHVEIIETIDEELINNIVSKYGTTDTELLKKKLKEMRILDNVDLPASISQLFVKPKDKKESPAKSKQKLLVKSLETIVDVEEKTELEEEAEVLSEIEEEKLESEEVEAEEESSEDELDPFVKSDPKLPRVVRMANLCVVGGHSVNGVAEIHSEIVKQDVFNSFYEMWPTKFQNKTNGVTPRRWIRFCNPALSALISKWIGSDDWVLNTDKLAELKKFADNEDLHSEWRAAKKANKMKVVSLIREKTGYIVSPDAMFDVQVKRIHEYKRQLLNILGIVYRYKKMKEMSTEERAKSFVPRVCIFGGKAFATYIQAKRIVKFITDVAATVNHDSDIGDLLKVVFVPDYNVSVAEALIPASELSQHIRWCKCGNQRGGWRGKLFPFWCRGT

SEQ ID NO: 224081 - protein, 221 aa, Zea Mays
MSSPSFELEKPCYCNLKVVNNSEHHVAFKVKTTSPRKYFVRPNASIVQPWDSCTITITLQAQKEYPPDMQCKDKFLIQSTKVAASTDMDEIPPDTFNKETDKVIEEMKLRVVYTLPSGGGSDDSSVSSLGSRSFKAASDDLMMLKNASIEEIQTIQRVKEERDNMLQQNQQMQRELDVLRRRRSRKGDAGFSLTFAAFAGLIGVLVGLLMSLIFSSPPVDA

SEQ ID NO: 224082 - protein, 375 aa, Zea Mays
MASTQAEAEAGAPAPPEAAEAKEKGKQGGVLGRVWRALFGGREDFEKRLQYLSKEEAAVHARMRRRTQFSRRAVRNLIVLSVLAEVLAVVYAIMTTRNEDLTWQMRAIRVLPMFILPAVSSVIYSTVVNFTRMFEQKDQKTLEKLRAERKAKIDELKERTNYYLTQQLIQKYDLDPAAKAAAASVLASKLGEETGLKVHVGEEPKLDAAVARSNDVEIVPSDGLRNRKQPSARGSRTGSPTSHTPAQGTETNLPPAPASAGLETAPAPVVVEHHQGSGASDGGGWIAKIAALLVGEDPSQSYALICGSCHMHNGLARKEDYPHVTYYCPHCHALNTSKQSMGQYSGSNSGRSYPRKERQTSNKWRQVDGSYDLYC

SEQ ID NO: 224083 - protein, 85 aa, Zea Mays
MHNGLARKEDYPHVTYYCPHCHALNTSKQSMGQYSGSNSGRSTPVVLADGLSTSSSVQETELSNLTTLQELPEEGKTDKQQVEAS

SEQ ID NO: 224084 - protein, 144 aa, Zea Mays
MVEASPESGAAATGGASSTAAVRKGKSCKGCLYYSSVLKSRGYNPICVGIPRSIPQVPNYVVDEPKEEATAQGHDLRRFRYGCAGYSMFVDNRDGQGGESEGKTLLPYCRGLELLVDSRLVERKPSATEQAPAHVAKDVSSCLL

SEQ ID NO: 224085 - protein, 200 aa, Zea Mays
MVEASPESGAAATGGASSTAAVRKGKSCKGCLYYSSVLKSRGYNPICVGIPRSIPQVPNYVVDEPKEEATAQGHDLRRFRYGCAGYSMFVDNRDGQGGESEGKTLLPYCRGLELLVDSRLVERKPSATEQAPAHVAKDATIRSHQQGQQRPQNLSRQEFLDRFKRSAGLVASGVAKNLNKTANYIKENIQDMYTDRRPPK

SEQ ID NO: 224086 - protein, 456 aa, Zea Mays
MEHRAAAPDVIVQVNSAAVAAVDERISTCQITEEEGGIVGHEQVPVGCLARRTFSQSYRTRPRNPLEFTGWQLALLAYQSLGVVYGDIGTSPLYTFSSFALPDPGTADILGILSLILWTLTLVSLVKYVFIVLHADDHGEGGTFALYSLLRQHVNFSGKSVPVPVTRLASDANLRFHSRKSSQQPRMLEFLEGSAMAQAVITYLVLVGTCMVMGDGALTPSISVLSAVQGIQSRSSSIKQGHVVLLCVVILVILFLFQQYGTSKVGFTFSPIMLVWFALIASTGLYNIIKHYPPMAYSCLVYPSLILAYAGQAAFLIKNPSKLSTTFYSSVPEPLFWPVFVVATLAAIVASQALISASFSIVRQSVALGCFPRVTMKHTSKKYEGRVYSPEINYFLMVACILITVGFKGGPEIGQAYDCTGWLGSICNNCILPYNHTLLDLRAKQEAGIRGEQPDG

SEQ ID NO: 224087 - protein, 789 aa, Zea Mays
MFAIRSTKCPVAFVGVAGTLVVLITAVHVFMVPILPASFYYFGSRSSISHPKNVLPAVEVVDSRLKGCFPSDSYGAVAFRGAPWKAEIGRWLAGCHANSSSVDVTEVSLLRQAMGAKRCVKDCSARGVCNYNLGECRCFHGYSGKGCEEVLNLECNLPSSPEWPVGQWIVSICAAHCDKTRAMCFCGPGTKYPDRPVAEACGFKTILPAKPDGPKLTDWKTPDLENILTTNSSKLGWCNVVPEDAYSSKVKFKEECDCKYDGLWGQFCETRAECSCINQCSGHGHCRGGFCKCDSGYFGIDCSIPSAYSLAYDWPSWLQTPVNLPDLKTLNSTTIGVKAVVQKKRPLIYVYDLPAEFDSHLLEGRHYRFQCVNRIYDDMNRTIWTQQLYGAQIALHESILASPHRTLNGDEADYFYVPVLDSCLITRSDDAPHLLLPRDLRRRSYHALEYYRMAHGHIAQQYPYWNRTSGRDHIWFFSWDEGACYAPKEIWKSMMLVHWGNTNTKHKNSTTAYWADNWDDIPLDKRGNHPCFDPRKDLVLPAWKEPNPGAIWLKLWARPRNNRTTLFYFNGNLGSAYEGGRPEDTYSMGIRQKLAAEFGSTPNKQGRLGRQHAADVTVTYLRTEKYYEELASSVFCGVLPGDGWSGRMEDSMLQGCIPVIIQDGIFLPYENVLNYNSFAVRIQEDDIPGLISTLRGINDTQVEFMLGNVRQMWQRFFYRDSILLEAQRQKKLFSEEAPWSVEVSKLPDDDDVFATFIQVLHYKLYNDPWRQDFLQTKDTRLPNICSRTS

SEQ ID NO: 224088 - protein, 62 aa, Zea Mays
MLLSNAWSGSMHLTFIVTRSFLRLSSYMWCSIFCRLYWSRMASFQLCYLIYSSWWQFLIITT

SEQ ID NO: 224089 - protein, 299 aa, Zea Mays
MSSSSSSSSSSAATVFPRSPQLPPPVLVENGLTPLHQLTPVAAAAPAAEQLCYVHCYFCDTVLVVSVPTSSLFKTVTVRCGHCSSLLTVDMRGLLFPGTPTDTVAGAAPPPAADTSTTTTTITTAPPPANSVNNGQFHLPHSLNHPHHQSLLVDEISSAANPSLQLQLEQHGGLGGLILGGSRNTAAPPPPQPPAAGKGAKEPSPRANPAVNRRTKSNASRLAIPTSRTGRPSARRPRTGRTFHISTLDSCRITRGSRRQACYLRITRERTGFLRKGSTRRRRRPQLMRQPTWGLLHTN

SEQ ID NO: 224090 - protein, 283 aa, Zea Mays
MSSSSSSSSSSAATVFPRSPQLPPPVLVENGLTPLHQLTPVAAAAPAAEQLCYVHCYFCDTVLVVSVPTSSLFKTVTVRCGHCSSLLTVDMRGLLFPGTPTDTVAGAAPPPAADTSTTTTTITTAPPPANSVNNGQFHLPHSLNHPHHQSLLVDEISSAANPSLQLQLEQHGGLGGLILGGSRNTAAPPPPQPPAAGKGAKEPSPRANPAVNRPPEKRQRVPSAYNRFIKWVPCMPAVSCYYIFHAVRYSVQVVWLAGGSLIGHGNACRPPRWQQEEGRGRRP

SEQ ID NO: 224091 - protein, 482 aa, Zea Mays
MNVLTRVSAVLTNAPIMLNVDCDMFANNPQAALHAMCLLLGFDDEVHSGFVQAPQRFYGGLADDPFGNQMQVIFEKVGHGIAGLQGIFYCGTGCFHRRKVMYGVPPGSGTGATKALAAADSPSYKELQKKFGSSKELIESARSIITSKEAPAAVADLTSRVEVAKQVSACSYETGTSWGQEVGWVYGSMTEDVLTGQRIHAAGWRSALLSPDPPAFLGGAPTGGPASLTQYKRWATGLLEIVLSRHNPFLLSASKRLRFRQCLAYLVIDVWPVRAPFELCYALLGPYCLIANRSFLPKASEPGFVVPLALFLAYNAYNLGEYVDCRLSARAWWNNQRMQRITSSSAWLLAFLTVVLKTVGLSETVFEVTRKEQQQQQGSPDGDGADADPGRFTFDSSPVFVPPAALAMLSVVAVAVGAWRAVTGGGGGPGVGEFVCCAWLLLCFWPFVRGLVGGRGSYGIPWSVRIKAALLVAAFVHLSTRK

SEQ ID NO: 224092 - protein, 964 aa, Zea Mays
MGSSSRIFEYFVVCGLGPEIRSLDGIKGFHGVEEMYMSAFLDQFPPSNHALYPPPPPQLPTCVLPAGVRIYSSGLDTDDVSTYPRSYPIVLTEGDGSKIYVSCIAFRDPICEDIIEAYQIPANSFADKCICLVSHSPSFQVLRDALEEIFVLCFSPSGCSKPLWDIISHMVSHVTLPTPGKNRVLFAIENCLLSAEAPPKEWLPHADISFQPLVQCLDVDKLILLFTAVLLERRILLRSNKYTLLTLVSEAICHLIYPIRWQHVYIPIIFSSGVDYIDAPTPYMMGLHSGVDTSAVTMDGVVVVDLEYNRITITEEIPPIPETEHNFLRVEILKLLQPNVMGIDFMKINLANMGDLRAGTKSWSQEHDFQLRLIFLRFFAQILSGYRNFIDTTSATGFNSQAFLKKRSRATNQPVDSMSMIMQFLETQGFLDYLERCNTAEENAHNLLDKLQDATGRGQNPLTIFPSQVSDPEIITIANPEIEGLDNRHCYKRFPANARTEEQEEKRKSILALASGASKQVPSSPSIRVNGGPKAESLSPRERAAERERMVLDIKVKLQGLWLRLLRLGATEDPLSSFEYGTILALIESDAEGIGGSGFVECIREHIHSGWQCRLTDEQFIAVKELLKMAITLANSRNDLATIRDALEVSAEMYRKDPNNVQDYVQRHLLSLSVWEELRFWDGYFEYLMENCSNKSANYVTLVTAQLILMATHMAGLGLPDIDSWNMIEKIAERNNLGYKQLIKLRALLTHLQQLRIGYWGVATGKSQPLQSYGMASPHAIDVIDESQQPAEASGLGRSWVQSMFSRDRSLRASSFNRASDGNAVAATGKTEISAAQKKTQTNMRTLRGHTGAITALHCVTRKEVWDLVGDREDAGFFISGSTDCTVKIWDPSLRGSELRATLKGHTRAIRTISSDRGKIVSGADDQSVIVWDKQTFKLLEELKGHEAPFCPDALRRTCPYCIP

SEQ ID NO: 224093 - protein, 712 aa, Zea Mays
MTAAAVRFESHRLTHPSTSPPPESMVERRYTEEEEALEIKSLRRIIAAYANYQDAAERDVERYERSFKMLPTAHKKLLFHLGLKYQSLRWCISMNASFIMKMLEAFEPPFDMSQSNLSLDEQHDSPKEYTKRHEPSRETDNNKGGEDHMAGCSQPVGNMGMSQGAGIACNGDKNTGAAAYFQDKDVSASSAIENVALRHCTASSLKLNVPPIDVDKVRCIVRNIVRDWGDEGQKERDECYKPILEELNRLFPNRSDQRPPSCLVPGAGLGRLALDISSLGFVSQGNEFSYYMLICSNFILNHTQEANEWSIYPWIHSNCNSLSDNDQLRPVSFPDIHPSSAGITEGFSMCAGDFVEVYSEESQESAWDAVVTCFFLDTAHNIVEYIEIISKVLKDGGVWINLGPLLYHFADSYGPDDDMSIELSLEDVKKVAYHYGFTMEVEKMIETTYTANMKAMMQLLDIRPDWLYMGWVSATFESSVQKKLRREAEKTSCGRWPAEAQSFAGDLVAGLPPNVLATIAAVEEDAGLFFVSFSFSTCRAPAPAVKVKFFSLCIVMNKVMWSLLVGQELWLSFQDHAECTELGQSLADFGKAIKLLGSCEGDLMEKVFSEVGSKSEMLSIKLQREAIRADGQTQLSHEIALELSQRSAAAGLRPIGAVVFMQRGVLKVCLRTTDSTVNTSEIAKAYGGGGKRSSSSFTLRMDEFNIWTSVNS

SEQ ID NO: 224094 - protein, 152 aa, Zea Mays
MNKVMWSLLVGQELWLSFQDHAECTELGQSLADFGKAIKLLGSCEGDLMEKVFSEVGSKSEMLSIKLQREVFALPPPAFVQICLRAFLGGGGDGGATGPTQSAAHTIGADGQTQSVLKVSYNRFYKCLIFYTKYFYYFYHTIRQSEQMDRHN

SEQ ID NO: 224095 - protein, 152 aa, Zea Mays; identical to SEQ ID NO: 224094

SEQ ID NO: 224096 - protein, 223 aa, Zea Mays
MFVLNFIFQKNICLKHVGRPGAVVRVAIFFGVGGLSRLITSLDPTYVGDPSTGSALYLALTLRGTLAQRRSIRTSIFLVFSTVYQDELHSPIFDSLELGQSLADFGKAIKLLGSCEGDLMEKVFSEVGSKSEMLSIKLQREVFALPPPAFVQICLRAFLGGGGDGGATGPTQSAAHTIGADGQTQSVLKVSYNRFYKCLIFYTKYFYYFYHTIRQSEQMDRHN

SEQ ID NO: 224097 - protein, 276 aa, Zea Mays
MFVLNFIFQKNICLKHVGRPGAVVRVAIFFGVGGLSRLITSLDPTYVGDPSTGSALYLALTLRGTLAQRRSIRTSIFLVFSTVYQDELHSPIFDSLELGQSLADFGKAIKLLGSCEGDLMEKVFSEVGSKSEMLSIKLQREVFALPPPAFVQICLRAFLGGGGDGGATGPTQSAAHTIGADGQTQSVLKAIRADGQTQLSHEIALELSQRSAAAGLRPIGAVVFMQRGVLKVCLRTTDSTVNTSEIAKAYGGGGKRSSSSFTLRMDEFNIWTSVNS

SEQ ID NO: 224098 - protein, 89 aa, Zea Mays
MLVGNKVDKDDERMVTKEEGLAFAEEYGCLFLESSAKTRENVEKCFEELALKILEVPSLLEEGSSSVVKRNILKQKQESDAKNGSGCCQ

SEQ ID NO: 224099 - protein, 389 aa, Zea Mays
MVIDLLGPSLEDLFNYCSRKFSLKTVLMLADQMINRVEYMHQKGFLHRDIKPDNFLMGLGRKANQVYIIDYGLAKKYRDLQTHKHIPYRENKNLTGTARYASVNTHLGVEQSRRDDLESLGYVLMYFLRGSLPWQGLKAGTKKQKYDKISEKKMLTPVEVLCKSYPSEFISYFHYCRSLRFEDKPDYSYLKRLFRDLFIREGYQFDYVFDWTILKYPQIGSNPRTRAGERTSGAAGPSMDRIEKTPGEASGRRNPSGPVNQSDSYAQRPRETVSMSLKEIMHSTDRSGERTVERPRTSSRTGSASRRAVASSSRPATSSMEPSEQQYSRASRLFSSNSGSRPSSAQRVNPAPGESRATSLSRAAVARGSRDEPLHRSLELLSLGSGKRK

SEQ ID NO: 224100 - protein, 287 aa, Zea Mays
MWEFARKDPRKPVFAAKVAVALALITLLVFLREPSDIASHSVWAILTVVVVFEFSIGATLSKGFNRGLGTLIAGGLALLVAELAAQMGKYDMLVLIISTFVVAFCATLTKLHPKMKPYEYGFRVFLLTFCYVTVSGYNTGEFTATAISRFVLIALGAAVSLGINICIHPIWAGEDLHLLVARNFSGVAKSLEGCVDGYLACMEYERVPSKILTYEASDDDPVYSGYRAAVEASAQEETLLGFAIWEPPHGPYKMVKYPWKNYTKVGGTTGEQKGFLCGASQSGPRRC

SEQ ID NO: 224101 - protein, 213 aa, Zea Mays
MPQRSEAGTAGEGDEEQRLRAALRHLQAEAGVLERLVYKHRNQHRGAAYFQYLLKVRRDLKLLLGAGLAEVLNAVFPVLACRKPANTILVPNKQSKKKPVANHSHHQRLLGVARLLSQMLLDVVSIYNKVTDLTERKQAVKISISGVQAFREYYPSMNDACTVLECVWIKDKFVLHEKVKDISQETQVENQKCCGPESTVQYETIALISEDST

SEQ ID NO: 224102 - protein, 227 aa, Zea Mays
MRRLWRWYQQCLAAHPVRTQVVSSGILWGLGDIGAQTVTYYSASPDRRGHDSSPPDPEDKDNKDNKEFKVDWKRVGITSSFGFAFVGPVGHYWYEYLDRIIRRRFQPNTFKFVASKVAADGFLFGPLDLLLFFSYVGLGQGRSIEQVKEDVKRDFIPALVLGGTIWPAVQIANFRFVPVRYQLLYVNLFCLLDSCFLSWIEQQGDASWKRWFTSFQKIEDQKVPVQE

SEQ ID NO: 224103 - protein, 178 aa, Zea Mays
MGLAMGRLLGWKKEAQIALLGLGGAGKTAILHKLKLGHAITTGPTIGFNSETLEYNGISFRVWDVGGQGELRPLLRHYLYGVQGVVFVVDSSDREWILRAKDLLNIILDEDQFRNRDLALLVFANKQDRPNVMSAAEIADEFGLPSRLCNRRWHIQSSSAISGEGLHEGMAWLCTNIR

SEQ ID NO: 224104 - protein, 436 aa, Zea Mays
MAMAKAWKLQAVIHPFAEHMVYYVLFAIPMLSTLYMGNASVLGIVLYIAYIDFMNNMGHCNFELVPRWMFQLFPPLKYLMYTPSTMDKSSDQLYETSLRGAEETPGLVHLTHMTDLQSVYHLRIGFASVASRPSATGAMWWYMWVLWPVAWLSMALAWAYGSSAFVVERIKLGKLRMQTWAVPRYNFQYGLSWERESINGLIERAILDADARGVKVLSLGLLNQAKQLNGGGELFRHRYPKLRVRLVDGSGLATAVVLRSIPRDAKQVLLHAGPSKVACATAAALCERGVQVVMNPNKEYDMLKSQIADSKASYLERRSDNHHTPQVWLVDSIDDEEQKMAPKGAVFVPISQFPIKKIRKDCTYLSTPAMKIPETMQNIHACENWLPRRVMSAWRIGGILHALEGWTVHECGDAMVHADKAWSAAIRHGFVPLTKA

SEQ ID NO: 224105 - protein, 202 aa, Zea Mays
MAGEGNGDEGWRRSGIEVSALQFGYDGQPPLFARFNLCVAPGSRCLLVGANGSGKTTLLKILAGKHMVGGRDVVRVLNGSAFHDTQLVCNGDLSYLGGSWSRTIGSAGDVPLQGDFSAEHMIFGVDGVDPVRREKLVDLLDIDLQWRMHKVSDGQRRRVQICMGLLHPYKDKNSPGHSTVSYFFLVMSDKAELVIYLFILVC

SEQ ID NO: 224106 - protein, 250 aa, Zea Mays
MIIWCPALGILGVEKTASQQEIKKAYHKLALRLHPDKNPGDEEAKEKFQQLQKVISILGDVEKRALYDETGITDDDALVGEAANNLQEYFRTMYKKVTEADIEEFEAKYRGSDSEKTDLKELYTKYKGNMNRLFCAMICSEPKLDSHRFKDIIDEAIGEGELKSTKVYEKWAKKISGMEPPTNPLERRVNAGLSGKNSSTPSSRTSCPSVTPRRAARSPRKKSLSRRNRGWRAEGPRGASDAAASLLALC

SEQ ID NO: 224107 - protein, 299 aa, Zea Mays
MDRYQRVEKPPPEPAAIGENEVRITTQGLVRNYVTYATSLVQEKQVKEIVLKAMGQAISKAVAIAEIIKKRIPGLHQDTIISSVSITDVWEPIEEGLVPLEMTRHVSMISISLSPKEHNKNSPGYQAPLHSDLKPQRYQQPQQYQQYQPRQHQVQTDSYGRGRGRSRGRGRGWGTRGGYGGGYGGYEYDNNQVGYGGYEHHGGYGHQGGYGNQGGYGHNQGGYGHDQGGYGGYGYNQENGGWNYNRNRGGGGRGRGNWGYGGPGYDRGGRGAGGPGGRGYVRGRGRMGGGRGRGNQNYY

SEQ ID NO: 224108 - protein, 220 aa, Zea Mays
MGQQRTLVYSFVARGTIVLADHAEVSGNFASVAAQCLQKLPANNNRFNYNCDGHTFNYHIYDGFTYCVVATESAGRQLPVGFIERVKEDFSKKYSGGKAKNASANGLKREYGPKLKEHMRYCDQHPEEIDKLAKVKAQVTEVKGVMMQNIEKVLDRGEKIELLVDKTEDLRSQAQDFRQQGTKIRRKMWWENMKMKLIVFGIVVALILLIVLTVCKDLNC

SEQ ID NO: 224109 - protein, 164 aa, Zea Mays
MQVLLDDTTYCVVATESAGRQLPVGFIERVKEDFSKKYSGGKAKNASANGLKREYGPKLKEHMRYCDQHPEEIDKLAKVKAQVTEVKGVMMQNIEKVLDRGEKIELLVDKTEDLRSQAQDFRQQGTKIRRKMWWENMKMKLIVFGIVVALILLIVLTVCKDLNC

SEQ ID NO: 224110 - protein, 158 aa, Zea Mays
MAGASLLVYQLVIYRWVHRILGTVNSARIASAVSILVLATYPFMTYLSGVKLSLALCSAAMMRSALAITVTTGISLLQNNAVCQEQRGTANGISTTAMSFFKSIAPVGAGALFSWAQKRQDVAFLPGDQVVFMVLNLVQLLGLISTFEPFLVLPALPE

SEQ ID NO: 224111 - protein, 175 aa, Zea Mays
MGISRPLALLLALLIAVAGATAEEPVVAADSVAGAVEAAAALRVEEAAEAAALRAELEQLRAKISALESDIAVRSLELKNKDDVIVNLEKAIAEKSKAITSMQGEIASLQAKGSLAAEEQANKANAKAVELEKQIDKLKKDIQAQSSQKAALESRANDAENKVEKLNEKLNTVSA

SEQ ID NO: 224112 - protein, 535 aa, Zea Mays
MASSPQPPPPFAAQNPTAQGSGQGPPGSGVGALPGAFANLQISRGAAPPPGAPRGLTPQQAPPTLAARPGPPPSAARPAFPGSPPAPPFVRAPTPSTSASPPFGGQPGVMSQPPPPFGGPPGASSQPPPPFGVPPGVVSQAPSLFGGPPATASQASSPFVGHSVAASQAAPFGAPPVAGSHPPPFGGPPGAGPQPAPPLRQTFAGQPGPMAAAAAWTQPPPPSFGAPQQPPPPFGSRPAGQPLFATQSAPAAQQLPFMGPPRVNAPAFGPPSWQTQGAGSGAMQPPLRMPGIPGSMQPNTLGPPGTPTIPYSPHAGTQVSTPSKIDPNQIPRPMRESSVIIYETRQGGQATIPPAASSEFIVKDTGNCSPRLMRCTVNQIPCTGDLLTTSGMPLALMVQPFSLPHPSEEHIQLVDFGEMGPIRCSRCKAYINPFMKFVDQGRHFICNLCGFRNDTPRDYMCNLGPDGRRRDADDRPELSRGTVEFVATKEFLVRDPMPAVYFFLIDVSMNAIQTGATAAACSAISQAISDLPQTS

SEQ ID NO: 224113 - protein, 132 aa, Zea Mays
MAPVSALAKYKLVFLGDQSVGKTSIITRFMYDKFDNTYQATIGIDFLSKTMYLEDRTVRLQLWDTAGQERFRSLIPSYIRDSSVAVIVFDVASRQSFLNTSKWIDEVRTERGSDVIIVLVGNKTDLVDKRNF

SEQ ID NO: 224114 - protein, 310 aa, Zea Mays
MAAPPEGNVRLGEGWDEDDVLEPQPLEVIAPDVKSKKRNPAPGVRVVGRRIYDPENGKTCHQCRQKTTDFAAACKQVKKKGPCPVKYCLKCLLNRYGESAEEAAGKEDWICPKCRGICNCSFCRKKKGEMPTGIMAHIAKASGCTSVHDLLKKGSDVVSAAQAILKVNGSDKGTKRSRGTDAAAEVATEKDVNIGIDINTVIADEGDENIGVDLNSLPSVDTKKRQKRQKLKHRTKKDPADATSHGVNTEPLQMDGNLDFLNSKTVRPRGTPVTKIAGAELDDEDTGAAIQFIEFCRAFTEMKGSELKEC

SEQ ID NO: 224115 - protein, 691 aa, Zea Mays
MALKVFLGHNMELFLKWHLFWPLSSLAFIFSALPPHSRRHLAWEAYITVASFLLGALCSGIAGFVGMWVSVRANVRVSSAARRSARESLQIAVRAGGFSAIVVVCMAVFGVAILYSTFYVWLGVDSPGSMKVTDLPLLLVGYGFGASFVALFAQLGGGIYTKAADVGADLVGKVEQGIPEDDPRNPAVIADLVGDNVGDCAARGADLFESIAAEIISAMILGGTMAQRCKIEDPSGFILFPLVVHSFDLVVSSVGILSIRGTRDSGLISPIEDPMAIMQKGYSVTIMLAVLTFGVSTRWLLYTEQAPSAWLNFALCGLVGIITAYAFVWISKYYTDYKHEPVRLLALSSSTGHGTNIIAGVSLGMESTALPVLVISVAIISSYWLGQTSGLVDESGNPTGGLFGTAVATMGMLSTAGYVLTMDMFGPIADNAGGIVEMSQQHESVREITDVLDAVGNTTKATTKGFAIGSAALASFLLFSAYMDEVASFAQMPFKEVDIAVPEIFVGGLLGSMLIFLFSAWACSAVGKTAQEVVNEVRRQFIERPGIMDYKEKPDYGRCVAIVASASLREMIKPGALAIISPMAVGVVFRILGHSTGQPLLGAKVVASMLMFATVAGILMALFLNTAGGAWDNAKKYIETGALGGKGSESHKAAVTGDTVGDPFKDTAGPSLHVLIKMLATITLVMAPIFL

SEQ ID NO: 224116 - protein, 258 aa, Zea Mays
MSTPEFKLDTNAPTVSWADHKNASEATSTSQVKSLYVKNLPKTVTQEQLKKLFEHVGEITKVVIPPAKSGHENRYGFVHFKERSMVMKALKNTERYELDGQLLDCSPAKPPADKKDDTGSSPTAKGRPLPPSYAPLGYGLAGAYNPLGKGLAGAYNSPGNGLAGAYGVLSAHAAQPMLYAPGASPGSTMIPMVLPDGRLVYVPQTAGQQPLHVTSPLPQQGGRRFGGGGGSSSGGKRQRGDDRGSNSNSSRRGWHRPY

SEQ ID NO: 224117 - protein, 281 aa, Zea Mays
MDDTSIGGHWWPLTPPQTSPSLRRQRRFGQRPPTGSQVLLTAPINFVCLHAVKPHLRPLAMAVSTVSIHIFGDVPSSPLVGLLQDKINNWRETALILTSILFAAVVFWFIGVSEAAQVALDHLFNQGHNLVTENEISDTFTRLVERLPQVVLGSEETTALSHARMLLALTFYAGHSSQFSGSMDKLIVSKPLSIGYLYSVAELKSGAYSKDTTNISLHATSTSAASKISVIHDNALPNALLGTVEYELPHVPPWFIHAGSQKLYGVLAGIIRLVGLSTVSG

SEQ ID NO: 224118 - protein, 249 aa, Zea Mays
MCATIQAQWLDDIPIHFRLLHCGVRLLQSSSNHATCLTVVCIFDCEYLNPLLQLLLIEVRFQRPNNSGICRVGRYNISAKYRGKVRDGNGYGGQMVNGHPPEAHICPTLLARSSCVTRKVHIYIFLARVSPDNYITCKAHIYFPSPLVSHKKHTFVFPSPDTELKLEAKLATQAFPSHTNERLQTKLKGRWGKKGKCLDSILHILHAGIAACLVALLADGSNSHGCSVPLAARVIAEANLLESMDPCAS

SEQ ID NO: 224119 - protein, 117 aa, Zea Mays
MNQRMPLIYVKLYMYQICRALAYLHNCVGVCHRDIKPQNILVNPHTHQLKLCDFGSAKVLVQGEPNISYICSRYYRAPELIFGATEYTTAIDVWSAGCVLAELLLVVSISLLKLLRF

SEQ ID NO: 224120 - protein, 330 aa, Zea Mays
MARLLIPLPFAAASASSLHLAVSRLPLAAVSAARRECLFGGRVVGGVVRAPARLSKRGLCAGAEAGDSAVTVEAMEWVKKDRRRLLHVVYRVGDLDKTIKFYTECLGMKLLRKRDIPEERYTNAFLGYGPEDSHFVVELTYNYGVESYNIGTGFGHFGIAVEDVAKTVELIKAKGGTVTREPGPVKGGKSVIAFIEDPDGYKFELIERGPTPEPLCQAFGMELLRKRDNSEYKYTIAMMGYGPEDKNAVLELTYNYGVKEYDKGNAYAQIAISTDDVYKTAEAIRVNGGQITREPGPLPGITTKITACTDPDGWKTVFVDNIDFLKELEE

SEQ ID NO: 224121 - protein, 589 aa, Zea Mays
MSEWDDYPRYLNSDGVEIAPAVYGDIYGYGYAPYGAYSPATSPVPTVDGQMFGAQHYQYPTAYFQPPTPVPSTTQSDLQSSKNPEKPAAKADPAKTTNGVPNGTAHSNSGTVPLASSQQNSSLTPDGTYRAPLLGGVPSAGYLDTTYGYDSTGAHFAWYDGSAYANGQQRATTTNHFPSSTFGNGSPARYQNKSTTTPQMGMQNRRPTTTSPAPTYPNRMYPSSRPYTQYGNSIKTGLPYGSNGYDSRIYGRWGLGMDNRYRPRGRNGYYGYGNESQDGTIELNRGPRSGRFKNQKLYGHTVTIAVKGQSLPSGESKDDSAVPDRAQFNRDDFPVQYDAAKFFVIKSYSEDDIHKSVKYNVWASTTNGNKKLDAAYQEAQSKGSACPIFLFFSVNTSGQFVGVAEMTGAVDFEKTLGYWQQDKWNGSFSVKWHIVKDVPNNILKHIILENNENKPVTNSRDTQEIHLEQGLQMLKIFKEHVSKTSILDDFAFYESRQKLMQDKRSKQQQVQKQVWDSRTPISVTGSEQQQEAANGKPNPSVPNGVPAEVKAAKASAENGTATPAISYAAKVAQAATEKPVLANGVAKTG

SEQ ID NO: 224122 - protein, 687 aa, Zea Mays
MAAVAPPPAPAPAPVPAPAPATVPVADQTTDLLQKLSLDSQPKAADATQPAAATAKKQGAAASQPLSVAIPPEPSITPVIQDFTDPNLFYLPAYYYGGYDSSMSEWDDYPRYLNSDGVEIAPAVYGDIYGYGYAPYGAYSPATSPVPTVDGQMFGAQHYQYPTAYFQPPTPVPSTTQSDLQSSKNPEKPAAKADPAKTTNGVPNGTAHSNSGTVPLASSQQNSSLTPDGTYRAPLLGGVPSAGYLDTTYGYDSTGAHFAWYDGSAYANGQQRATTTNHFPSSTFGNGSPARYQNKSTTTPQMGMQNRRPTTTSPAPTYPNRMYPSSRPYTQYGNSIKTGLPYGSNGYDSRIYGRWGLGMDNRYRPRGRNGYYGYGNESQDGTIELNRGPRSGRFKNQKLYGHTVTIAVKGQSLPSGESKDDSAVPDRAQFNRDDFPVQYDAAKFFVIKSYSEDDIHKSVKYNVWASTTNGNKKLDAAYQEAQSKGSACPIFLFFSVNTSGQFVGVAEMTGAVDFEKTLGYWQQDKWNGSFSVKWHIVKDVPNNILKHIILENNENKPVTNSRDTQEIHLEQGLQMLKIFKEHVSKTSILDDFAFYESRQKLMQDKRSKQQQVWDSRTPISVTGSEQQQEAANGKPNPSVPNGVPAEVKAAKASAENGTATPAISYAAKVAQAATEKPVLANGVAKTG

SEQ ID NO: 224123 - protein, 313 aa, Zea Mays
MDGTIELNRGPRSGRFKNQKLYGHTVTIAVKGQSLPSGESKDDSAVPDRAQFNRDDFPVQYDAAKFFVIKSYSEDDIHKSVKYNVWASTTNGNKKLDAAYQEAQSKGSACPIFLFFSVNTSGQFVGVAEMTGAVDFEKTLGYWQQDKWNGSFSVKWHIVKDVPNNILKHIILENNENKPVTNSRDTQEIHLEQGLQMLKIFKEHVSKTSILDDFAFYESRQKLMQDKRSKQQQVQKQVWDSRTPISVTGSEQQQEAANGKPNPSVPNGVPAEVKAAKASAENGTATPAISYAAKVAQAATEKPVLANGVAKTG

SEQ ID NO: 224124 - protein, 534 aa, Zea Mays
MASISGAAAPPSSAVCRLRLRRHLLLRPSHLRLRAPHSIADLSRSSNSAPSPARPALGSGPENGSGGVRAVEKDPIKLWERYVEWLYQHKELGMRELEKGAIANPDEGRMVGHYWLRDPALAPNSFLRNKIETALDRILAFSQDVVSGKILSPSGRFTSILSIGIGGSALGPQFVAEALAPDNPPLKIRFIDNTDPAGIDHQIAQLGPELATTLVIVISKSGGTPETRNGLLEVQKAFRDAGLQFSKQGVAITQENSLLDNTARIEGWLARFPMFDWVGGRTSEMSAVGLLPAALQGIDIKEMLVGAALMDEETRNTVVKANPAALLALCWYWASEGIGKKDMVVLPYKDSLLLLSRYLQQLVMESLGKEFDLDGNRVNQGLTVYGNKGSTDQHAYIQQLREGVQNFFVTFIEVLRDRPAGHDWELEPGVTCGDYLFGMLQGTRSALYANDRESISVTVQEVTPRAVGALIALYERAVGIYASLVNINAYHQPGVEAGKKAAGEVLALQKRVLTVLKEAMYGTSDLCSFCFSVK

SEQ ID NO: 224125 - protein, 370 aa, Zea Mays
MALITNVSDYEELAKQKLPKMVYDFYAGGAEDQWTLKENKEAFSKILFRPRVLIDVSHIDMSTSILGYKISMPIMVAPTALHKLAHQEGEVASAQAAAAAGTIMTLSSWSSCSIEEVSSIAPGLRFFQLSVFKDRDIVQQLVRRAENAGYKAIAVTVDAPRLGRREADVRNRLPENVVLKCFEGLDLSKMDKTKGSGLAAYATSQIDSSLSWKDIKWLQTITGLPILVKGVITAEDARIAIECGVAGIIVSNHGGRQLDYLPATISCLEEGKLQVVREAKGRRVPVFLDGGIRRGTDVFKALALGASGVFIGRPVLFALAVDGRAGVRNALRMLRDELEITMALSGCASLKDITRDRVITERDMIRRSRI

SEQ ID NO: 224126 - protein, 110 aa, Zea Mays
MAAPATTSLLSTLLNLPLAPLSGKSSPPSVVHVARRGPMVVVAAKGYNVQILVDENEGEESIFRRFRREVMRAGVLQEIKRRRRYESKTDEKKRKAREAGRRNRRRNELG

SEQ ID NO: 224127 - protein, 208 aa, Zea Mays
MNMWFLLNPPGDATMHVENVDDFKWLNSSYCPVLKQLESAAMKEYYFKADRPKTLSAGSSNLKYRNPKYLSMLNHLRFYLPQVYPKLNKILFLDDDIVVQRDLTGLWEVDLNGNVNGAVETCGESFHRFDKYLNFSNPNIAQNFDPNACGWAYGMNMFDLEEWKKKDITGIYHKWQNMVNWKILHYLHLDTFSFNIAFNFPIRTQPSC

SEQ ID NO: 224128 - protein, 574 aa, Zea Mays
MQIVGEVGGNWRAIMHEQSNQCYYWNTVTGETSWDIPNGLASGAATASVPSDVGYSIEAQAHVLPHSTLEAYPSDMSVGNGTSTFANFGMACGSAQVTQDAYAYAAPIASHEPMDIDPLYLAKYGDDLLQRLNLLERLCGLNEGLELIRREIGIRISDCNALSSYGSSLLPLWMHAEVHLKQLDSSISRMEMSYHADTEHRNSKTEVVEHNAPDGADLTTPSNGEALKSEVSPGITIDENVEIDKPTSILSAQDSQGRDIAAVPPKVESDNDQDMDVEMEVDEDNVEEQAHCSSVPKKEHPPSEQLSSTNLPSFEDPTPEDNSVPPPPPEEEWIPPPPPENEPAPPDPPKEPAASYVQVDAIPQPYIAQENVGYTISGMEYYGIVGTEGTNANYYMQVSEPHVLQAQQHSYYAPVSGSGVSVSVDGTSIAPESYYTHPSVTMAASAVAAEHSVYYASSISAISSSAADIKTSSASLVSANSNSDLKGPDKLISNDASIVPLTQAVVATSGAGTPSVLGSSTQPSSSTKNLTKVTRNKKRAVGITSSLRSNKKVSSLVDKVALYNRSLLHIGANI

SEQ ID NO: 224129 - protein, 322 aa, Zea Mays
MVLLALPLIIPACSSCSYFDTQHGTGTTDPASQLNQHDDPNKPLLVSDSHQIEPDGVTQKEPEHQLQGGCCGTILYKGCLAVLGEEHSAKKLIWSVDFWLYYTAYFCGATVGLVYSNNLGQIAQSLHQQSQLTMLLAVYSSCSFFGRLLSALPNLPHRMVSLARTGWLAAALVPMPMAFFLMWKQQDVGALVAGTAMVGLSSGFIFAAAVSVTSELFGPNSIGVNHNILITNIPLGSLLYGQIAAMVYDANGQRMTLMDNRTGIIDTMIVCMGVKCYSTTFLVWGCITLLGLVSSVVLFIRTKPAYAAAGRSSCKHLHQVSS

SEQ ID NO: 224130 - protein, 430 aa, Zea Mays
MAFLVPFLLGLSSVLAAWIYSEFLGYRASSSHEKVHSDVHVGDKTIKENDRAVLLEEGESKPPSTKAPNMSARAKLIRFITLDESFLVGNRATLRAIAEFGIILVYFYTCDRTNIFAESKKNYNRDMFLFLYILLVVASTITSLKKHPENSVVSGKTVFYLNRNQTDEWRGWMQVLFLMYHYFAASEIYNAIRVFIACYVWMTGFGNFSYYYKKKDFSIARFAQMMWRVNFFAMSCCMVLDNDYMLYYIAPMHTLFTLMVYGSLFVLNKYNEIPSVMAIKIAGCLLTVILIWEIPGVFEIFWAPFTFLLGYKNPEPSKMNLPLLHEWRFRSGLDRYIWIIGMIYAYFHPNVERWMEKLEESETKVRVLIKGTIVTASLMAGYLWYEYIYKLDKHTYNKYHPYTSWIPITIYVCLRNCTQQLRSTHLSLFV

SEQ ID NO: 224131 - protein, 270 aa, Zea Mays
MLTTRADLQDGLFLVRFLRAIDSARRSFFFRSRALWVIAGLRGIHTLTGFLPMQPKQNLPKFRAPRRELKRRIASYHPTRKRQDSLLGGGGFGRVYKGFITKDLREGLEIEEPTRVAVKVHDGDNSFQGHREWLAEVIFLGQLSHPNLVKLIGYCCEDDHRVLVYEFMPLGSVESHLFSRVMVPLTWSIRMKIALGAAKGLAFLHEAEKPVIYRDFKTSNILLDEEYNAKLSDFGLAKDGPVGDKSHVSTRIMGTYGYAAPEYIMTGADL

SEQ ID NO: 224132 - protein, 257 aa, Zea Mays
MQPKQNLPKFRAPRRELKRRIASYHPTRKRQDSLLGGGGFGRVYKGFITKDLREGLEIEEPTRVAVKVHDGDNSFQGHREWLAEVIFLGQLSHPNLVKLIGYCCEDDHRVLVYEFMPLGSVESHLFSRVMVPLTWSIRMKIALGAAKGLAFLHEAEKPVIYRDFKTSNILLDEEYNAKLSDFGLAKDGPVGDKSHVSTRIMGTYGYAAPEYIMTAMVLYYWSSSRAGSHWTSPGQSGSRCWQTGHSHCWHRRRRCLA

SEQ ID NO: 224133 - protein, 159 aa, Zea Mays
MTLARWRSARSSGQASGDGCSGWSLLDSAFWVWCSSRIGNSDFIVHAWAEVACSLFAAACCGCNPAAAAASTVFFSLWIAAAAVQTAATVSACSQPNTPLEFSGFRYQGGQGRQGVYMFGLTITKAFGFHFTSCLTYAVTVTHVRGAIHRMKGIYLFVK

SEQ ID NO: 224134 - protein, 341 aa, Zea Mays
MGGFGMSHQQALAQVTAQATHSPLRMFDHLEQPSFSTAATTSGALHHMNSAASMAGISDMTMATANNENPSFQSAEASQRYQVNAPVDKPADDGYNWRKYGQKVVKGSDCPRSYYKCTHPNCPVKKKVEHAEDGQISEIIYKGKHNHQRPPNKRAKDGNSSAFDQNEQSNDTTSGLSGAKRDQDNIYGMSEQAYGLSDGDDMDDGESRPHEVDDADNESKRRNIQISSQRTLSESKIIVQTTSEVDLLDDGYRWRKYGQKVVKGNSHPRSYYKCTFAGCNVRKHIERASSDPRAVITTYEGKHDHEPPVGRGNNQNAGIPQQKEGQNNISSNQASLFEARF

SEQ ID NO: 224135 - protein, 498 aa, Zea Mays
MAVPTTTLSHRRISSYSLVASTAALLLVFHHHVPSTTAQPLPWQLCNDTSGNFTDKSAYQANINQLATALTNNASSSPSLFAAGAAGSAPDVAYALALCRGDTNASSCARCVAASFKTAQQLCAFKRGATLYDDPCILRYADWDFLTNTTDNRGLYIAWSYDNVSAAVAPAFDAASARLVNATSDYAATDPVRRFGTGEEPFDDAKYPKIYSLAQCTPDMTVADCRACLGGVYRRFAPTYFGGKHGGRVFGVRCSLRFETYHFFSGNPLLQIPGPPGAPPPAAPAVNMTPPATGQGGGGHKNRTRLVLAIALPLAAATAILALAVACLYYRSRRRTTAQRDSSGKPCSPSPDDIDKSIDSLLFDLPALRAATNNFAESNKLGEGGFGAVYKGILSEGQQVAVKRLSLGSTQGLTELKTELVLVARLQHKNLVRLIGVCLEEDEKLLVYEYMPNRSLDTILFEKQRAGLVEETRDCERSCTGPAISPRGVSAEDSPSRP

SEQ ID NO: 224136 - protein, 277 aa, Zea Mays
MTTVAHHHHLAAATVLFFVAFTMAPLAAGDPVGQLCGTSGNYTLNSTYQGNIRRLAATLPKNASTSATLFATDTFGAVPDIVYALALCRGDTNASACSGCVAAAFLDAQQLCAYNKDATMFYDPCLLRYSNQNFLADPSSDGRGTALILMNTQNVTARFKVFDAAVAALLNATAAYAAANSSKRFGTGVEAFQNFDSNRPRIYGLAQCTPDMTPADCQSCLSGMSSTRSLQAPHCFSWRSLPWGPRRPRPRWSTELQRHRRPEEHDEEQQEIKLVEF

SEQ ID NO: 224137 - protein, 496 aa, Zea Mays
MISDYKIEKDRLIWMWIAEGFVQYVKQGKSLFEHGESYFNELINRGMIQPIYNQAGMIYECRVHDMVLGLICSLSNGENFVTTLNGLGHGSPSNMIRRLSVQNGNESQAMTLQTRNLQQVRSVVAFPDATASVVTVLRSFRVLRVLDLQDCDLSQCCSLKYLGNLFHLRYLGLCNTSITQLPEEIVNLQLLQILDVWNNKMYCLPSTIVQLRYLMCLYIDGFTRVPNGIGSLTSLEELTFLGIYDSTVDIIEELGQLTELRVLHIVLFGEWNDKLVECLHKLKKLKYLYIKDRSGQLNIGGLDAWVAPPNLQILNTRSGCWFTTLSASAWMNPSLLQDLSLSTTVRELQQDDIIILGSLPALRYLNLMIVGEDLGVHNEIHGECIVGAGLFPSLVYCQLWGNVAPIVFQRGAMPRLRTLDFRLSVQEVRGINGRDGGIDLGLRNLPSLQKVWVHLDPEGANKAEVKELEAELTRAIKIHPNHPQLYGIQDEDADDE

SEQ ID NO: 224138 - protein, 256 aa, Zea Mays
MTMNAAIASRLGLAVSRCGAGSRVDSRPLTPAVGFTAGPRARSVAVTAASSSPATGGVTPVPPRSNRSVMKRHTLSVFVGDESGMINRIAGVFARRGYNIESLAVGLNKDKALFTIVVSGTDKILNQVVEQLNKLVNVIKVDDLSMEPQVERELMLIKVNAEREKLPEIMGLVRIFKAEVVDLSDYTLTIEVTGDPGKMVAIQKTLSKYGIREIARTGKLCAVKKWEKLLHFGGSLQLLIRISKWQYLQISSKTLV

SEQ ID NO: 224139 - protein, 497 aa, Zea Mays
MFKNIEEGKVYNLVMFVKSPETTDLTVSLTSSNGLQNLASATVTVSGESNWIKVEQKLVAKGTNRTSRLQITTNKKGVVWFDQVSLMPEDTYKGHGFRTELISMILDLKPRFLRFPGGCFVEGGWLRNAFRWRESIGPWEERPGHFGDVWHYWTDDGLGYYEFLQLAEDLGTEPIWVFNNGVSHNDEVDTVAIAPFVKDVLDSIEFARGSANSTWGSVRAAMGHPEPFPVKYVAIGNEDCGKKFYRGNYLKFYNAIRQAYPDIQMISNCDGSSTPLDHPADLYDFHVYNDSKTLFNMKSTFDRTSRSGPKAFVSEYAVWRGDAGRGSLLASLAEAAFLTGLEKNRWNPDAIVFNSWQHYGTPSYWMQTLFRESSGAMFHPTTISSSYSGSLAASAITWQDSENSFLRVKVINFGSDAVTLTISTSGLQASINALGSTATVLTSADVMDENSFSNPTKVVPVKSDLSNAAEQMQVTLAPRSFSSFDLALAQSKLVAEM

SEQ ID NO: 224140 - protein, 536 aa, Zea Mays
MEVLCDNCPTGGVGVYNPGFWGMNIEEGKVYNLVMFVKSPETTDLTVSLTSSNGLQNLASATVTVSGESNWIKVEQKLVAKGTNRTSRLQITTNKKGVVWFDQVSLMPEDTYKGHGFRTELISMILDLKPRFLRFPGGCFVEGGWLRNAFRWRESIGPWEERPGHFGDVWHYWTDDGLGYYEFLQLAEDLGTEPIWVFNNGVSHNDEVDTVAIAPFVKDVLDSIEFARGSANSTWGSVRAAMGHPEPFPVKYVAIGNEDCGKKFYRGNYLKFYNAIRQAYPDIQMISNCDGSSTPLDHPADLYDFHVYNDSKTLFNMKSTFDRTSRSGPKAFVSEYAVWRGDAGRGSLLASLAEAAFLTGLEKNSDIVSMASYAPLFVNDNDQTWNPDAIVFNSWQHYGTPSYWMQTLFRESSGAMFHPTTISSSYSGSLAASAITWQDSENSFLRVKVINFGSDAVTLTISTSGLQASINALGSTATVLTSADVMDENSFSNPTKVVPVKSDLSNAAEQMQVTLAPRSFSSFDLALAQSKLVAEM

SEQ ID NO: 224141 - protein, 224 aa, Zea Mays
MEVESAMLASSLNPAPTLSASATTRFPASSTPNRRPGSLHGRRVCDSPISVEGVSSSPDRRPGSLHARDSLLSMEGESAMLTWIGYPAPALSMEGVSPIAASSLANRVRHGNTGEAVGSLVDAHHGETNGGKGKGYIFHPGRMWRGSSNSVTLVSALDLWSSVVFLLGFRCFGGGLDHWKLNLEKSPFSLSPLPSLDMLQIRLLVALQLSLMLCLCLIVAVRIW

SEQ ID NO: 224142 - protein, 157 aa, Zea Mays
MGALDLHLDFASAQHGQAKLKEYAKSSLLSDGNYNTDKINGSNPDDYEKFEKGIMHYGCPHYRRRCRIRAPCCNEIFDCRHCHNETKNSIKIDKMKRHELPRHEVQQVVCSLCGTEQEVRQVCINCGVCMGKYFCGLCKLFDDDVSKQQYHCNGCGI

SEQ ID NO: 224143 - protein, 157 aa, Zea Mays; identical to SEQ ID NO: 224142

SEQ ID NO: 224144 - protein, 110 aa, Zea Mays
MGASAREVESLLRFTRPTLWAVRVCSNPVLHLLCFVDCLSPGPRKNDLTIYWALGPFVRSFISLVDPGDIYPPQAPDLWVDLEVINSKIQGPRNGFLLSFLAPITCSTEV

SEQ ID NO: 224145 - protein, 110 aa, Zea Mays; identical to SEQ ID NO: 224144

SEQ ID NO: 224146 - protein, 190 aa, Zea Mays
MSSHLAAAASALPLPLPPPAVAAPSRALRALILSRGGAAAVCSSLRRGGTPACLVRRLCSHHSAAAAATALEEARRGRKQLGMTPALYDYLLANVREHPILRELREETAAMRGSQMQVSPAQAQLLSMLVQILGARRCIEVGVFTGYSSLAVALALPESGHLVACERDDRCLEVAKKYYQRAGVAHKISS

SEQ ID NO: 224147 - protein, 143 aa, Zea Mays
MASDSGTASSDPLLHGRRAPSTGGWKSALFIIWVEVAERFAYYGISSNLISYLTGPLGQTTAAAAAAVNAWSGAASMLPLLGAAVADSWLGRYRTIVASSVLYITVSPQPRTASPPISRPDILLSIPAPCLHCMGYSLLPCDR

SEQ ID NO: 224148 - protein, 158 aa, Zea Mays
MGFPSTPNLKLEPRPRTRRLLRCALSSEPVPPMTVSITGATGFIGRRLVHKLLSDDHKVCILTRSASKAASVFPASTYPGLTIAQQGDWEACVRGSTAVVNLAGMPISTRWSPEIKQEIKQSRVNVTSKVVKYINHAGNADTRPSVFVSATAIGYYVQ

SEQ ID NO: 224149 - protein, 162 aa, Zea Mays
MGFPSTPNLKLEPRPRTRRLLRCALSSEPVPPMTVSITGATGFIGRRLVHKLLSDDHKVCILTRSASKAASVFPASTYPGLTIAQQGDWEACVRGSTAVVNLAGMPISTRWSPEIKQEIKQSRVNVTSKVVKYINHAGNADTRPSVFVSATAIGYYGASFVN

SEQ ID NO: 224150 - protein, 159 aa, Zea Mays
MGFPSTPNLKLEPRPRTRRLLRCALSSEPVQPPMTVSITGATGFIGRRLVHKLLSDDHKVCILTRSASKAASVFPASTYPGLTIAQQGDWEACVRGSTAVVNLAGMPISTRWSPEIKQEIKQSRVNVTSKVVKYINHAGNADTRPSVFVSATAIGYYVQ

SEQ ID NO: 224151 - protein, 162 aa, Zea Mays; identical to SEQ ID NO: 224149

SEQ ID NO: 224152 - protein, 329 aa, Zea Mays
MGFPSTPNLKLEPRPRTRRLLRCALSSEPVPPMTVSITGATGFIGRRLVHKLLSDDHKVCILTRSASKAASVFPASTYPGLTIAQQGDWEACVRGSTAVVNLAGMPISTRWSPEIKQEIKQSRVNVTSKVVKYINHAGNADTRPSVFVSATAIGYYGTSEIHSFDESSPSGNDYLAEVCREWEATACQVNQEDVRLVLLRIGVVLGKDGGALAKMIPLFMMFAGGPLGTGRQWFSWIHLDDLVNLIYESLTNPTYKAMRTSGANRWAALLVARAGICAQSGARRRRFCGNTHLIDILHSYVNHTYMLFGERSEQIITFGYCYDGYRIWA

SEQ ID NO: 224153 - protein, 429 aa, Zea Mays
MEVVGLPRFVSCHSSSSSPVSLSIHPIPPGEKRDKSNLAASWALSAGAMASNSAPGAGYECGSDNDGGLHKPLLPNSGSCQRTGSRQPSLNAAGTSSRAVLRESHVSAFLCTLIVALGPIQCGFTSGYSSPTQDGIIRDLNLSISEFSAFGSLSNVGAMVGAIASGQMAKYIGRRGSLIIAAVPNIMGWLAISFAKHTSFLYMGRLLEGFGVGVISYVVPVYIAEISPQNMRGALGAVNPLSATFGVMFVYVLGLFFPWRLLALIGTLPCLFLIPGLFFIPESPRWLARMNRMDDCETSLQVLRGFNADITAEANDIKIAVTSANKSGTISFQELNQKKNRTPLILGIGLLVLQQLSGINCIVFYSGSIFKAADEGILFNGGNESSTIELDEPFDDNNRGFVRRIQEYEVKEALKRMKVGKAMGPDGIP

SEQ ID NO: 224154 - protein, 243 aa, Zea Mays
MRGALGAVNPLSATFGVMFVYVLGLFFPWRLLALIGTLPCLFLIPGLFFIPESPRWLARMNRMDDCETSLQVLRGFNADITAEANDIKIAVTSANKSGTISFQELNQKKNRTPLILGIGLLVLQQLSGINCIVFYSGSIFKAAGLKNSNLDACVLGALEVLATGVTITFLDRAGRRILLIISSCGMTLSLLAVAVVFYIKDNISHDSDMHNILSMVSLVGVVAYVIAFCFGMGAIPWIIMSEV

SEQ ID NO: 224155 - protein, 72 aa, Zea Mays
MEFSRFWCSRPPFGQVVTDPFFFCHWIGYVTGFAHHPHSRLFIKFTLMEMIEWKLDKDWSRMYQVPRNPCIR

SEQ ID NO: 224156 - protein, 1201 aa, Zea Mays
MRPDTRLESAVFQLTPTRTRCDLVVVANGRKEKIASGLLNPFVAHLKVAQEQIAKGGYSITLEPDPEIDAPWFTRGTLDRFVRFVSTPEVLERVTTIESEILQIEDGIAVQGSDSLGLRSVEYYNGKLVDCMEGSKASYNPDADRALVPYKAGTQPIPPLQNHDATQEENSKDQLLRVLETRKTVLRKEQAMAFARAVAAGFDIDNLVYLITFAECFGASRLMKACTQFIELWKQKHETGQWIEVEPEAMSARSEFPPFNPSGIMFMGDNMKQTMESMSVSNGDANGEDASKADQRTSQHSGAPHEFFHGPYQSAYPPWAMHPPYSMQGMPYYPGMNPYYPSPYPPMDETRYHPSERRVSKKHSDSKDSETSDDKSDQSGSERETSYGHRSHKKDKRAGKKKPSVVVIRNINVTSKRHGSSDSDSQTGSDVVSEDSDDSHAKSRKKKNNSSSSKKKDARKMVFESADEYSKNGMSYGQDGDQGSWNVFQSFLLRADEKRDNDADLFASEKKAPPARMKESTSVDVDSILLVEQNSAGANEHNTTGFSMENERIRPQQMLSGDELMMYGEGEGMSFGCDDIKEIEAGGVRYRRGTSDDFMIYGQEKSMDRGSSLDPLAEAQYKSPTLVDKNVHSLADESFMIPLRSTSEDNHEPECRTAIDIDVELPSTVQKISDAKAGSQLFYEPAELMPERGCEDVSFGYDPAMDYNSQIQSQSATMVEDAHMEDALLSTVDEIKKPEKDKKLRSSQESLDKRRKDASARRLSSSKGPLTDAQKRAQNLRIYKADLQKAKKEQEEEQIKRLERLKLERQKRIAARSSTSNAPTPQQPRVKPSPKVSPSTYKSSKLSDTELASSSPLRKFPIKTTPGTDPEKTAKSSKLNDNTNAVSKPTLTDMKERSGRTESSNERLRKLAEPKTNSSTGHTLNSKSASVDRPRRKSMPQDSQTKKISAIMQLDQSKSATLPELKVKYSQAPAVVKNAVASRERKEVSAGAKSLRTTETASVKETNGNISRMNSSDDNVVVEKTVVMLEDEAVILHSGRNAAKETCSDDRTEKPSPESEYIAIRAPLSPVILPEAERSDDLGSSYEVVTECLKDEPEEPTLGAVEKPYQAPFARVTSLENASDNSPLPESLAHANSIKARVPEPVYTVSVEGHVVSEKPRSKEPKGLRKLLKFGRKSHAEGAMDSSVDEASAGDGDSCFS

SEQ ID NO: 224157 - protein, 131 aa, Zea Mays
MQSNVLRRTSRRSTAVLVRRRRRHRGMDRCGGGAMASYLVAVVLLVALFASSAKCRPEPLDGGGNVNGNGTAPPVNGGGPGPGPGAVLKLQFCIQRNCVYEGRGNAPCFCCGALKPNQCYETRDRCSGNCV

SEQ ID NO: 224158 - protein, 534 aa, Zea Mays
MAGAPLRRSDLDFADVFGGPPRRVSGNEHRSQRGSQDTSSFESATRAGSGGPDTPVFGDRGSSDRRRQLGEEFYKDIFPGSEAASPRRSGAGDWGNVFGAQASPVSTARPRSSFSIRFNRGMDSSMPTSPSQQMSNRNDDGTSYAYSVPTSPNASMNNYLAQGAARQDSKKNPFSWHRYPFLSRFRSQSGEKKSTSNHVSSMDNEFEGTPVNLESIMANNKFHFSFYKWAGKGALLVLPATAQEKSVDIIGLRSFPQVVIQGIDLIDCEDSMSTATGTAKNQTDYEDSKSGKHSANSATKDGAIPLLFEDYMQGTKQSNDHTKNDVSSTTLSSKISRSPSGERSRSSRVKEKMKGFIKLFSPESSPKRKRAPETQRQTSVGKNGTKTELHDKFSMSSLEASEDVETVQMNSQNAFTAEPFPMTEVQERLDKPVLTANSKMDTATGSNEAASNEPIHDDTKDKAANTIEHEDIEDLDGCVVEHFSEDHVLHNDQEKELIKISEAKIREWSRGKEGNIRSLLSTLQYIINNVSHGP

SEQ ID NO: 224159 - protein, 477 aa, Zea Mays
MDVLSEMLNAIDPGNREGLRQEVIVDLVDQCRSYKQRVVQLVNSTSDEDLLSQGLTLNDDLQRVLAKHDAIAAGIAIRLQKPKSAPARADSSPTKPEPTKETEQRSAKVASSVTPFEQLALPAPPSSSASKSHGESAVSPNIDLLSGDEFFKPEPVHSQALVPLVTQASASSSPSTLDLLDMFSDSNAINNTSQNPTILSISNSNPNTSVQAYPVPQQPVPPHHPSPYANGLNSDTMTPFDQGSKLTSASSWNEQIAHGMIPPQQFAHGQGEQSNDLPLPPWEALPAETEQLEADHPGGLSALPQFGVSQPQPVQITHSGQQVLPSQLMPTGQPGGQFQPRFGAQQPYATENTQYGGMYPPVQGNQPTGIYPQQMAGDVYQQQMFGGQMIGYGYGPQPGGYYVPNAAYAYAGANDLSQRMNGLSMQGNSLYGTPASSSLQQRNRPSRPEDSLFSDLVSIAKQSLVKLLPTRLVTCKP

SEQ ID NO: 224160 - protein, 103 aa, Zea Mays
MAMAYKMATEGMNVKEECQRWFMEMKWKKVHRFVVYKIDERSRAVLVDKVGGPGEGYEELVAALPGDDCRYAVFDFDFVTVDNCQKSKIFFIACIQLLKHYYG

SEQ ID NO: 224161 - protein, 708 aa, Zea Mays
MVMLTEEEKASLCLLGLKQSSSTAELDTICGIEGPAAEQIKDEAGGDHVMHDALVGVTETEYQLDSDLRDVRGLLSTGLLEGFRVTYMKDEVEEVGRINGQGYSCGCSKCNYNSNIMNACEFEEHYGQSFDNQIDHIFLDTGISLFRVVEALKPCKLNMLGDFIEEKIGFPPNLDEYNKWKASFQKRKDYLDAVASDGCLTQSSQGLAAGEMIYSLRDYLKDSVSNSISNLNWSASKRRSGRRFRQGDTGTSTPTFSGSPGKGGFGHSTDTSEKKGTEETHRLSLSSPVKITQRPLRNCSIDSKSKESKTRDTTLHPLIFKEDGLADNTLLTYKLKNGEALKQGYKRGTCIICNCCNQEFSPSHFEEHAGMGRRRQPYHNIYTLEGLSLHKLALQLQDHLNPNGFDNASVSSVSDYHNLTSSGCGREPSTTSGPIVPLKRTLQERVVETESCYFCGYGHTTIGNINPDTIIFCNQCERPCHIKCYNNRVVKKKVPLEILKEYMCFHFLCCQECQSLRARLEEGLEKCVGITFLRRIRSNICWRLLSGMDASRDVKLYMPQVIDIFKDAFMDSTDEHSDIISDMVNGKNGDQEKDFRGMYCALLTASTHVVSAAILKVRIEQIAELVLIATRSECRKKGYFILLLKSIEANLRAWNVSLLTAPVDPEMAQIWSEKLGFTILSAEEKESMLESHPLVMFKNLVLVQKSLA

SEQ ID NO: 224162 - protein, 196 aa, Zea Mays
MVCMKFKFCLLRFMAFKFVAFCLSSIRLSQVGDFQLCSLRPRRRRRRRSVHDDRLLHGRIDATTRYGYLELAIEQMAETADASNALDHGLHYLRSTGNACAARALLWWGWDNSDAHAGMATSVELSLFLPPSVNFLGSCLLRQLHVLTADVAATHRLLCSSSGEHPLLEPPWRSATGRHDSSSPSDASRLFDEMAS

SEQ ID NO: 224163 - protein, 537 aa, Zea Mays
MLRDLVSTRRFKKTNQDFDGSEKYYVHSDGAEFSCDTDSLDDDLDDREHDDEFGGSAVRKSFSYGSLQTMNVGALLYAPRIDGDDEGWVHYSHRNSDVGYHVEQVPPPTAEEHASIPLRRKRSILPARWRKVKLPKAKGEPLLKPYGEEGGDDIDYDRRLLTPSDGSVSEGSNGSNSMVSVFGDDDFVVGNWESKEVFSRDGHLKLSTQVFFASIDQRSERAAGESACTALVAVVADWFQTNQDLMPIRSQFDNLIREGSLEWRRLCENETYRERFPDKHFDLETVLHAKIRPLTVAHSKSFIGFFHPQGTEDVTGFDFLDGAMSFDNIWDEISRAAECSSGKPALYIVSWNDHFFVLKVDANAIYIIDTLGERLSEGCNQAYILKFDDTTTIHKTPAEKKEPSPDHRGRRKDSSETCSTEQGSGSDTEECEPVLKGKDACKEYIKSFLAAIPIRELQADIKKGLMASTPLHHRLQIEFHYTEPRPAEIAAPSPLPPFEAPFEFCWPEPPSPPAATESTVTHPPAMEAGITQAVAVV

SEQ ID NO: 224164 - protein, 70 aa, Zea Mays
MSWRHPKTCTFHFAHFSPRFNTNFLRKLSQTLLIVVGLQGFKLGLSYFSISLKQPNNLTLIPWEKMFLLF

SEQ ID NO: 224165 - protein, 252 aa, Zea Mays
MNIYMDAEAANPFEYCDVVTTTTHKSLRGPRAGMIFYRKGPKPPKKGQPEGAVYDYEDKINFAVFPSLQGGPHNHQIAALAVALQQTMSPGFKAYAKQVKANAVAIGNYLMSKGYKMVTDGTENHLVLWDLRPLGLTGNKVEKLCDLCHITLNKNAVFGDSSALSPGGVRIGAPAMTSRGLLEKDFEQIGEFLHQAVTICLNIQKEYGKLLKDFNKGLVNNKDIENLKVQVEKFADSFDMPGFTLESMKYKE

SEQ ID NO: 224166 - protein, 185 aa, Zea Mays
MQVQGKDVIHGARYSSPLDCAVKTLESEGVKGIFRGGLATLFREAIGNAVFFCTYEYSRYWMHNYLDSSRFSGSSHFVAAKDIGIGVVSGGVSGMAFWTATLPLDVAKTIIQTDPDPHVSRNPLQILSMVYKRAGLGGCYAGLGPTLARAFPANAAAIVAWEYSAKILGIKRDQKTETNQVGICS

SEQ ID NO: 224167 - protein, 235 aa, Zea Mays
MGAEREHLEAAVGSAVSVRTPGDIVTVTAAAATALRGAATLKARALKEVWNIAAVIPVEKGPGPVGGGGGGHHHQHHQKHGAPKQQLHRKMDSDGSSVSDLSLEEENSFLGICSQELLARGTELLKRTRKGALHWKVVSVYINRMGLVMLKTKSRHVAGTITKKKKSVVVEVCRDVPAWPGRHLLEDGGHRRYFGLRTAERRVVEFECRSQREYEMWTKGVARLLSVAAERKRLA

SEQ ID NO: 224168 - protein, 456 aa, Zea Mays
MFALREALQARRSAIHQETGLTCSAGVAPNRMIAKVCSDINKPNGQFILPNDWEAVLTFVSTLPIRKIGGIGKVTEQMLHQVLGISTCQEMLQKAAFLCALFSESSADFFLSVGLGLGGTETPEQRQRKSISCERTFTATNDSSLLFKKLASLAENLSDDLQKEGFKGKTLTLKLKTADFEVRTRAVTTRNYIDSKEDILVYATKLIKAEMPISLRLMGLRMSQLHDEKDDPSTSTQKTLDIFFRSSNSNSNGNGTTVQRITNSPGQDNDSISLTTKEEYLAPDAGTSVSTGQQDFFLHDEICFIPEQQRSLDNDTKEAVLSDPLGGTKSDDVSSSAKVTPTKKLDEPDPLISPKAVSSSSKPDQQSWIDGYICSICGFELPPGFEEERLEHSDFHLAETLQQEEAVDGTRHISNESWVAERPRSTAPTPKKKLKSSKEGKHIPIDSFFTKCNKSP

SEQ ID NO: 224169 - protein, 379 aa, Zea Mays
MLHQVLGISTCQEMLQKAAFLCALFSESSADFFLSVGLGLGGTETPEQRQRKSISCERTFTATNDSSLLFKKLASLAENLSDDLQKEGFKGKTLTLKLKTADFEVRTRAVTTRNYIDSKEDILVYATKLIKAEMPISLRLMGLRMSQLHDEKDDPSTSTQKTLDIFFRSSNSNSNGNGTTVQRITNSPGQDNDSISLTTKEEYLAPDAGTSVSTGQQDFFLHDEICFIPEQQRSLDNDTKEAVLSDPLGGTKSDDVSSSAKVTPTKKLDEPDPLISPKAVSSSSKPDQQSWIDGYICSICGFELPPGFEEERLEHSDFHLAETLQQEEAVDGTRHISNESWVAERPRSTAPTPKKKLKSSKEGKHIPIDSFFTKCNKSP

SEQ ID NO: 224170 - protein, 649 aa, Zea Mays
MHADVETDEVYAQMTLQPLNPQEQNDAYLPAEMGIMSKQPTNYFCKTLTASDTSTHGGFSVPRRAAERVFPPLDFTQQPPAQELIARDIHDVEWKFRHIFRGQPKRHLLTTGWSVFVSAKRLVAGDSVLFIWNEKNQLLLGIRHATRPQTVMPSSVLSSDSMHIGLLAAAAHAAATNSRFTIFYNPRASPTEFVIPLSKYIKAVFHTRISVGMRFRMLFETEESSVRRYMGTITEVSDADPVRWPSSYWRSVKVGWDESTAGERPPRVSLWEIEPLTTFPMYPSLFPLRVKHPWYSGLAALHDDSNALMWLRGVTGEGGFHSLNFQSPGIGSWGQQRLHPSLLSNDHDQYQAVVAAAAASQSGGYLKQQFLHLQQPMQSPQEQCNLNPLLQQQILQQASQQQMVSSDAQNIQSVLNPGAIQQQLHQLQQMQHTHNDQKQKIQPDQQYQVASSAVLPSPTSLPSHLREKFGFSDPNVNSSSFISSSSNENMLESNFLQVSSKSVDLSRFNQPVVSEQQQPQQQQAWKQKFMGSQSMSFGGSVSLNSPTSKDGSVDNKVGRDVQNQSLFSPQVDSSSLLYNMVPNLTSNVADNNISAFPSGSTYLQSPMYGCLDDSSGLLQNTGENDPTTRTFVKVSIIESTKNKFKPFLM

SEQ ID NO: 224171 - protein, 572 aa, Zea Mays
MPSSVLSSDSMHIGLLAAAAHAAATNSRFTIFYNPRASPTEFVIPLSKYIKAVFHTRISVGMRFRMLFETEESSVRRYMGTITEVSDADPVRWPSSYWRSVKVGWDESTAGERPPRVSLWEIEPLTTFPMYPSLFPLRVKHPWYSGLAALHDDSNALMWLRGVTGEGGFHSLNFQSPGIGSWGQQRLHPSLLSNDHDQYQAVVAAAAASQSGGYLKQQFLHLQQPMQSPQEQCNLNPLLQQQILQQASQQQMVSSDAQNIQSVLNPGAIQQQLHQLQQMQHTHNDQKQKIQPDQQYQVASSAVLPSPTSLPSHLREKFGFSDPNVNSSSFISSSSNENMLESNFLQVSSKSVDLSRFNQPVVSEQQQPQQQQAWKQKFMGSQSMSFGGSVSLNSPTSKDGSVDNKVGRDVQNQSLFSPQVDSSSLLYNMVPNLTSNVADNNISAFPSGSTYLQSPMYGCLDDSSGLLQNTGENDPTTRTFVKVYKSGSVGRSLDITRFSNYAELREELGQMFGIKGQLDDPDRSGWQLVFVDRENDVLLLGDDPWDVWYIKILSPEDVHKMGKPGNDPRYLS

SEQ ID NO: 224172 - protein, 764 aa, Zea Mays
MSSSSAASIGQPPPPAPPPEEEKKCLNSELWHACAGPLVCLPTVGTRVVYFPQGHSEQVAASTNKEVDGHIPNYPNLPPQLICQLHDVTMHADVETDEVYAQMTLQPLNPQEQNDAYLPAEMGIMSKQPTNYFCKTLTASDTSTHGGFSVPRRAAERVFPPLDFTQQPPAQELIARDIHDVEWKFRHIFRGQPKRHLLTTGWSVFVSAKRLVAGDSVLFIWNEKNQLLLGIRHATRPQTVMPSSVLSSDSMHIGLLAAAAHAAATNSRFTIFYNPRASPTEFVIPLSKYIKAVFHTRISVGMRFRMLFETEESSVRRYMGTITEVSDADPVRWPSSYWRSVKVGWDESTAGERPPRVSLWEIEPLTTFPMYPSLFPLRVKHPWYSGLAALHDDSNALMWLRGVTGEGGFHSLNFQSPGIGSWGQQRLHPSLLSNDHDQYQAVVAAAAASQSGGYLKQQFLHLQQPMQSPQEQCNLNPLLQQQILQQASQQQMVSSDAQNIQSVLNPGAIQQQLHQLQQMQHTHNDQKQKIQPDQQYQVASSAVLPSPTSLPSHLREKFGFSDPNVNSSSFISSSSNENMLESNFLQVSSKSVDLSRFNQPVVSEQQQPQQQQAWKQKFMGSQSMSFGGSVSLNSPTSKDGSVDNKVGRDVQNQSLFSPQVDSSSLLYNMVYKSGSVGRSLDITRFSNYAELREELGQMFGIKGQLDDPDRSGWQLVFVDRENDVLLLGDDPWESFVNSVWYIKILSPEDVHKMGKPGNDPRYLS

SEQ ID NO: 224173 - protein, 75 aa, Zea Mays
MASSRALALALFLLCALLPAPPVSATLLFGGGESAKKAGVDAEWRPATATWYGEAEGDGSDGRPASTAGRTSRSV

SEQ ID NO: 224174 - protein, 84 aa, Zea Mays
MMKTKTSRSLQKSGRGNQVQGEGPNWVLVAGGFLLSALSVKIGCKLKQWFNGKQQNNTSKDLKHASCTQTSTGSVTKLAVATLF

SEQ ID NO: 224175 - protein, 704 aa, Zea Mays
MAPPPLPLFSPSLKAPPPPPWLHGSSTQSRDSAPPVPPLPAEATPSKFRIDSPKPAPARKNTKTAAKPLTAGVPGGRTHRAVLGIIRRVRSLELSDAPSPNSVHTSNSGAAAAAFHLTIELSPPREPGQYVVEKEKSRAVPWAAARDEGLKVALRREKKPREPTRAETELETHELHRLRRLARGIGRWARAKKAGVTDEVVKEVRREWASGEELAAVRIVEPLRRSMDRAREILEIKTGGLVVWTKGDMHFVYRGSKYQQNAKHSHTFLTNVHKGYLVKHNVHTTLLKYGSIGPVLINNYGEADDAFQENDQSICGQKDEEPVKGTLYEREVNRLLDTLGPRFVDWWWDTPLPVDADLLPEFVPGFKTPYRLCPPGVRPTLADEELTYLRKLARLLPTHFALGRNTRLQGLAAAILKLWEKSLIAKIAVKIGIQNTNNEQMAWNLKHLTGGTVILRNKDFIILYRGKDFLPGGVAQTVIQREAQVHDEQVKEEEARLKAVDSLQMVGELSEESSLGTFREYQGFHAKFVHENTENSNTMIELEAEKYRLEKELKDHEWKLSVLNKKIERSNQALAKLHSSWSPSEQSADREHLTEEEKIMFRRIGRKMDGLVLLGRRGIFDGVIEEIHQHWKHKEVVKVITKQNQTRQIMYAASLLEVETVNEILCSGETEVHFGIEKETEVCDKANQVSNPMIMKSLDSMVSK

SEQ ID NO: 224176 - protein, 116 aa, Zea Mays
MKLLEMQKGELRCLLPRSLLDNGFFGIRSSEDKDSKKNTGPFSSFSWSGQRKVPSYLPKIVFPHEFMSTLRTIAMQEHELEQVASLLGETLFSRRETTLFGDAVISVSFATSELIC

SEQ ID NO: 224177 - protein, 482 aa, Zea Mays
MATAAADDDVKLESFLQWLQSNGADLRSCTIRACGGKGLGVFSTAAPEPGSNDGNAPLLSPESTRLIWTMRRRCAGVAMVVPLDLAITPMRVLQDPLVGPRCRALLEDGVVDDRLLVMLFLMAERRRPGSLWKPYLDMLPSTFGSSLWFTEEELAELEGTTLHRATLIQRKSLQSSFDEKVKGLVEELLHVDESASSVEVLFEDFLWANSIFWTRALNIPLPHSYVFLGSCGDQQARADNDAHQEIDITAKDCSADENSKPSNTESIWVEGLVPGIDFCNHNVKALATWEVDSVGNATGIPASMYLLLADKSPAETGAEICINYGNKGNEELLYLYGFVVDNNPDDYLMVHYPLEALRQIQSADIKMKLLEMQKGELRCLLPRSLLDNGFFGIRSSEDKDSKKNTGPFSSFSWSGQRKVPSYLPKIVFPHEFMSTLRTIAMQEHELEQVASLLGETLFSRRETTLFGDAVISVSFATSELIC

SEQ ID NO: 224178 - protein, 405 aa, Zea Mays
MRRLKGSLRSFCMSMNQQAQLKFCLRTSFVRVYDRANSIFWTRALNIPLPHSYVFLGSCGDQQARADNDAHQEIDITAKDCSADENSKPSNTESIWVEGLVPGIDFCNHNVKALATWEVDSVGNATGIPASMYLLLADKSPAETGAEICINYGNKGNEELLYLYGFVVDNNPDDYLMVHYPLEALRQIQSADIKMKLLEMQKGELRCLLPRSLLDNGFFGIRSSEDKDSKKNTGPFSSFSWSGQRKVPSYLPKIVFPHEFMSTLRTIAMQEHELEQVASLLGEVGYSEDRETSCAAIQSAIWEVCGDQGALGLLVDLLGVKYSILLLFTRRCILDHIAVLGLASRTTHRSQRSLLQEWLNLKRALEQKHLTPNCSSSSIPFSQKTTRVKAARSTKGSQRQTTVRV

SEQ ID NO: 224179 - protein, 544 aa, Zea Mays
MATAAADDDVKLESFLQWLQSNGADLRSCTIRACGGKGLGVFSTAAPEPGSNDGVAMVVPLDLAITPMRVLQDPLVGPRCRALLEDGVVDDRLLVMLFLMAERRRPGSLWKPYLDMLPSTFGSSLWFTEEELAELEGTTLHRATLIQRKSLQSSFDEKVKGLVEELLHVDESARANSIFWTRALNIPLPHSYVFLGSCGDQQARADNDAHQEIDITAKDCSADENSKPSNTESIWVEGLVPGIDFCNHNVKALATWEVDSVGNATGIPASMYLLLADKSPAETGAEICINYGNKGNEELLYLYGFVVDNNPDDYLMVHYPLEALRQIQSADIKMKLLEMQKGELRCLLPRSLLDNGFFGIRSSEDKDSKKNTGPFSSFSWSGQRKVPSYLPKIVFPHEFMSTLRTIAMQEHELEQVASLLGEVGYSEDRETSCAAIQSAIWEVCGDQGALGLLVDLLGVKYSILLLFTRRCILDHIAVLGLASRTTHRSQRSLLQEWLNLKRALEQKHLTPNCSSSSIPFSQKTTRVKAARSTKGSQRQTTVRV

SEQ ID NO: 224180 - protein, 626 aa, Zea Mays
MANKAVSGARSPLNLVVAMALCCFFYVLGAWQRSGYGKGDRIAAAVSRQTACGDVAAGLSFETHHGGAGAINASSSLPFGADAAPPAFAPCAAALADHTPCHHQDRAMKFPRKNMVYRERHCPSDGERLRCLVPAPPGYVTPFPWPRSRDYVPFANAPYKSLTVEKAVQNWVQYEGAVFRFPGGGTQFPQGADKYIDQLGSVIPFAGGRVRTVLDTGCGVASLGAYLDSRGVIAMSFAPRDSHEAQVQFALERGVPAFIGVLGSVKLPFPPRSFDMAHCSRCLIPWGGNGGMYMMEIDRVLRPGGYWVLSGPPINWKTNHKAWERTEADLSAEQQRIEKYAAMLCWEKVTEIREIAIWRKQLDPSAACPDRPPVRTCDDANSDDVWYKNMETCITPPAAAVAGELQPFPARLTAVPPRISAGAVPGFTAESYEEENRRWERHVAAYKKVNYRLNSERYRNIMDMNAGVGGFAAAIFSPKSWVMNVVPTAAEICTLGVVYERGLIGIYHDWCEAFSTYPRTYDLIHANGIFTLYKDRMEDILLEMDRILRPEGTVILRDDVEVLLKVQRTVKGMRWKTLLANHEDGPNVPEKVLFAVKRYWTAAGEGTAAEEKTPGSSSVAGMDSEE

SEQ ID NO: 224181 - protein, 254 aa, Zea Mays
MACLLVLVIAATVLTGPPGKLTHAARTSPAEAFWHAALPGAPMPEAIRELLRPAGTNAPDAARSRHHDADPPPMNFKYEDYRSSRRNEATATSAEALDRAGGAGNAAASPAVFFLEEAVRVGGVLPFRGMVPRGTASVAVASPPMRLYKVRAVRAIDGRRFMVCRRDREDGPDGDAVYGCRATGPARAYAVGVVGERGETVAATVVCRTDTSRWNRVRAAFRLLDVKPGGAAVCHAALGAQVIPVKNDSGSSLV

SEQ ID NO: 224182 - protein, 238 aa, Zea Mays
MMMQRRHASDGGEQRLRRQDVRRREIQPSHAAHLPVVRQQHVGEPRRQAAGGPGRQHGVRGRRPAVGQGGGDAARAPGLLLRVGVAPRRPRPGDGEPGRDVPAVGRAQPVGAVRRARGPDRRRPGPPLLPRRQVPGRGRGRRLRARVRRRGRVRRRRAGGGRVRGGRRRRVQPRRRGAVRERRRPHLRRPARVPTPAGGPLPRRVFLLRERRARAPSVVYCACACRRAARIHVVCCVV

SEQ ID NO: 224183 - protein, 685 aa, Zea Mays
MMGPLLGLDPWRSGPGCQRPSIYRIGWQLLQGASWINYPCLSASTDSIQRAGFASPTPIQAQSWPIAMQNQDVVAIAKTGSGKTLGYLLPGFMHIKRLQNSTRNGPTVLVLAPTRELATQILDEAVKFGRSSRISCTCLYGGAPKGPQLRDLDRGVDVVVATPGRLNDILEMRKVSLKQVSYLVLDEADRMLDMGFEPQIRKIVKEIPHRRQTLMYTATWPKEVRRIADDLLVHPVQVTIGSVDSLVANSSITQHVEIITPSEKQRRLEQILRSQDSGSKILIFCTTKRMCDQLARTLTRQFGASAIHGDKSQSEREKVLNQFRSGRSPILVATDVAARGLDIKDIRVVINYDFPTGVEDYVHRIGRTGRAGATGVAYTFFCDQDSKYAADLIKILEGANQRVPRDLEDMASRGGGRGRKRNHWASRPDRGGSRSELDSRYSSRDGLASSGKSESGRGSRGRDDNGSRGRYDPGETDGRSRRSTRGRSRSRSKSDSRSRSPSPKKSRRHEGRRSRTKSRSRSRSRRNHGASHSKSRSPVASRRYEKTASGSARPNSGHAEHKSPPRSHSRDDHVNHSDHKDDHKDDHMEDGKMERVDLDRSPSPHDDKSAPYSPVYNGKASGSMSPNGQPEAGAKFVEPSGKPEPASPVRCSKGRDDDEEGIIDEDGEIGEDDPRANAAVQNGNN

SEQ ID NO: 224184 - protein, 302 aa, Zea Mays
MIAMSSTPILLTILLAYLAFSANCERGNDEDTPAAGGHRRWQPNGDKTISGGSSDDEAATCVSSECEGSTCYCCPTMPTSPCFLDLDACLRVCHGRRRRRRPAAPLPEDETPVPSIAAAVNRHSQEVCSLPADPQPSDTNNSQLHNFIANITMPPEPPLIQTLPHNNLPNTANAIWVSPQQHINRPGQASTSGKRYSVRLAAKKKLMLGRSRDSISKAQDILVAKLYNSTTKNNLGSLASCSSNEVNHFEQIARLFARPLTKIQMEEIMELANHGKGKKINNKKGRKVAPFLAPVAPLALEG

SEQ ID NO: 224185 - protein, 150 aa, Zea Mays
MPPEPPLIQTLPHNNLPNTANAIWVSPQQHINRPGQASTSGKRYSVRLAAKKKLMLGRSRDSISKAQDILVAKLYNSTTKNNLGSLASCSSNEVNHFEQIARLFARPLTKIQMEEIMELANHGKGKKINNKKGRKVAPFLAPVAPLALEG

SEQ ID NO: 224186 - protein, 122 aa, Zea Mays
MEGGDSSGAGAGGAVAAAAKWRSDASRAFQYYLDRSTPHATGRWLGTLAAAAIYALRVYMVQGFYIVTYGLGIYLLNLLIGFLSPMVDPELDPSAASEGPALPTRGSDEFKPFIRRLPEFKF

SEQ ID NO: 224187 - protein, 225 aa, Zea Mays
MAEEIHQNQEEEEEEEVVAASTAKRRRKAASSGKKPKPTPKKAKPAVDGGPGMCPRAIAPGLALSASLTKSPPAPASEIIIWVREIQFILISPTIYMFILLSPSTLDGDGEQAAATLRSQCSPQHPRSWKVQQITVQAPLKDAESQKDVGKGDKSGDKGTAEKFAIYQKHRSSLADIVQFRRPAAPTSSVNADIVGTSTLQSASLPKQESSTATSKSYTFREGCV

SEQ ID NO: 224188 - protein, 633 aa, Zea Mays
MTGTTWIIDSQRFATKIKNASGSLDPSKQKWIGNPSKECPKCSHVIDNSDVVHQWPGLPKGVKFDPSDQELIWHLMAKHGKSGIKPHPFIDEFIPTVEEDEGICYTHPQKLPGVKQNGSVSHFFHRTFKAYNTGTRKRRRINTDDADVRWHKTGKTKPVLVDGKHLGCKKIMVLYISPLKGGKAEKTNWVIHQYHLGTGEDERDGEYVVSKLFFQQQFKPGDKNAQELTTSDDLESMAAESNLPDFTTLPTDKHVGTVQEVVHNPEHNLYQVVHQWPGLPKGVKFDPSDQELIWHLMAKHGKSGIKPHPFIDEFIPTVEEDEGICYTHPQKLPGVKQNGSVSHFFHRTFKAYNTGTRKRRRINTDDADVRWHKTGKTKPVLVDGKHLGCKKIMVLYISPLKGGKAEKTNWVIHQYHLGTGEDERDGEYVVSKLFFQQQFKPGDKNAQELTTSDDLESMAAESNLPDFTTLPTDKHVGTVQEVVHNPEHNLYQLNRNCEISIEETVVLPPSVKTTKDGDNLQSQDQKLWEGDSQFELLDSQQLAEGLALCDEFLLSQSQTSCGGGDEPRETKPCLAAYAHLSAEDFKKDLECQRLEPTDNTNLELDNTDEFRLSQIEFSQDSFMTWAAEKITDD

SEQ ID NO: 224189 - protein, 854 aa, Zea Mays
MTGTTWIIDSQRFATKIKNASGSLDPSKQKWIGNPSKECPKCSHVIDNSDVVHQWPGLPKGVKFDPSDQELIWHLMAKHGKSGIKPHPFIDEFIPTVEEDEGICYTHPQKLPGVKQNGSVSHFFHRTFKAYNTGTRKRRRINTDDADVRWHKTGKTKPVLVDGKHLGCKKIMVLYISPLKGGKAEKTNWVIHQYHLGTGEDERDGEYVVSKLFFQQQFKPGDKNAQELTTSDDLESMAAESNLPDFTTLPTDKHVGTVQEVVHNPEHNLYQVVHQWPGLPKGVKFDPSDQELIWHLMAKHGKSGIKPHPFIDEFIPTVEEDEGICYTHPQKLPGVKQNGSVSHFFHRTFKAYNTGTRKRRRINTDDADVRWHKTGKTKPVLVDGKHLGCKKIMVLYISPLKGGKAEKTNWVIHQYHLGAGEDERDGEYVVSKLFFQQQFKPGDKNAQELTTSDDLESMAAESNLPDFTTLPTDKHVGTVQEVVHNPEHNLYQVVHQWPGLPKGVKFDPSDQELIWHLMAKHGKSGIKPHPFIDEFIPTVEEDEGICYTHPQKLPGVKQNGSVSHFFHRTFKAYNTGTRKRRRINTDDADVRWHKTGKTKPVLVDGKHLGCKKIMVLYISPLKGGKAEKTNWVIHQYHLGTGEDERDGEYVVSKLFFQQQFKPGDKNAQELTTSDDLESMAAESNLPDFTTLPTDKHVGTVQEVVHNPEHNLYQLNRNCEISIEETVVLPPSVKTTKDGDNLQSQDQKLWEGDSQFELLDSQQLAEGLALCDEFLLSQSQTSCGGGDEPRETKPCLAAYAHLSAEDFKKDLECQRLEPTDNTNLELDNTDEFRLSQIEFSQDSFMTWAAEKITDD

SEQ ID NO: 224190 - protein, 586 aa, Zea Mays
MSQVVHQWPGLPKGVKFDPSDQELIWHLMAKHGKSGIKPHPFIDEFIPTVEEDEGICYTHPQKLPGVKQNGSVSHFFHRTFKAYNTGTRKRRRINTDDADVRWHKTGKTKPVLVDGKHLGCKKIMVLYISPLKGGKAEKTNWVIHQYHLGAGEDERDGEYVVSKLFFQQQFKPGDKNAQELTTSDDLESMAAESNLPDFTTLPTDKHVGTVQEVVHNPEHNLYQVVHQWPGLPKGVKFDPSDQELIWHLMAKHGKSGIKPHPFIDEFIPTVEEDEGICYTHPQKLPGVKQNGSVSHFFHRTFKAYNTGTRKRRRINTDDADVRWHKTGKTKPVLVDGKHLGCKKIMVLYISPLKGGKAEKTNWVIHQYHLGTGEDERDGEYVVSKLFFQQQFKPGDKNAQELTTSDDLESMAAESNLPDFTTLPTDKHVGTVQEVVHNPEHNLYQLNRNCEISIEETVVLPPSVKTTKDGDNLQSQDQKLWEGDSQFELLDSQQLAEGLALCDEFLLSQSQTSCGGGDEPRETKPCLAAYAHLSAEDFKKDLECQRLEPTDNTNLELDNTDEFRLSQIEFSQDSFMTWAAEKITDD

SEQ ID NO: 224191 - protein, 243 aa, Zea Mays
MAREMEKAKKAASSPKSSTISTGPKSPVRNGGGSSPPHKKNTTTTEARGRKHEQQNVRKGGDTLSHDESKPRRSSSTAAQTSPKRSPRHEQPLSYNRLHTEERAIRRAGYNYQVASKINTQEIIRRFEEKLAQLMEEREIKLMRKDMVPKAQLMPAFDKPFHPQRHANPISLSLPLNISLYIHCILHIYGIYETIQISQLLLHPIISAYIFNTKGKNEYTSKIECTTIKYPFNLLDYSGRRGL

SEQ ID NO: 224192 - protein, 770 aa, Zea Mays
MTRRVRRRTCREREGKVVRGASRVVSAGPEGEEDAAAVEVDWRALPDDTVLQLFARLNYRDRASMASACRAWRALGSSPCLWRTLDLRAHRYDREVASSLASRCGSLRRIRLRGHEAAEAVLGLRARGLREVVADGCRGLTDATLAVLAARHEDLQSLQIGPDPLERISSDALRHVALCCSQLCRLRLSGLREVDAEAVGALARCCPLLEDVAFLDCGTVDEAALAGIHSVRFLSVAGCRNLKWATASTCWTQLPSLIALDVSRTDVPPSAVSRLISHAKTLKLICTLNCISVEEEQLHNPAVFSNSKGKVVLTINSDIFKSFETMFPVVDVKEHEFFNQCNWSHKDKIPGDTMTWLEWILSQSLLRIAESNPQGMDGFWLQKGTTLLLRLLKSLQEDVQERAATSLATFVVMDDESANVDPARSEAVMQNGGIRMLLDLARCSRESAQSEAAKAIANLSVNTKVAKAVADEGGITILINLAKSMNRLVAEEAAGGLWNLSVGEDHKAAIAVSGGIKALVDLIFRWPAGTDGVLERAAGALANLAADDKCSLEVAKAGGVHALVTLARSCKLDGVLEQAARGLANLAAHGDNNDNNAAVGQEAGALEALVQLTSSQNEGVRQEAAGALWNLSFDDRNREAIAAVGGVEALVALVQQCLNASEGLQERAAGALWGLSVSEANSIAIGQGGGVAPLLTLARSEVEDVHETAAGALWNLAFYSGNALRIVEEGGVPVLVKICSSSRSKMARFMSALALAYMFDGSNSIWKTWA

SEQ ID NO: 224193 - protein, 483 aa, Zea Mays
MERPWLILGRILYVNPPRDDDDMLEVEDAEEHAVVGEAQAEEDAQAQEEQHAAAVDAVVEAHDDQQAEVGEGGAEAEAEEEEQQAQLEESILNVNTDAAASEAAHAAHGAAEPDFTIWVAPPPWLTDLVAGPGSHPDPARPDMYPYIIASGRFCLLVHFSIAPFYGTNFEKEPNHSNLVVVRHFRRSDNGQIEARAVHVPDRPEDNVNIPALANIESVGLICNHETGHYLIAELVVPTDNQDESSVIYIRTEDGVWYSNYFAYPFWWESRRHWVPHGSVTIGNVVFWFDLSWGIIFCDDLTQPHEEQILSFFRLPRGCVLRDGHAPDLHYSRCVAVSENVLRYVQIIRKHDQAATVHMWYRNPERWITNYNESFDDIWDDESYIQTGLPRKSPGLVGVSPVDSNVVYFTLDQRLFGVDVPEHRVVDCAESVEPLNRTEMLDDSVSSRSLITWNLDADGAAWQTISMDFISGLPKFGHANNILQ

SEQ ID NO: 224194 - protein, 653 aa, Zea Mays
MGLSLNIDMSSTAFIEPLPVIEFVAQILGKDVISRPLSDANRIKIKKALRGVKVEVTHRGNVRRKYRISGLTTQPTHELIFPIDEQMNMKSVVEYFKEMYGFTIQHPHLPCLQVGNQKKANYLPMEACKIIEGQRYTKRLNEKQITSLLKVTCQRPREQEMDILQTVHQNDYEQDPYAKEFGINISEKLTSVEARVLPAPWLKYHDTGKEKECLPQVGQWNMVNKKVINGCKVSHWACINFSRSVPETTARGFCQELAQMCQISGMEFNSEPVMPIYSARPDQVVKALKNVYNIALNKLKGKDLELLLAILPDNNGQLYGDIKRICETDLGLISQCCLTKHVFKISKQYLANVSLKINVKMGGRNTVLLDAISWRIPLVSDIPTIIFGADVTHPETGEDSSPSIAAVVASQDWPEVTKYAGLVCAQAHRQELIQDLYKTWHDPQRGTVTGGMIRELLISFRKATGQKPLRIIFYRDGVSEGQFYQVLLYELDAIRKACASLEPNYQPPVTFVVVQKRHHTRLFANNHKDRSSMDKSGNILPGTVVDSKICHPTEFDFYLCSHAGIQGTSRPAHYHVLWDENNFTADEMQTLTNNLCYTLMYTDAVMPGAHARFLLSLLHTTHTWQHSGLGSTWNQRCWTTRRPRPPMARAESR

SEQ ID NO: 224195 - protein, 167 aa, Zea Mays
MLLWIRSASTLRQAGRSLGLAELSYATGFDSPSTQTNGPYYFEDLVDMMYDKISESFNAYFEDNSIEEVAEQFLIIHEECLQNNYSSIEKLRNSPVPGNAVSQSRQIVGDDDDDSDSSDDGDDTSMVADEEAGPEEMAVDRPRPPKPTPDADGWTVVPPRRGGRSKK

SEQ ID NO: 224196 - protein, 130 aa, Zea Mays
MCTIQEIPAQHRGDAVSSLVYEANARVRDPVYGCVGAISSLQEQVEALQAQLALAQAEMVRLRMTNDYIVHRLKAASRAGGGGSSYAGSPSSMSSPKTAEPEAHCKATPELLDMVVDQPGMDDAHFWSSY

SEQ ID NO: 224197 - protein, 186 aa, Zea Mays
MGAYATTGMQMIATRPSIPAYRQILGSTSALSAFGRSICSRTGFAISSKATSAGPLVSSNCKRVVVRAMSQRGAQGLPIDLTGKRAFIAGVADDNGYGWAIAKALAAAGAEILVGTWVPALNIFETSLRRGKFDESRKLPDGSLMEIAKVYPLDAVYDTPEDVPEDVKANKRYAGASNWTVKLLRL

SEQ ID NO: 224198 - protein, 415 aa, Zea Mays
MDMPNDTCSSPKLHTRLRLWEFADCYVFEPVGLNDLLLSVNRINGSMNLVEELPQHGPSINPKVQIVFGVIGVLKLAVGTYILVITDRDCAGSYLGHAVFKVRGLRALPCNNSLSASAEQKKVGIEFSELLDAAERTLGLYFSYDSNLTVTSQRLHELGDEFKSLPLWRQAEPRFLWNGYLLEPLIENKLHQYLLPVIQGSFQNIHAEVRSEKVNVTLIARRCRWRIGTRMWRRGADPKGYAANFVESEQIMQSKGFTASYVQVRGSMPFLWEQIVDLTYKPGFDVVRVEEAASVLERHFHDLQKKYGAVVAVDLVNTHGGEGRLYERYAKSIEPILSEDIRFVHFDFHRICGHIHFERLSQLYDQIEDYLKKHKYFLLTDKDEKIAQQTGTVRTNCVDCLDRTNVTQDGCALFH

SEQ ID NO: 224199 - protein, 555 aa, Zea Mays
MDMPNDTCSSPKLHTRLRLWEFADCYVFEPVGLNDLLLSVNRINGSMNLVEELPQHGPSINPKVQIVFGVIGVLKLAVGTYILVITDRDCAGSYLGHAVFKVRGLRALPCNNSLSASAEQKKVGIEFSELLDAAERTLGLYFSYDSNLTVTSQRLHELGDEFKSLPLWRQAEPRFLWNGYLLEPLIENKLHQYLLPVIQGSFQNIHAEVRSEKVNVTLIARRCRWRIGTRMWRRGADPKGYAANFVESEQIMQSKGFTASYVQVRGSMPFLWEQIVDLTYKPGFDVVRVEEAASVLERHFHDLQKKYGAVVAVDLVNTHGGEGRLYERYAKSIEPILSEDIRFVHFDFHRICGHIHFERLSQLYDQIEDYLKKHKYFLLTDKDEKIAQQTGTVRTNCVDCLDRTNVTQSMIGRKLLESQLQEIGVFVANDTVSDFPDFDANYKILWANHGDAISTQYSGTPALKGDFVRYGKRTTQGILNDLWNALARYYLNNFADGTKQDGLPLCFLLVVISIDSTTSSSTIGAMCHLLAGLTVVAPYMTIDVRSHLHDVLKLG

SEQ ID NO: 224200 - protein, 55 aa, Zea Mays
MLFCAVCSSFRSSHLRPPFVEERAWMRALFFLLFLLFTIQKVETRKKKTEILNNT

SEQ ID NO: 224201 - protein, 55 aa, Zea Mays; identical to SEQ ID NO: 224200

SEQ ID NO: 224202 - protein, 55 aa, Zea Mays; identical to SEQ ID NO: 224200

SEQ ID NO: 224203 - protein, 55 aa, Zea Mays; identical to SEQ ID NO: 224200

SEQ ID NO: 224204 - protein, 375 aa, Zea Mays
MDRSAATPPRTSDFASHRFVSKRRMFLSLAQSPACAVVSFPWRSSSQLIPRVPSRCTLACHAAVPKVPLPIASPASLGDDPSKWDPAECDALLRGGEQVASVLQEMVTLMEDMEMDGAFEQVAVELVAQGVIGKRVDEMESGFLMALDYMIQLAQKDTDDERKSILEVIKQTVLDHLTKKCPPHVQVVGLLCQTEKKESRHELLRRVAAGGGVFKNDKGLKCQIPGANLNDIANQADDLVESMESRDTIPDRKLLARLVIVREEARNMMGGGLLDERNDRGLTTLPEAEVNFLSKLVALKPGKALERMIKNVMNGRGEGADNVEQPSADSHSEQESLTGVLGRGSVSGHKPRPVRPGMFLETVSKCFLFVCNFVA

SEQ ID NO: 224205 - protein, 271 aa, Zea Mays
MMRETYMDVLPPVDHIAARSNWFPAAARLWTAAENKQFERALAGLDLCRPDWEEVARAIPGRTVREVVSHFKHLEVDVQQIESGQVPLPAYGGGASSFTLQWDGYGPGPGDFRHGYRFAGGCGRRHHGRTPEQERKKGVPWTEEEHRLFLLGLKKYGKGDWRNISRNFVQTRTPTQVASHAQKYFIRLNSGGKDKRRSSIHDITTVNLTDDQPPSPSQSSLITSQSNAPAPSPAPAPAAGICQVPLAADVKRHGAGTLPFSSPNRTSAGIS

SEQ ID NO: 224206 - protein, 237 aa, Zea Mays
MMRETYMDVLPPVDHIAARSNWFPAAARLWTAAENKQFERALAGLDLCRPDWEEVARAIPGRTVREVVSHFKHLEVDVQQIESGQVPLPAYGGGASSFTLQWDGYGPGPGDFRHGYRFAGGCGRRHHGRTPEQERKKGVPWTEEEHRLFLLGLKKYGKGDWRNISRNFVQTRTPTQVASHAQKYFIRLNSGGKDKRRSSIHDQDAYSGGQPCAEVLHEAQLRRQGQEKIQHPRHHHS

SEQ ID NO: 224207 - protein, 156 aa, Zea Mays
MGLHGGVVVLRAAVLAAVLGFVAAAGFISNDALLERGHDTTGRSLLQAKKDCPVSFEGANYTVITSRCKGPLYQPTLCCGALKDFACPYSTYINDVSTNCAATMFSYINLYGKYPPGLFANTCHEGDKGLTCPEDTPQIEPGQKAALAVSLLLMSC

SEQ ID NO: 224208 - protein, 110 aa, Zea Mays
MCHSGNYVLVGDQQTESASPSNCDQDNANSSRGNEVPASRCRDFGIPSSESISLNELKRKEPDLDMETPASYKEPKTNVGGRSSSQSNGRGSHKSNKREKLDFNHLRPKK

SEQ ID NO: 224209 - protein, 375 aa, Zea Mays
MELSSLTQTNMSLPFITATADGPKHIETTLTRAKFEELCSDLLDRLRTPVDNALRDAKLQFKDIDEVILVGGSTRIPAVQELVKKMTGKDPNVTVNPDEVVALGAAVQAGVLSGDVSDIVLLDVTPLSLGLETLGGVMTKIIPRNTTLPTSKSEVFSTAADGQTSVEINVLQGEREFVRDNKSIGSFRLDGIPPAPRGVPQIEVKFDIDANGILSVSAVDKGTGKKQDITITGASTLPKDEVERMVGEAEKFAKEDKEKRDAIDTKNQAESVIYQTEKQLKELGDKVPGDVKGKVESKLQELKDAVAGGSTQTMKDAMSALNQEVMQIGQALYSQQGAPGAGPGAADASSAGSAGTSEKPGDGGDVIDADFTDSK

SEQ ID NO: 224210 - protein, 127 aa, Zea Mays
MVPHTAAQACAWHGGPRTAPFGAAGAAKPSLPQHTPRHGGWRRSISWTSAGFEEDVDGLQQVSRPDCVEESQSPLSALTLVYRAGWAAGNDRRPPQRGWLAERCGRRCCSSIPPTRASRPTHGVDRL

SEQ ID NO: 224211 - protein, 591 aa, Zea Mays
MPPPLPHSCSCAEVRPCSLFRPSVGSWTRQLALQMTALGGESGFWARSPWWSERRQRKTPALLYYVHMITNRLPTGENADMFKQPARVSSTITTLTVSVKMMRVMDKLKGKKRGDRGDSSRSRSTRGSGLYSVKAAARAAPWLHGGAGREVASHSAPGQEREVAGHSAPGQEREVAGHSAPGQEREVACHNALEPEREAIGSSGPMLEQDHNAFEQAREAADHNAPSQEDELARQGSPMRDDDDYGEDYDGEADGEADDEVVTTTQATNFRLGIGDGVVSRDSFGRRSVSSAGSRSRTSTSSVEECKTTKCLNKMNKDADPMGGKRLKMYSAQMGSPMGPQFTRPSQSGQTPNTNETQGSETGQGNPQMDIQWSMPPRGQILPPPQPGMGYWPPPPWGYPTHPMGPWGRPHGQHSHFRHQRGVSTEHTREWRTAGVLGSRMGALTLAPQLSSAPKGKIAGKKVQVDERFTEITKIVLRLYPLYLGVFNKYENKSSRILIELDDQKVAWTIWKKIQLESSVLDSKSAMRVTVLSHSPHLLFFTREKELAVVKINPVDVEIIASELELDKKIAERALCEHKGDVVAAVRFLLR

SEQ ID NO: 224212 - protein, 349 aa, Zea Mays
MYRAIDTSSVLWMLLSARANRKRRKEMGGGCPTSPCQPHSLHTTRGHEHHSCLSHGPRAAQHLHLSKWQPAAVPFLHPLPSSQSQPLTMAATLSSVAAPSLPKHIPVTRAQQQAPPSIISASTQKTAFHGVSLVVDRRWAAGHRRGGGRRRLLQVNARTAAKNIEVEVEKPLGLALGQKPGGGVVITSVESGGNAARAGLKTGDQVLYTSSFFGDELWPADKLGFTKTAIQAKSDSVYFVVSRGAEVDVKRLPKRPAPPRFGRKLTDSQKERATHVCLDCGYIYFLPKPFDEQPDDYGCPQCNAPKKRFARYDAATGKAIGGALPPIAVIVSLVIGIAGVGALLVYGLQ

SEQ ID NO: 224213 - protein, 700 aa, Zea Mays
MCACIWSCPPQNIFGFPAGFVLSFFCDNHLLELFSPLQWLNVKGGSGCYVKKVREELESMGCQIKTGCEVRSVSRFNGGYRILEADGSEEMYDRIIFCVHAPDALKILGEEATPHERRVLGAFQYIYSDLYFHCDESFMPRNSSAWSAMNFLGTTSSGVCVTYWLNILQNIESAGPFLATLNPPRVPDHVLLKWHTRHPIPSMAAARATLELNSIQGKRGIWFCVPYQQGYGNHEDSVKAGKAVTLGLLGKKCDLLVNPKPMIVPSWTEAGVRYMVAKNLGKFITIGNFSMLEDGGTSLSFGKTCERCQLKCVIRVHNPQFYWKIATEGDPGFAYSYINGYISFVDKKEGIQNIVEIIIANRGERKRLSSTRARNKSGYVKKGWWTPLFKKNGAAMAKYVLHEVLRRNTISKARKNISAHYDLSNDFFALFLDPTMTYSCGIFKAEDESLEAAQLRKLDNLINKAKVDPGHHVLDIGCGWGSLAIRLVKRTGCKCTGITLSEEQLKYGKRKVKEFGLEDHITLLLCDYRQIPNGQKFDRIISCGMLEHVGHEFYEDFFASCEYHLAEHGLLVLQSIAVPEELYDKMRTKPDFLKEYIFPGGCIPSLARIASAMSNASRLCIQHVENIGYHYYPTLIHWRENFEANEEKVLALGFDEKFIRTWEYYLNYCAAMFKSHMGLDYQIVFARAGDAKLPSYVAIA

SEQ ID NO: 224214 - protein, 523 aa, Zea Mays
MTEDRAHKVADEPAASGRQRPERKKRKWDQPAEDLVSAAVTAAAVSGMPVMNFGALPGVVLPGVTAYGAATLPSVVPVPYSLPPHIAPSVLQNAAAAAQKLSQAKIPDEVIAREIVINDADPSVRYKLTKRQTQEEIQKCTNTVIITRGKYHPPNLLPDGEKPLYLHISAGSQLKDTAERIKAVDRAASMIEEILKQGTTSESISVPFSSSTGQAVRPFSASVFLGFDADPSLNITARIRGPNDQYINHIMKETGVTVVLRGKDSENLGSCHSEASQQPLHLYLTSMHLKNLEAAKVLAENLLDTVAAEFGASRISSSKVYGAVPPPQQLLAGVDTSGTKSDVHYIVGPNVLSGATHSFASTGVIAPVVAPAVTVQSGAPTYSGVPLPSNMAYPIPPANGGAFYSGYGDIYPQATPLQQLAFTLKHASSSATQAVPVTSTPTSMATKGNSILDAEMDKRSRRKFQELPVSKGPATESQRKFCICKIFTFSGSSKQYKYTNYTRSFHMKLHLVKQTRLIFVMLL

SEQ ID NO: 224215 - protein, 319 aa, Zea Mays
MERYAPTAKDLASRDVVSRSMTMEIREGRGVGPLKDHIYLHLNHLPPEVLKERLPGISETAAIFAGVDVTKEPIPVLPTVHYNMGGIPTNYHGEVVDIKGNNPDAVIPGLMAAGEAACASVHGANRLGANSLLDIVVFGRACANRVADISKPGEKQKPLEKDAGEKTIAWLDKLRNANGSLPTSKIRLNMQRVMQNNAAVFRTQETLEEGCELISKTWESFHDVKLSDRSLIWNSDLIETLELENLLINACITMYSAEARKESRGAHAREDFTTRDDEKWMKHSLGYWENEKVRLAYRPVHMKTLDDEVESFPPKARVY

SEQ ID NO: 224216 - protein, 223 aa, Zea Mays
MREHERRVWSVDFSIVDPTKLVSGSDDGSVKLWDMNQAGSIGTIKTRANVCSVQFQPDTARSIAIGSADHKIYCYDLRHIRAPYCTLVGHTKTVSYVKYLDASTIVSASTDNSLKLWDLSMSPGRIIDSPVQTFKGHTNTKNFVGLSISDGYIATGSETNEVFVYHKEFPMPVLAYKFSVTDPISGQEIDDQSQFISCVCWRGQSSTLLSANSSGNIKILEMD

SEQ ID NO: 224217 - protein, 52 aa, Zea Mays
MGLQEEFEEHAEKAKTLPESTSNENKLILYGLYKQATVGDVNTAVLTCLFVN

SEQ ID NO: 224218 - protein, 447 aa, Zea Mays
MALPSATVLWTASITFRLAQNMVVLFFLAALLAAPARSSSPSSNNGAGLQQPTLTLCSGHSTVAKSGEFASFLAAVCAGAYGGGVAHMSHSMSSYVAAENRTMYGVAQCRPDVSASDCTACLAAASSKLITGTACATSAVWHDACFLRYSDRDTGRFREDEHTETVFNASRALSSLPPHVGANKAVVVRRLLAAVADSTRSGHMCSDIGVGTGAAGGGRIYGLTRCAAEISCADCRRCLGGALAVVEREYNGSAGMQVLRLSCMARYESYPFYNTKFLTRRLLASATSGSPRPTHGGIVFNSSISFGPFGLVHSGGPNPPPSPPVSPPPPAFTTISVPASVGTAQPTPPPSRPAQAQPSPPPPAASMIVSGPATATPRAAQAQPTPAPPGGHNPPPASPPPASIMNISGPATATPTPRAAQPTPAPPGGPTPQPVAAATNGKTKLSL

SEQ ID NO: 224219 - protein, 122 aa, Zea Mays
MWLSTHSAQYFLVFASLAWSQSIMKSSVGTHVTFYELQVNNALMDLIKATGSAMKPEEWSAQPENTSETGALISARPITVTMRTDEGVIVMGFEHIRNIVRIMKPDQNTCKLFFETLLWESR

SEQ ID NO: 224220 - protein, 253 aa, Zea Mays
MWRRRVGALLRSPRTSSSASSACQSRRHHLLPSEEPLALNRLARLFTSQAGSDGGDTQKPFIAFVLGGPGSGKGTQCTKIASDFGFAHLSAGDILRHEIASGSEKGELILEIIKEGRIVPSEITVELIRKAMEMNNAKRVLIDGFPRCEENRIAFERIVGTEPDIVIFFDCPEDEMVKRLLGRNQGRVDDNIETIKKRLKVFESLNIPVVDYYSSRGKVHKINATGTADEIFEAVRRLFSSLRGPFRSSCPIH

SEQ ID NO: 224221 - protein, 263 aa, Zea Mays
MMRANREQRVAFSSTKEAAAVPKEEVWEVRPGGMLVQKRSPDADPPPGGAPVPTIRVKDRSKMVMLEDPAAKAKRLLEERRTGKAERAAKAIARAALDVDKLATKVSALETIVSKGGKVVDADVVTLTEALMNELVKLDSVAAEGEVKAARRAQEKRVQKYVETLDAIRAKNKAAAAAAPAKARSGSNKARPPRPPPASAHAHQSQQQRRQFQPPAPVSQTQTASWETFDLLSSVPSTSAAPVTTMAPATSTTPSPRFDWELF

SEQ ID NO: 224222 - protein, 490 aa, Zea Mays
MALAKTLLLVLVVAAAWTAAAAARHRRSHEDYYENVFDRQQADRVESLPGQPSEVGFRHFAGYVTANESHGRALFYWFFEAAHDVAKKPLVLWLNGGPGCSSVGYGALEELGPFLVQKGKPEISLNPNSWNKEANLLFVESPAGVGFSYTNTTKDLTQFGDELTATDAHAFLLNWFKRFPQFRHHDFYLAGESYAGHYVPQLGVKILEGNKKAHRKDRIKLKGIMIGNAAIDSSSDDRGLAEYAWDHAVISDEVYGAIKKECTFSDDGDESDKCGQAWNDFFNVMRDIDLYSLYTPACTDAMANASRSNSSSASRRRSWNLADTPLAKVHRGMPYNTYDPCVDNHVFDYLNRADVQKALHANVTGIPYSWEPCSDALSNWTDSPASTLPAIKQLVDAKLRVWVLSGDTDDRVPVTSTRYSLRKLGLATAKEWREWFTTDQVGGYTLVYDGLTLVTVRGAGHMVPMITPVQASQVFAHFLHGSEMPAKPVV

SEQ ID NO: 224223 - protein, 147 aa, Zea Mays
MKRVFNILRENNPDLAGDRRRTVMRPPQVLREGTKKTVFVNFMDLCKTMHRQPEHVMMFLLAEMGTSGSLDGQQRLVIKGRFAPKNFEAILRRYINEYVICNGCKSPDTILSKENRLFFLRCEQCGSSRSVAPIKAGFVAQVGRRKA

SEQ ID NO: 224224 - protein, 52 aa, Zea Mays
MRKSTLLSLPRIFWTTIILSLSSVPFLWPPYFAHGGDRSGDSGALLQTVPVG

SEQ ID NO: 224225 - protein, 205 aa, Zea Mays
MDTGSGPGLQYLLCLAWVAATLPIAAAALPIPRAAGGRFIHGLLCAFSSRGKTVRPSSSSSSKRFTVPQKFFFHFYVVGVVVTTSLLLAIWFYAYMKMTPLIPEPSSYYSTIASHLVGGSNSFSLTNFWLSRPMKHKYHVWRTVFVLILMEIQVLRRLYETEHVFHYSPSARMHIIGYLTATMWLHLYRLLVLVFLKQYSIFGIK

SEQ ID NO: 224226 - protein, 243 aa, Zea Mays
MVHREPAEAAAAAAAGGETSISTQPPSSSQQAAPPPAVLVYKVGYPPRRSLATEFTSTLRETFFHDSPLKQCKDQSVSTKLQMGLQLLFPVLGWGRTYSLSMFKGDLVAGLTIASLCIPQGKRNKKYFWVPAIAPVTSVILATLFVYLFRADKQGVQIVNKIKKGVNPSSVHKIYFTGPFVAKGFKIGAVCGMIGLTEAVAIGRTFAAMKDYQLDGNKEMVALGTMNIVGSMTSCYIATGFPQ

SEQ ID NO: 224227 - protein, 75 aa, Zea Mays
MSPVIDIDTSGIHALEDLYKNLQKRGIQLLLSNPGSAVIEKLQSSKLTEHIGNGHIFLTVADAVRFCTSKSMQEP

SEQ ID NO: 224228 - protein, 703 aa, Zea Mays
MEPKTLLPRAAFYPTEKTEGQSKNTLDQITEVDDGGYMNLGDLFDKLDHESNVTQPANAEEAKKRKLARARNRKNSKLPSRVKLCTKGSDAEHQVKNIPVSIAAKPNQKDINKKKRCTLNGGNKVSGNNTKVVFSSDKYMYTFSPQSGGLDIEAPENQPSERILKKPKNSRSKLHIAGDSAVKTAKNKSEQRVKQTIRCSGGVVDENLRVLSEAENEIESFQLHRLAKGCTQHKPFDDRSKQNMESNIGPNTPSILPGRCQFDEAIHTIPTVKNVSVKNGRAKSIEQPDYPGSIRLCTAHNTALKKCEGKASKLSCAFCQSDDTTQESGEMVHYHNGKQVPAAFDAGAGVVHCHKNCLEWAPDVYFEDDSVFNLANELARSKRIKCACCGIKGAALGCFETSCRKSFHLTCARLIPECRWDNENFVMLCPLHQSSKLPRETSGFKNKSHRKLARKSSSEVNTSQSHDNKWTWPSGSPPKWVLCCSALSAAEKGIVSELAKIAGVPISTSWSPNVTHVIASTNMSGSCKRTLKFLMAILNGKWVISMDWVKTCMELMEPADEMKFEVSTDVHGTADGPRLGRQRVINKQPKLFDGIQFYLHGDYTKSYRGYLQDLVVAAGGTVLQRKPVSRNHQKLLDESSLILIVYSIENQDKAKPGSSDGMDTGRSQADAQALACASGGKAVSSAWIIDSIAACNLRPSMLP

SEQ ID NO: 224229 - protein, 86 aa, Zea Mays
MLRLHHHSAPVSPHAAICPPSRLACSCICNKPNSRITASQGWSSIRRRITTVASGQSVPGYTPDDGDQCLETGNKLSFATVKEAFI

SEQ ID NO: 224230 - protein, 92 aa, Zea Mays
MATAEVQTPTVVATEEAPAVETPAPPAVVPEEAAPAAEAKVEEPAAPAETEPAAAAEPEAAAAEEEPAAAEPAAEEPEKAEPAAEVAEKASE

SEQ ID NO: 224231 - protein, 603 aa, Zea Mays
MDETPTSSGQSEDSSCEPNWWPPDLLEKIESASISRKHDVLGNLRSSSWKASQLLWSTGSYSGLIPNGFYSIIPDKKLKETFPTIPSVDDLQTLEADGLKADIIIVDTERDKKVFMLKQLSAALVKGLSSSPALVIKKIAGLVFDCFKRQNPDASPAKGSIEDTHFFGYKGPQLLGQIRHGSCRPRAILFKVLADAVGLESKLVVGLPDDGAVGFVDSYKHMSVVVSLNSMELLVDLMRFPGQLIPFSAKAIFISHISAAGESDSAENDSCDSPLEPNSPLYGLSDKVETEGIESSSNLSGRSLRNMMLRSRTFSEGKLSTSCSEPNIANAFWRHSQRRGVAEEPRGASSSPEHPLMRARGRSILGGEKQSFQEYTESGAASRSDGLGGTSTSNARRIRRRSISITPEIGDDIVRAVRAMNETLKQNRLQRDHVEGSCSYVTEDQSNANDCPNKDDASRIIGATDSDSRNRTGPTQKAMSLPSSPHEYRGQDTQKGDDFISKEKMALAWNKVFQSSPFLNKPLLPFEEWNIDFSEITIGTRVGIGFFGEVFRGIWNGTDVAIKVFLEQDLTTENMEDFCNEIYILSYIVSWCMHYTSTLVNGY

SEQ ID NO: 224232 - protein, 571 aa, Zea Mays
MSVVVSLNSMELLVDLMRFPGQLIPFSAKAIFISHISAAGESDSAENDSCDSPLEPNSPLYGLSDKVETEGIESSSNLSGRSLRNMMLRSRTFSEGKLSTSCSEPNIANAFWRHSQRRGVAEEPRGASSSPEHPLMRARGRSILGGEKQSFQEYTESGAASRSDGLGGTSTSNARRIRRRSISITPEIGDDIVRAVRAMNETLKQNRLQRDHVEGSCSYVTEDQSNANDCPNKDDASRIIGATDSDSRNRTGPTQKAMSLPSSPHEYRGQDTQKGDDFISKEKMALAWNKVFQSSPFLNKPLLPFEEWNIDFSEITIGTRVGIGFFGEVFRGIWNGTDVAIKVFLEQDLTTENMEDFCNEIYILSRLRHPNVILFLGACITPPHLSMVTEYMEMGSLYYLIHMSGQKKKLSWRRRLKIIRDICRGLMCIHRMKIVHRDLKSANCLVNKHWTVKICDFGLSRVMIDSPMTDNSSAGTPEWMAPELIRNEPFTEKCDIFSLGVIMWELCTLSRPWEGISPVQVVYAVANEGSRLEIPEGPLGRLIADCWAEPENRPSCQEILTRLLDCEYTVS

SEQ ID NO: 224233 - protein, 472 aa, Zea Mays
MLCSSTGLDGDDIPEHGRTPSLLTCSWRAITPEHPLMRARGRSILGGEKQSFQEYTESGAASRSDGLGGTSTSNARRIRRRSISITPEIGDDIVRAVRAMNETLKQNRLQRDHVEGSCSYVTEDQSNANDCPNKDDASRIIGATDSDSRNRTGPTQKAMSLPSSPHEYRGQDTQKGDDFISKEKMALAWNKVFQSSPFLNKPLLPFEEWNIDFSEITIGTRVGIGFFGEVFRGIWNGTDVAIKVFLEQDLTTENMEDFCNEIYILSRLRHPNVILFLGACITPPHLSMVTEYMEMGSLYYLIHMSGQKKKLSWRRRLKIIRDICRGLMCIHRMKIVHRDLKSANCLVNKHWTVKICDFGLSRVMIDSPMTDNSSAGTPEWMAPELIRNEPFTEKCDIFSLGVIMWELCTLSRPWEGISPVQVVYAVANEGSRLEIPEGPLGRLIADCWAEPENRPSCQEILTRLLDCEYTVS

SEQ ID NO: 224234 - protein, 147 aa, Zea Mays
MEIILGGVASISDEISWFKNEATVWGVDLASVSPLKANLEYHRFLRSFTEPEISYAVAVTTFWTIETVYQDSFGFCIQDGNKTPPELLGTCQRWGSAGFRQYCQSLQSIVDRCLANAPADAVQSAEEAFVRVLELEIGFWDMSSSRS

SEQ ID NO: 224235 - protein, 124 aa, Zea Mays
MRALNYGVDIVVGTPGRVIDLLRRGVLNLSQIQFVVLDEADQMLAVGFDEDVEVIMEQLPQNRQSMLFSATMPSWIRKISNKYLKDPVIIDLVSDFFYYLRVIFVLLSLACLVTIVHSFVCMYI

SEQ ID NO: 224236 - protein, 168 aa, Zea Mays
MEDAGREGGTAAENGTEGEGYVLVKAAPEGEGDPTAAAAGGDREDLAASAPAMAMAVAAADEAAAPAKKGGSGATKARLQNGRVPAGTSAAAAAAGPRVKKPGVLSQSASFPARGAVAVAAKKAAAAVATPKQAKGAVPIGSETAAGRAVEKKASLARTPVARRPMVR

SEQ ID NO: 224237 - protein, 503 aa, Zea Mays
MAAAEGQVRRDMWGQEYRTSSADCAAALDAYYAAFMSFGRGRVAAVLRAAAADPTCALAAAHAAQSVAPRDPAGAAAFLNAAADNLGKATEYERAVFGTLSVLVGEKRDEEVAIERHFELLEQFPRDLLSLKRAQLICFYMGKPDLSLKFVQQVLPKNQDQNFIYGMLAFPLLELGRMDEAERAARRGLAINKNDFWSQHNLCHVFQQECRFREATEFMESCSPSWEACTSFLLTHNWWHVAVCYLEAESPLCKVLEIYDHNIMKELEKSDCETAEVYLNGLGLLLRLFIRGHIDSAKERLTTLLDALKNESIWHVEWLLDLLILWALSSMGELKSAHNMLESLKSRVRLMDRNRQQAMQKAIKLAEAAYEYGKGDHMKVYDTLGPDFDALGYKMIGASDEQVDVFNEVWYTVLINAGETSKAIEILGKQIRKREGAPFLWRLLEKSYSLAGRSADASVASKKLPVCTIGSLQSVYIPHNQQFRILEHVQCINMTMHATCCTK

SEQ ID NO: 224238 - protein, 426 aa, Zea Mays
MGPCLQLAKQLAQMDSIRKSILQKAFDLIDTNGQGYLNKEQCISLLDELNKYRSLPKTWREDFELIFSELDRSGDFKVTSEEFADLCNTIAIKFQKEPPPSYLEKYPSFYHSPQCERLKSFVRSRLFEYIVVFVLLVNLIAVVIETTLDIENSSSQKVWQEVEFVFGWIYVVEMALKIFSLGFGAYWMEGQNKFDFVITWTIFIGETLTFAFPSTLPFLSNGEWIRYLLLGRMLRLTRILLQIRRFRAFVATFFTLMSSLLPYLGTVFCILCVYCSIGLQFFGGIVYAGNLKLEETDLFGNDYLLFNFNDYPSGMVTLFNLLVMGNWQVWMESYAHLTGSSWSLVYFISFYLISVLLLLNLIVAFVLEAFFAEMELEKAGEADTQDSTPQGRNKRRSMRVRTKGTMVDILLHHMLSNELDGSQNSD

SEQ ID NO: 224239 - protein, 733 aa, Zea Mays
MALRHLVTGQNNCVPDGASSSNPLNALANAFLGQSSKAQSIKELPGSVNVPSTSDFSVSAPLSNIPGSENEFKQDQRPLARGADFIRGGPANDWIESFRPPRVPQLGVEAQFPDFEQIYNNAGTTFQFQPPLDGPPQRVLSGVLHSFLTSGPAGVPFQPLPVPAALGLSESDKQCIRDRSCIMARHIFSDQPEEYIQSQVNTLLHSLDIDNRMRGPMHGQYPELQEYWKQSQSSTRPAPMHNAADKWITEFGKQNNNPENWANSFEQQYGPNGWASEFEQHQSQMAMRQMGGANMANLAAMEQSRVLAQTLASNNDPKFQFFQFVSKMSRGELIIEDNQVKEGSASQSSGWADEFQTPYIANANSWADQFAHEELSQGADKWVSEFSSQPNHGALNENWVDEFSKLNVTDEWAEEFSGGGFGESSADPWVDEFQEHLSSFKQSPGASRGVYVFSENNPYVGHPNPMQEGQELFRKGLLSEAVLALEAEVLKNPDNTEGWRLLGVTHAENDDDQQAIAAMMRALEANPTNLEVLLALGVSHTNELEQGEALRYLYRWLQNQPKYGGLVPLQSTDSPYGPDVVRLFNEAAQMSPEDADVHIVLGVLYNLSREYDKAIASFKTALQLKPQDYSLWNKLGATQANSIQSADAILAYQQALDLKPNYVRAWANMGISYANQGLYEDSIRYYVRAVAMNPKADNAWQYLRISLSNASRADMIAACDARNLDALQKEFPL

SEQ ID NO: 224240 - protein, 614 aa, Zea Mays
MGDLKEVFRSLQELFPEVDHRILKAIAIEHRKDVDSAVVTVLDEVMPFMTGSAGVDGSVGNLSSMDGSVGNLFGNHSTHEVGSSSSVWRDICINEIDASVYSVQYTSYGDVKTGKQENINNTYVGRLASIEGVNEQLNLHSYPIPNGGQHDLLPNLDVLSSNTDPEKTLANTDNEVGYSGLFSECFSQPPTGEDGGNIIAPQPCDQDPNGMIPVGDYFPQNSSMEFFSGYEDYNFDDGLLPIGSNDQISFRILGTEKDPFAPVLDVPGRDKEESSTETSGFIESSNNVADMLPDLNLNHFTSTASTHSNHSVSIESLEDSVADARSNKNDLLPSIELVTKMIEDVELLEEKAKVAKHELSVAGTGILAKVEELREMITYAKEANDMVFPSNPHAGKVLGEKAILTTEARELLSRHQRLSDERNKYLVIIEEIHQILAERLVAAQQEIAAAEKENAEKEAAAQAVLDEQEKMMNSIVEESRKLQKEAEENLKLKEFLVERGQIVDMLQGEMAVTCEDVSLLKRVVDERLPLSKLQRSAMSSLSSSLHSSHHKSWTSSDKAIRSPDKHTLAEPASPVGKDLDGNECTVEVSDGNDSGEGILKRVDSKEDVDGWELC

SEQ ID NO: 224241 - protein, 656 aa, Zea Mays
MGDLKEVFRSLQELFPEVDHRILKAIAIEHRKDVDSAVVTVLDEVMPFMTGSAGVDGSVGNLSSMDGSVGNLFGNHSTHEVGSSSSVWRDICINEIDASVYSVQYTSYGDVKTGKQENINNTYVGRLASIEGVNEQLNLHSYPIPNGGQHDLLPNLDVLSSNTDPEKTLANTDNEVGYSGLFSECFSQPPTGEDGGNIIAPQPCDQDPNGMIPVGDYFPQNSSMEFFSGYEDYNFDDGLLPIGSNDQISFRILGTEKDPFAPVLDVPGRDKEESSTETSGFIESSNNVADMLPDLNLNHFTSTASTHSNHSVSIESLEDSVADARSNKERAAHAVVLMLLLGFDRRRLQVQGDTVQYGCSVEGAVLGSFDNDLLPSIELVTKMIEDVELLEEKAKVAKHELSVAGTGILAKVEELREMITYAKEANDMVFPSNPHAGKVLGEKAILTTEARELLSRHQRLSDERNKYLVIIEEIHQILAERLVAAQQEIAAAEKENAEKEAAAQAVLDEQEKMMNSIVEESRKLQKEAEENLKLKEFLVERGQIVDMLQGEMAVTCEDVSLLKRVVDERLPLSKLQRSAMSSLSSSLHSSHHKSWTSSDKAIRSPDKHTLAEPASPVGKDLDGNECTVEVSDGNDSGEGILKRVDSKEDVDGWELC

SEQ ID NO: 224242 - protein, 397 aa, Zea Mays
MSSANSTWTRTMMKMKVDIFGSGLGDLYYPSNAMDPYLKKNNEDDEEDDDDDEEIEDKMIMPTDFVIVCAHSEDDIFSLQVNILEETNDGEQNIFVHHDVPLADFPLCTAWMDFNLKGGEKGNFVAVGTMDPAIEIWDLDMVDEVQPHMVLGGLSKKKKKTKGKKGKKYKKGSHRSSVLGLAWNKEVRNVLASASADTTVKIWDIAVGKCAVTLEHHDDKVQAVAWSPQSPEVLLSGSFDKTVAMNDMKDGGQNCHKWSVEADVESLAWNPHNEHSFVVSLENGMVQAFDKRTASSSSSGQSMYTLHAHDKAVSSISFNPSAPNFLATGSVDKMVKLWDLSNDKPSCIASQNPKLGAIFSVSFSNDSPFLLACGGSKGKLKVWDTLTEPAVANKFSK

SEQ ID NO: 224243 - protein, 525 aa, Zea Mays
MDSRPRETDAPGDPANGAAPPLAAAVTAATGDVEIIRPRNDKRGYRRVVLPNSLECLLISDPDTDKAAASMNVSVGYFCDPDGLEGLAHFLEHMLFYASEKYPEEDSYSKYIAEHGGSTNAFTSSEHTNFYFDVNSDSLHDALDRFAQFFIKPLMSPDATLREIKAVDSENQKNLLSDPWRMSQLQKHLCAENHPYHKFSTGNWNTLEVKAKEKGLDTRLELIKFYDSHYSANLMQLVVYGKDSLDNLQNLVENKFCDIRDVGRKPFSFPGHPCTPEHLQVLVKAVPIKQGHTLRILFPITPNIRCYKEGPCKYISHLIGHEGEGSLFYVLKKLGWAMSLEAGEGDWSHDFSFFCVVIQLTDVGQEHMEDTLGLLFRYIKLLQNSGTPKWIFDELQAICETGFHYRDKSPPINYVVNISSNMQIFPPKDWLIASSVPSKFSPDAIQNVLNELTPETVRIFWESKKFEGKTKLAEPWYGTSYSVEVVPPSIIQVHFWTSLLSVLKLEKYLCLVYGNYFAEMGRESP

SEQ ID NO: 224244 - protein, 984 aa, Zea Mays
MDSRPRETDAPGDPANGAAPPLAAAVTAATGDVEIIRPRNDKRGYRRVVLPNSLECLLISDPDTDKAAASMNVSVGYFCDPDGLEGLAHFLEHMLFYASEKYPEEDSYSKYIAEHGGSTNAFTSSEHTNFYFDVNSDSLHDALDRFAQFFIKPLMSPDATLREIKAVDSENQKNLLSDPWRMSQLQKHLCAENHPYHKFSTGNWNTLEVKAKEKGLDTRLELIKFYDSHYSANLMQLVVYGKDSLDNLQNLVENKFCDIRDVGRKPFSFPGHPCTPEHLQVLVKAVPIKQGHTLRILFPITPNIRCYKEGPCKYISHLIGHEGEGSLFYVLKKLGWAMSLEAGEGDWSHDFSFFCVVIQLTDVGQEHMEDTLGLLFRYIKLLQNSGTPKWIFDELQAICETGFHYRDKSPPINYVVNISSNMQIFPPKDWLIASSVPSKFSPDAIQNVLNELTPETVRIFWESKKFEGKTKLAEPWYGTSYSVEVVPPSIIQKWVGKAPEEDLHLPKRNIFIPSDLSLRSVEEKVSFPAMLRKTQFSRLWYKPDTMFFTPKAYIKMDFHCPLSQSSPESAVLTDVFTRLLMDYLNDYAYDAQVAGLYYVVKPNDTGFQVTMVGFNDKMRTLLETVIGKIAEFEVKADRFSVIKEAMTKEYENFKFRQPYQQVLYYCSLILEDQTWPWDEEFSALSHLEASDLGIFLPHLLSKTFIECYFAGNIEPNEANNIVQHVEDVLFNAPISACKPLSPSQHLAKRIVKLEKGLRYYYPAMCSNHQDENSALLHYIQTHQDNVKQNVLLQLLALVGKQPAFHQLRSVEQLGYIALLRQRNDSGVRGLQFIIQSTVKDPANLDARVENFLNMFESNVYNMSDAEFKSNVSALIDMKLEKYKNIREESAFFYGEISEGTLKFDRKEAEKEELVGFFNDHVKVNAPQKKILSIQVYGGLHSAEYETIVQNAPPPPSCEITDIYGFRRSRPLYGSFRGGVGQMKL

SEQ ID NO: 224245 - protein, 117 aa, Zea Mays
MIYATGHISGAHMNPAVTLSFACFRHFPWIQVPFYWAAQFTGAMCAAFVLKAVLQPIAVIGTTTPSGPHWHALAIEIVVTFNMMFVTCAVATDSRAVGELAGLAVGSAVCITSIFAG

SEQ ID NO: 224246 - protein, 256 aa, Zea Mays
MRTLLPVAAGRGTVACAATPVPRRSLLLSTAAAGAALQPEQVAGTRPLRLTRSEASAVAKPRTSADEAISWAKKDNRRLLHVVYRVGDLDKTIKFYTECLGMKLLRKRDIPEEKYSNAFLGYGPEESHFVVELTYNYGVDKYDIGEGFGHFGIAVEDVAKTVELIRAKAGKVIREAGPVKGGETVIAFVEDPDGYKFEIIERPGTPEPLCQVMLRVGDLDRAISFYEKACGMELLRKRDSPEYKVMMRGCKSTQWQ

SEQ ID NO: 224247 - protein, 981 aa, Zea Mays
MSTAKVVLEPAFQGAGHKPGTEIWRIEDFKPVALPKSDYGKFYCGDSYIVLQTTCKGGAFIFDIHFWIGKDSSQDEAGTAAIKTVELDSMLGGRAVQHREPQCYESDKFLSYFKPCIIPMEGGFASGFKKPEVDKFETRLYICKGKRAIRVKEVPFSRSSLNHDDVFILDTENKIYQFNGANSNIQERAKALEVIQHLKEEYHDGVCAVAIVDDGKLQAESDSGEFWVLFGGFAPIGKKAISDDDVVLETTSPKLFSISNGQLKLEDAVLTKSILENTKCFLLDCGAELFVWVGRVTQVEDRKAASAAVEKYIIKENRPKTTRITQVIQGYENHTFKSKFESWPVSNTSGSASTEEGRGKVTALLKQKGVDVKGISKTSVPVNDEVPPLLDGGGKLEVWCIDGSAKTALPKEELGKFYSGDCYVVLYTYHSAEKKEEFYLAYWIGKNSVQEDQEAAFQIANTTFNSLKGRPVQGRIYQGKEPPQFVAIFQPMVILKGGTSSGYKKFVEEKGLKDETYCSDGTALIQISGTAVHNNKTLQVDAVATSLSSTDCFVLQAKNSMFIWNGNASSFEQQQWAAKVAEFLKTGVAVKHCKEGTESSIFWSSIGGKQSYTNRNAAPDVVIREPHLYTFSLRNVTLIFHFHFLASIAITSSPFVREAGDDLLTEDMMILDTHCEVFVWMGQCVETKEKQKAFDIGQKYVQHAVAFEGISPDVPLYKVNEGNEPCFFRTYFSWDSARSVIHGNSFEKKLSVLFGMRSEGGNKGSGDGGPTQRASALAALSSALNPSSQGKQSDEKPTSSDDSEHTQRASAMAALSSALNPSTKPSSTQTQSHSGQGSQRAAAVAALSNVLTAEGSHSPRHSRSSPTADADKTELVPTSPHQLETGTAEDVRTEPDVSQEQTAKENGGQTTFSYERLISKSTDPVSGINNKRREARLFTIKSKWTYLVDSEFETVFGMTKEEFYEQPRWKQELQKKKADLF

SEQ ID NO: 224248 - protein, 197 aa, Zea Mays
MLLVALRCWPGGLCLSRSIGDQDVGEFIVPVPLVKQVKTAVQSKGLRDDTTCIVVDIIAEKTNPSMPLPRRQPGIGVFKNMFGKKKSSDSSSHSHADREYMDPDILEEIFEDGCALLSRRLDSEYPVRNMFKLFICAVCQIELKPNQGISVHEDSSEPGSLRRWDGPFLCQSCQEKKEAMEGKRRSRGSSRNSGSSE

SEQ ID NO: 224249 - protein, 78 aa, Zea Mays
MRKGAASSEAMDFICDAEWQVDQCHDGQGAPCWQSVPHEGQATNGSKPWSDTQIAKFKRRYEQEEEESKDRDGYLFTC

SEQ ID NO: 224250 - protein, 273 aa, Zea Mays
MLSNLGSKILIVDSLKQANGRDHEPAHSSSEDGNSSEEVDDGHSYAEFVKKNHCCVPSWCGAFAVRLMALSLAAAIEDKDYIATEEVKDDEATLSEEEELAKKEDPDYLEEVKLLQKESEIPLEELLARYREDGCADHETAELKNSPHFVEEVNTDMSLDDQSVSILEAKSDLFVDHQSRDVLETEDTAPRSEIASEPCAKQNFDEENNLTDVKTVNGDKSDDVKSDDVIADAAAAARSAQPTGNTFLTTKVRTKFPFLLKHSLREYQHIGLD

SEQ ID NO: 224251 - protein, 312 aa, Zea Mays
MQGGSSGIVYGGLKYQARCIADVRADASSTTFLAGTLSLKEENEVHLIRLSPAESELVCDGVFYHPNEIWDLKSCPFDHRVFSTVYTSGEGFGASVWKIPELNGQSNSPQLEQLFELSGHTGKIRRVIWWPLGKHDKLISIDDRNIFLWNVDMSNKSAKVISQGSADMLPNLSGGAWDPHNHNSIASISDSSLHLWDLRSMEKSSAIEHAHIRDVDYNPKKQHIIATTEDDFGICLWDLRMLKLPLKDLPGHSHCPSGSPNRQEEPLLNSYTDYEDSIYGIAWSSHDPSLFASLSYDGRVVLESVKPYLQRK

SEQ ID NO: 224252 - protein, 400 aa, Zea Mays
MVSDASKKKAAQKKAAAAAKRGGKAAAASSSSSSAAAAAAVDKAANGVAALKLSDRTCTGVLASHPLSRDIHIESLSLTFHGHDLIVDSELELNYGRRYGLLGMNGCGKSTLLTAIGCRELPIPEHMDIYHLSHEIEASDMSALQAVVTCDEERVKLEKEAEILAAQDDGGGEALERVYERLDAMDAGTAEKRAAELLFGLGFNKQMQTKKTKDFSGGWRMRIALARALFMNPTILLLDEPTNHLDLEACVWLEETLKKFDRILVVISHSQDFLNGVCTNIIHMQSKKLKLYTGNYDQYVQTRSELEENQMKQYKWEQEQIASMKEYIARFGHGSAKLARQAQSKEKTLAKMERGGLTEKVVRDRVLVFRFTDVGKLPPPVLQFVEVKFGEEHSSEAYDW

SEQ ID NO: 224253 - protein, 173 aa, Zea Mays
MYRIQFFQEIYVYWVGVMFQHILMQDAVAGAHADVVRRHRAHSPRRGLAPSTTSAMLERKTRLCKRVLATLKVLWSVIEDMTKYISPEDAKRLISKEVYTRAKSEQQSKIAARKVQQEPDYVHVYVWIELTADIILNLSTVTHKKCVICFFPDIRNVLCGLCWLLERHSKCRL

SEQ ID NO: 224254 - protein, 241 aa, Zea Mays
MAMEKAASSLLGGGGGEPAATVKSIFIYPIKSCRGLAVSQALIISTGFRWDRQWVVVNGKGRAYTQRVEPKLALVQVELPPEAFAEDWQPTPYDHLVIRAPGMDTLKIPLAAEHTTIDDVSVWEWSGSAYDEGAEVSEWFSTYFGKPSRLVRFKEASETRPTDPYYGQGQGYKIMFTDRFPFLIASQGSLDALNEILKEPVPMNRFRPNILVDGCNPYSEDLWKTIKIRNNWIYTIKRSKL

SEQ ID NO: 224255 - protein, 1343 aa, Zea Mays
MLAKKKFEGKDVKNYELFFTCSQFIAWMSLSLVRVSGAWFEILYNPIMCFFWILKVILEIPHLQYKLILLKAASSFIEIISFCTATIFGLFVTVAAVIGQSGIKREANSIEAPLIPNNEKAEGETTDMIKDYSLWELLTFKFVNPVMDIGITRQLDFTDLLELPNELRATSCYDKLLSSWTAEYQNHHDNSSLLRAMSNSYGWTYLRLGLLKVLNDSIGFVSPLLLNKFIRLLQQGSDGMDGYILAISLGLTSIIKSFLDSQYSFRLAKLKLMLRSSIMGIIYWKCLCLSLAERSRFSEGEIQTFMSVDADRTINLCNSLHDAWSLPLQIGVALYLLYTQVNYAFLSGLAITIILIPVNKWISTRIAGATEKMMKQKDRRISCAGELLAHIRTVKMYSWEKLFTERLVERRESEVKHLAVFTCVALFNTLISPLNSFPWVINGMIDAVISSRRLSNYLSTPEHHSSELNASADLLNHHFKRYTKVTHNPMAIVFQNVSCSWSSSSVAELNIVLRDISLQLQKGFFIAIVGEVGSGKSSLLNTVIGETRVISGSISSCGSIAYVPQVPWILSGSLRDNILLGKEFDPRRYEEVIEACALHVDISAMTRGDMSHIGEKGTNLSGGQRARLALARALYHNSDVYLFDDILSAVDSQVASCILEKAIMGHQLMQKTRLLSTHNLQAIFAADMIVVMANGLIKWFGTPKSFLATPYSRTSKPDNSSPTSFAASVKDKTPMVTCELKPDAVLEDSVVCYEETKDRVEEEARKQGKVELGVYKKYAAFVGWSTVVLIFLSAFLMQTSRNGNDIWLTYWVDTSTGTNNTRFYLIILAMFGIINSLFTLGRAFSFAFGGLRAAIHIHASLLENIISAPICFFDQNPSGRILNRLSSDLYAVDDSLPFILNIFVANFFSLFGTLVVLSYSQVSFLLVLLPLWLIYRKLQFYYRSTSREVRRLDSVARSPIYSSFTETLDGSSTIRAFQNEGFFFERFIQHVTLYQKTSYTELVASLWLSLRLQLLAGFIILFIAMMATISFHSSSLVNFATPGLVGLALSYAAPVVSLLNGFLTTFTETEKEMISVERVDEYIGIPQEELQGSEPPPRSWPTEGKIEFEHVTLKYKPELPPALSDVSFLIASGMQVGIIGRTGAGKSSILNALFRLVPIWNGRILVDGIDLAKVAVRELRGHFAVVPQSPFLFDGSLRENLDPFNTKTDLRIWEVLENCHMKGQVESIGGLDIHVKESGASFSVGQRQLLCLARAILKSSKVLCLDECTANVDNQTASLLQNTISAECKGMTVLTIAHRISTVMKMDNILVLDQGKLVEEGNPEALMNHRHSRFAQHVKASQM

SEQ ID NO: 224256 - protein, 1255 aa, Zea Mays
MIKDYSLWELLTFKFVNPVMDIGITRQLDFTDLLELPNELRATSCYDKLLSSWTAEYQNHHDNSSLLRAMSNSYGWTYLRLGLLKVLNDSIGFVSPLLLNKFIRLLQQGSDGMDGYILAISLGLTSIIKSFLDSQYSFRLAKLKLMLRSSIMGIIYWKCLCLSLAERSRFSEGEIQTFMSVDADRTINLCNSLHDAWSLPLQIGVALYLLYTQVNYAFLSGLAITIILIPVNKWISTRIAGATEKMMKQKDRRISCAGELLAHIRTVKMYSWEKLFTERLVERRESEVKHLATRKYLDAWCVYFWATTPTLFSLSTFSIFAITGHALDAATVFTCVALFNTLISPLNSFPWVINGMIDAVISSRRLSNYLSTPEHHSSELNASADLLNHHFKRYTKVTHNPMAIVFQNVSCSWSSSSVAELNIVLRDISLQLQKGFFIAIVGEVGSGKSSLLNTVIGETRVISGSISSCGSIAYVPQVPWILSGSLRDNILLGKEFDPRRYEEVIEACALHVDISAMTRGDMSHIGEKGTNLSGGQRARLALARALYHNSDVYLFDDILSAVDSQVASCILEKAIMGHQLMQKTRLLSTHNLQAIFAADMIVVMANGLIKWFGTPKSFLATPYSRTSKPDNSSPTSFAASVKDKTPMVTCELKPDAVLEDSVVCYEETKDRVEEEARKQGKVELGVYKKYAAFVGWSTVVLIFLSAFLMQTSRNGNDIWLTYWVDTSTGTNNTRFYLIILAMFGIINSLFTLGRAFSFAFGGLRAAIHIHASLLENIISAPICFFDQNPSGRILNRLSSDLYAVDDSLPFILNIFVANFFSLFGTLVVLSYSQVSFLLVLLPLWLIYRKLQFYYRSTSREVRRLDSVARSPIYSSFTETLDGSSTIRAFQNEGFFFERFIQHVTLYQKTSYTELVASLWLSLRLQLLAGFIILFIAMMATISFHSSSLVNFATPGLVGLALSYAAPVVSLLNGFLTTFTETEKEMISVERVDEYIGIPQEELQGSEPPPRSWPTEGKIEFEHVTLKYKPELPPALSDVSFLIASGMQVGIIGRTGAGKSSILNALFRLVPIWNGRILVDGIDLAKVAVRELRGHFAVVPQSPFLFDGSLRENLDPFNTKTDLRIWEVLENCHMKGQVESIGGLDIHVKESGASFSVGQRQLLCLARAILKSSKVLCLDECTANVDNQTASLLQNTISAECKGMTVLTIAHRISTVMKMDNILVLDQGKLVEEGNPEALMNHRHSRFAQHVKASQM

SEQ ID NO: 224257 - protein, 416 aa, Zea Mays
MSSWRLPRPVVGLGAKRIRTSAEDPRFGWSWRPKRPPAPNKTPASHLSLSLSLFLSAVQTISPSLSLSLSSSSLRSKQSRPLLLYSPKQTKRSKKPRNLPPLWLWRWRWRRGSCRRLRQRKWGRRRAPPPPAPAPAPVARASCAAPRPGCTAAPTRPRSAGAATRRCTAPTSWWRATRARCCAGAARAPRRGAPRARASAPPSPSASAASAAARRGPWASAAMRRWGERATETPRMTTTRTTTPRRRRRRRRRKGRGRTRSCRGRRTPRPRRRPSGAPRPAAAGRPPPTAQSAQRRKTPRAPPRSQACATTRRPRATAAGATRPPRPGAAAGSSPPATGRDRPRISSALMGRRSPGMAHRRRGIAPTPALPGMMAAEACGTVVAAHLANTYNLGKLQHGEDGSGIVNRPFGRAWGY

SEQ ID NO: 224258 - protein, 1502 aa, Zea Mays
MVQSLVAVWEELERLRLLEETKYADLGRPLREEVLKDFLHGIKYESALSVLFSQEGPHHKVSTIEESERLERCLKSLTDIIGTVTFSQDNYCGNIDVGNSADVQNDKPDASLCSGSLEQNMQIISPERNSEYPVSSSVHQRTLSQLSDKGEKHLDAEALGLLSWLASSQAAEESTDDELTNEVILSPLFANKSIEVAVESAQLDFDSASQQECQDILDSVDPIRAVEEPNIHTSYLDSVKSNSAASLGNSIPQLDGSSDENPKVSQEYDRSKVTRKSVVSASYTSTKKPSKSASKYSGTEHLWGSLPLSSRKKRQHGDADDSCSAMSPQKDLSASKKSTIDKDYHDTIGSTDSESSSFLGVHDSVCHSVRDLMRRRRSFRREQLEFGCSGAATCTMDKESETVNSGGLEFHDFTSDIPNLALTRMAFVQKPPLKDDACSGLESPSDCEQRGCRSPRPLAEKSGLADLLPFFNQNMEENKQNESFQDMESTGDVLGVPTHFQNDGSALYLLTHALSPPSAGAVGHWLTQQSSSSIFSGYTNYDGVAADKEEAHSSTLSRNSPTRFTKENSANKMHGDVMGSALSYKESKHLDEWHDFSQISAGNEKDRLTPLSQIGFRDPASIGGGQQLTILSVEVLTESRGELRPDPRFDAINAVSLAIEDDADNTVDVHVFIRGNNVKSHRRNLDGIAGCNINVFPEEKDVLNNLISAICSIDPDILVGWEIQLGSLGFLAERAAYLGIGLLKRISRTPHELNHPPKIPVDNSSQVLSETSSADDIIDDVSENDWSHTHASGIHVGGRIVLNLWRLMRAEVKLNNYSLEAVADEVLRRKIPLIPSRILNRWFATGPGRGRHRCIEYISNRARINLEIMNQMDLVNRTSELARVFGIDFFSVLSRGSQYRVESMLLRLAHTQNYLAISPGNQQVASQPAMECLPLVMEPESAFYPDPVVVLDFQSLYPSMIIAYNLCYSTCLGKVFPSKSDVLGVSSYSADPHTLVDLKNQLLLTPNGVLYVQPEIRKGVLPRLLEEILSTRIMVKQAMKKLSPSQQVLHRIFNARQLALKLIANVTYGYTAAGFSGRMPCAELADSIVQCGRRTLETAISFVNQHPLWKARVVYGDTDSMFVLLKGRSREEAFRIGKEIASSITAMNPDPVTLKFEKVYQPCFLLTKKRYVGYSYESPEQNEPVFDAKGIETVRRDTCPAVAKILERSIRIMFEEQDLTKVRTYLERQWTHILSGKVSILDFIFAKEVRLGTYSARASTLPPAAIVATKAMLSDPRAEPRYAERVPYVVIHGEPGARLADMVIDPYGLLEVGSPYRLNEQYYITKQIIPALQRVFGLLGADLNKWFNEMPRPIRSTLAKRQFAAAHGSFSRDGSFIRLGLNNKTSAKGGRIDTYYMSSHCSICGDMIQGSESFCNNCLKSEAVVATVVAGRTSKLEREIQHLAAICGHCGGADWIVESGVKCISLACPVFYERRKVQRELVVVSESAGEAGYYPFCCAELF

SEQ ID NO: 224259 - protein, 240 aa, Zea Mays
MTMAGSCAAVPVAGLPSLRTPMPTHLRLGGFMPCSSAARSRGAAVLGCALGARKQTPGVLNQLLCRYMRRDGHEGDVSNQGRDGAVMFGPDDDGVKIPTQVETLVKGTAAVAEPEYKQIPDVDYLQKNHIFTSGASGTNAAVIRGALRAEKPELLTVILPQSLKKQPPESQELLSKVQNLLEKPQYDHLPLIEASRLCNMDIISKVQQVICFAFHDSKLLMETCQEAMNLRKIVTLFYLD

SEQ ID NO: 224260 - protein, 349 aa, Zea Mays
MGTPEFPNLGKHCSVGDCNQIDFLPFTCDRCDHVFCLDHRSYTSHQCPNANMKDVTVLICPLCAKGVRLNPSEDPNITWDTHVNTDCDPSNYQKVMKKKKCPVPGCRETLTFSNTIRCKDCTREHCLKHRFGPDHKCPGPRKVDSGFPFVSMLRRSQKAETRSNSSNNNGSSWWSSSLVNAATNFKSSAEAGMQKLSTVTSQAFQKAKDGIAPNSSSSSGDLVEQCVHCPARFSTVGALIEHVEKSHQINSQPSEARNEDSRTLQFNYGSFKHKALDKSLTKKVPKNRLTSNTKLTQCCSIVGIFEALTAFPFSPSPFLLCEAVPQTLYHLISVPTLYHLPGKNTSNLT

SEQ ID NO: 224261 - protein, 262 aa, Zea Mays
MGLGAAMALGDPPADYASIAAVGLFVALMCVGIIVGHLLEENRWMNESITTLFIVLSQDETPFLYSLVFGEGVVNDTTSVVLFNAIQNFDPGNISGAKLLNFISSFLYLFGSSTILGVASGLLSAYTIKKLYFGSPVKSIALSNTILALVLVSRAAFVFPLSFLSNLTKKTPNGKISFRQQAFDLMFPRFCGSARHFGRCARHFGRDIIMPNLKSSVTTTASAVEYMDEVLKALPLGEARNEDSRTLQFNYGSFKHKGFLKH

SEQ ID NO: 224262 - protein, 123 aa, Zea Mays
MPNLKSSVTTTASAVEYMDEVLKALPLGEARNEDSRTLQFNYGSFKHKALDKSLTKKVPKNRLTSNTKLTQCCSIVGIFEALTAFPFSPSPFLLCEAVPQTLYHLISVPTLYHLPGKNTSNLT

SEQ ID NO: 224263 - protein, 480 aa, Zea Mays
MKGCSERLLFLLLLLASSSLLSAVQTCPADLDSKCDGGASDDDWEGEFFPGVPKIKYEGPTSKNPLAYKWYNKEEVILGKKMKDWMRFSVAFWHTFRGTGADPFGAPTKTWPWEDGTNSLAMAKRRMRAHFEFMEKLGVDKWCFHDRDIAPDGKTLEETNSNLDEIVQLAKQLQGETNIKPLWGTAQLFMHPRYMHGAATSPEVKVYAYAAAQVKKALEVTHYLGGENYVFWGGREGYQTLLNTDMKRELDHLANFLQAAVDYKKKIGFNGTLLIEPKPQEPTKHQYDWDVATTFAFLQKYGLTGEFKINVECNHATLSGHSCHHELETARINGLLGNIDANTGDPQVGWDTDQFMTDIAEATLVMSSVVKNGGLAPGGFNFDAKLRRESTDVEDMFLAHISGMDTLARGLRNVAKLIGDGSLDDLVRKRYQSFDSEIGALIEAGKGDFETLEKKVLEWGEPTVASGKQELAEILFQSAL

SEQ ID NO: 224264 - protein, 288 aa, Zea Mays
MQPKISAFFERQETDPDPISGDGEGNGQGNVGAATEAKRKANGCRLDGLVSKKRNYAQLHLELGQPDFVLHTCSVCGMMYARGNDEDEKVHRAYHKSYSEGVPFKGWKKETVIARSEGGDRVVLATDENSCMSKSKWYGLCKLCDVKQIWQVREVITVVEKELGFGEGKLLHKLCKVYLYISAQRIVGCLVTEPIKTGHRVIPSSTEGSPNDLPVSSTERGKNGHTLEFGSISFKREIIRRHSRSVKNKEECQDPGAILCETEAVPALCGFEPSGWHHRAEENELPQN

SEQ ID NO: 224265 - protein, 435 aa, Zea Mays
MATGSPRRRPLPLLLLFLLLFAANGRANAARPGGPSPIKNVVVLALENRSFDHMLGWMRRLLGLPVDGLNGTECNPNSNSTSSICVSADADLVVPDDPGHSFEDVLEQVFGNVSAAAAQPQPSMSGFVRSALSVNAVLSSAVMRAFRPSLLPAFSALAPQFAVFDRWFSSIPGPTQPNRLFLYSATSRGAVAHDKLDLLLGYPQRTIFESLAADGHDFAVYFKTIPTVLFYRRLRALRYAARAFHRYDAAFKEHARRGVLPALSVIEPRYFDLTGTPADDDHPAHDVANGQRLVKDVYEALRASPQWNQTLLIVTYDEHGGFYDHVATPTAGVPSPDGIRGPPPFFFKFDRLGVRVPTIMVSPWIKKGTVVGRALGPTDTSEFEHSSIPATIKKIFNLSSDFLTKRDAWAGTFDHIFTELDQPRTDCPGYPLLLS

SEQ ID NO: 224266 - protein, 541 aa, Zea Mays
MGDLETLNLGKNHLSGQLTDMFSELPKLSTLDLSFNRFSGSLPKSFQHLKDLKTLNVESNQFSGHIDVLAKLPLEDLNLQNNKFTGWIPSKLKDISNLQIGGNQWSSGSAPPGMEKGSALEGSSGGGGRSGVNGIAIAAVVIAVLVAALILLSVLKRNRSSSSSHYLMDESGHNRSFAPLVDDGRTINMKPLEHSSSISSTTPSAMPIKPISDNEFENKLNYSRRSTDPVNLVAYSSSDLQAATGSFHSSRLLGQGTIGGVYKAKYADGTVLAVKKFDPLSFSGSSDFMDLVNSISKLHHPNISVLVGYCSEPGHYMLVYDYNMNGSLYDFLHLSDDYSKPLTWDTRVRIAVGTACALEYLHDACSPPVIHKNIKASNVLLDADLNPHLTDCGLAYFYEDPSQSLGPGYDPPECTRPSGYVMKSDVYCFGVVMLQLLTGRKPYDSSKPRAEQSLVKFVGPQLHDTNALEALADPGLRGLYPPKALSRFADVLSRCVQSDPELRPSMSEVVQLLLQCVQRTTSNRRLGGHRTVSQRSDDSDW

SEQ ID NO: 224267 - protein, 87 aa, Zea Mays
MHYTNPGPGESYSTFFSASCCILILYNTFSLGSYIVFLMNQASQGKRSSGENVVMVDPLEAKRLAAKQMQEIRAKEKLKELMTPAME

SEQ ID NO: 224268 - protein, 173 aa, Zea Mays
MGVAGEKFQLGTVGALSLSVVSSVSIVICNKALMSSLRFNFATTLTSWHLLVTFCSLHVALCMKLFEHKPFDARTVMGFGVLNGISIGLLNLSLGFNSVGFYQMTKLAIIPCTVILETLFFRKKFSRNIKLSLSVLLLGVGVATITDLQLNLVGSVLSLLAIITTCIAQIVSF

SEQ ID NO: 224269 - protein, 176 aa, Zea Mays
MASASHQSEPLDSAATSDTDAPSDNIPELPCPPCHIVTKPGQLPVEFLEPSAAQKLVIGFDCEGVDLCRNGALCIMQLAFPDAVYLVDAIEGGKELIQACKPALESDHITKVIHDCKRDSEALYFQFGIKLHNVMDTQIAYSLIQEQEQKGKKKTSDDYNYISFVSLLADKRYCGP

SEQ ID NO: 224270 - protein, 300 aa, Zea Mays
MASASHQSEPLDSAATSDTDAPSDNIPELPCPPCHIVTKPGQLPVEFLEPSAAQKLVIGFDCEGVDLCRNGALCIMQLAFPDAVYLVDAIEGGKELIQACKPALESDHITKVIHDCKRDSEALYFQFGIKLHNVMDTQIAYSLIQEQEQKGKKKTSDDYNYISFVSLLADKRYCGIPYPEKEEVRILLRQDPNFWTIRPLSDMMVRAATDDVRFLLNIYEKMMEKLNKVSLWRLAVRSELYCRCFCLNDNQFADWSPLPPVPDGIEADVYVPEVDILSVLDVPHGKMGRVIGRKGSTIMC

SEQ ID NO: 224271 - protein, 67 aa, Zea Mays
MGSAMNKDKVHDKETHGTSSDITEKTPVETVKGPNLLERAKEEIEALAGAVHTKMEHHSSPHAKKDV

SEQ ID NO: 224272 - protein, 238 aa, Zea Mays
MNLVLAKLKNEFNDPIEIAASSVTESDVVKLLAHRIPVYLPCQELCKIFSGNPNIDDKIDSRIRGEFYSTCISFNDVDEVDKAFEELDGQKTKDSGGRLQKHVLLKLDNGDVVSFYVRKMVYDSWPKQIEVPRKRPEPTEDPEPKKEHAKGVQQKKRNNFVRDTEDPEPKKRPEPIEDPEPKKEHAEGAQADLEASATAAIPETARLRRTATREAPPTRMGRPRTSVTFRRTQPSTHS

SEQ ID NO: 224273 - protein, 283 aa, Zea Mays
MPPLDPVMLVSKINCMRKEVQDALDTSNYDKLLQSGLQIAIIGRPNVGKSSLLNAWSKSERAIVTEIAGTTRDVVEANVSINGVPVTLLDTAGIRETDDVVEKIGVKRSEAAAMGADLIVMAISAVDGWTDDDTKLMEHVSVNRKSSGSAVPMVLVINKVDCAPFVPGEQFKQFSGLFRKHVQTCAVTGKGISDLESAVIEVRGIEHVPSEGRRWTVNQRQFEQLLRTKEAFARLESSINEQLPMDFWTVDLREAALALATISGEDISEEVLSSIFSKFCIGK

SEQ ID NO: 224274 - protein, 64 aa, Zea Mays
MEDEEHEVYGQEIPVDGEDVDMSAGDDATKLQELDEMKRRLKEMEEEAAALREMQAKVAKDMQG

SEQ ID NO: 224275 - protein, 101 aa, Zea Mays
MEDEEHEVYGQEIPVDGEDVDMSAGDDATKLQELDEMKRRLKEMEEEAAALREMQAKVAKDMQDPNATTSENKEEMDSRLTMHALQKKCSSISILVELLTE

SEQ ID NO: 224276 - protein, 91 aa, Zea Mays
MGKGVLEVHLVDAKGLSGNDFLGKLDPYVIMQYRSQERKSSVARDQGRNPCWNEVFKFQINSAAANVQHKLILRIMDHDNFSSDDFLGEAT

SEQ ID NO: 224277 - protein, 317 aa, Zea Mays
MELSEKDKSITVEEFAEIVYGTKESLESYCAHLLLSRDVVYFVKVESRDYSMYQPRSPAQVEELLRRKLAKEAADKELEEFVHLLKSAKALPMESKPPKASWLVEEKVRQKIESLQAYAVDACDDEQRRLAGNILKAMGFTRTSSAALKLLINVGYFPVHVNLDLFRYDVRIRYTDEVLSAAEELLVDSPDTDMHIRKDLSTLKVYAIDVDEADELDDALSATRLPDGRIKVWIHVADPTCLVKPHSIIDREAMHRGTSIFLPTTTFPMFPERLAMNSMSLQQGKECKSVTVSVILNLDGRIYFRKFSHQTYLYVDI

SEQ ID NO: 224278 - protein, 1057 aa, Zea Mays
MASCGGGVCLKRDRREEEENDDDKGETSGRNKRPSSGAYYTGAGVDAQRTDDDDSAAADYMYEYDDGYEEEESAAEQPKGDDASARDTEQRYAVLTEDDVRARQEADTARVAEVLSIPAGFARALLRHFKWRVGRAQEEWFSDAQHQQRVRGAVGLVPAACPDGDALVPAARSPRPRVCGICFDAFPAGGTRSAGCAAHYYCDGCWCGYVAAAVGDGARCLALRCPDPSCAAAVVRELVDEVARDDDRARYARFWLRSYVEESGGRIRWCGGAGCTRSVELLGGCDAEAVASAVDVVCGCRHAFCWRCGEEAHRPVSCGTVRAWLAKNASDSETANWVVANTKRCPMCRRPIEKNHGCNHMTCGAPCHHQFCWLCLDPWDHHRGCTRYDSRRRRRHGPVDEVEDEEEQAQRTLAKASLDRYLYHYERWEGNGKSLRKALADADELERSELQRMARLLDLPAMDLGFVTEAYRQIADGRRVLRWAHAYDYFLSLDPERDAAKRGLFDDLQSQANRWLECLHGCAELERKHLFGAADADAEDEPTVAAAAFMAYKERLANLTGVTRRFIGNLVRAFKTNLPEVVVTLTPPASDLQHIVKSGPTTERQTTVGIGGILSTEATVTLPVSNVSSLQGTSALRPSSSSLVVSQETDIANDSVQERHSPTRNLAQAQHPVRPGGHGGFLSNPYPSFFGEATSTAGPLQLYMPNMVVSGGTTSTPSLAFSLSALGQPITSTALGGSFGSNTRTAWGNSDMAAASSSQPDRMGMDQQAGTGSAMNLTIGLHPNAQQPPPKYVKIWEGDLYGQRQGQPVFISKLESWGGTVSRKVAEDWPETMQIVRLIAQEHMNKKYSESQYVGNTDFLIFRALNQHGFLGQLQERKLCGVIQLPSQTLLLSMYDKTSRMVGMLFPKNMLMFRPEALTQPSPVQQEELIHHQQQQLQQQQRNIHRLQRQLIQKQQQQHMQKLLPQRLQYQEQLHLQQQMTQQIQQQQQSLYQQHQQMQHQQQLWQQIQQQKHQLQHMDPQQQQLLSQMDTLNAHHLLGSCSLQMSYKTGRSSMLVQ

SEQ ID NO: 224279 - protein, 332 aa, Zea Mays
MAVGTIVCASLWTEFVTCEQVDERYNQLTRKDGPDTGTKYREDKEVFEISAKGAFIFIIVASVFLLLLFYFMSSWFVWVLIVLFCIGGIEGMHACLVTLLARIFKDCGQKTVQLPVLGEVLILSVGIVPFCAVFAILWAVYRHASFAWIGQDVLGICLMITVLQMARLPNIKVASALLSAAFVYDIFWVFISPLIFHESVMIAVARGDNTGESIPMLLRIPRFFDPWGGYDMIGFGDIIFPGLLVGFSYRFDRANRKGVLSGYFLWLIVGYAVGLFITYLALFLMDGHGQPALLYLVPCTLGVIVILGWLRGELYELWNFGKSPGENFVNEP

SEQ ID NO: 224280 - protein, 239 aa, Zea Mays
MSFFFRAASRQRPLPQEIARSLKDSLVALDTKTGAKALEDAEKNILTLRHTLAGDGEVEPNQEQVLQIALEICKEGVLSLFVQNLPSLGWEARKDLVHCWCILLRQKVDESYCCVQYIENHFDLLDFLVVCYKNLEVALNCGNMLRECIKYPTLAKYILESSSFELFFQYVELSNFDIASDALNTFKDLLTKHEDAVSEFLSSHYEQFFGLYTKLLSSTNYVTRRQSVKSFCWRPQMLK

SEQ ID NO: 224281 - protein, 276 aa, Zea Mays
MTPTPTTTATRPASRPGSPTSAPPPPSAEDLDPNLKYPKQPFPFAQLIIYATVSSKAPHGVHEHSGEHAGGGRLRGRPRPVRRAVRLPVRAGRAGAPVAADRREQPLAAADAQRVRQHHAGAVAGPQPLLLRQEHDAVPPGHRLRGRRGAVPRADTAARRGPAGARRAPDVPRGHRRRHGGEPRVRRPRLRRGPREGGLWRRRRDGEPGQPHRPDQGVVGLAGAGRRGGGAAQGVAFRHAQRQERAGADHKDHRFYQPERHELSSFLLECFALVDN

SEQ ID NO: 224282 - protein, 291 aa, Zea Mays
MANIRALLVGLSRARGSLAEAGRCASTRPSILASLGAHYKIPMPARWFSSTGLPPHLVVGMPALSPTMNQGNIAKWRKQEGDKIEVGDVICEIETDKATLEFESLEEGYLAKILAPEGSKDVQVGQPIAVTVEDVEDIKSIPADTSFGGEQKEEQSTESAPQNKVVNVSEQSSTVSRISPAAKLLIKEHGLDTSSLRASGPRGTLLKGDVLAALKSGINSSSTKEKKSPAQPSSQPTRDSQSQASSISQKDDTYEDIPNSQIRKVARIKTDDSTFVSIQRCCAGSLARFQE

SEQ ID NO: 224283 - protein, 554 aa, Zea Mays
MANIRALLVGLSRARGSLAEAGRCASTRPSILASLGAHYKIPMPARWFSSTGLPPHLVVGMPALSPTMNQGNIAKWRKQEGDKIEVGDVICEIETDKATLEFESLEEGYLAKILAPEGSKDVQVGQPIAVTVEDVEDIKSIPADTSFGGEQKEEQSTESAPQNKVVNVSEQSSTVSRISPAAKLLIKEHGLDTSSLRASGPRGTLLKGDVLAALKSGINSSSTKEKKSPAQPSSQPTRDSQSQASSISQKDDTYEDIPNSQIRKVIAKRLLESKQTTPHLYLSKDVVLDPLLAFRNELKELHGIKVSVNDIIIKAVAIALRNVPEANAYWNNDKEETQKCDSVDISIAVATEKGLMTPIIRNADQKTISAISAEVKQLAEKARAGKLAPNEFQGGTFSISNLGMYPVDHFCAIINPPQSGILAVGRGNKVVEPVVDSDGTEKAAAVTKMSLTLSADHRVFDGQVFHGAGAEFQRHQEAAIVNERRQLPCFDVFFGSENRSGKENIWMQPVVCCLIGIPYKSNQFCNKFIIRMHWHLHGFLTRFPLVGRRHVLRI

SEQ ID NO: 224284 - protein, 473 aa, Zea Mays
MANIRALLVGLSRARGSLAEAGRCASTRPSILASLGAHYKIPMPARWFSSTGLPPHLVVGMPALSPTMNQGNIAKWRKQEGDKIEVGDVICEIETDKATLEFESLEEGYLAKILAPEGSKDVQVGQPIAVTVEDVEDIKSIPADTSFGGEQKEEQSTESAPQNKVVNVSEQSSTVSRISPAAKLLIKEHGLDTSSLRASGPRGTLLKGDVLAALKSGINSSSTKEKKSPAQPSSQPTRDSQSQASSISQKDDTYEDIPNSQIRKVIAKRLLESKQTTPHLYLSKDVVLDPLLAFRNELKELHGIKVSVNDIIIKAVAIALRNVPEANAYWNNDKEETQKCDSVDISIAVATEKGLMTPIIRNADQKTISAISAEVKQLAEKARAGKLAPNEFQGGTFSISNLGMYPVDHFCAIINPPQSGILAVGRGNKVVEPVVDSDGTEKAAAVTKMSLTLSADHRVFDGQVGVTPLFLHC

SEQ ID NO: 224285 - protein, 461 aa, Zea Mays
MCHTLTKAINSSISGRTLQDPHASPLVLIYRASSTSGGRNASTISYYGNIAKWRKQEGDKIEVGDVICEIETDKATLEFESLEEGYLAKILAPEGSKDVQVGQPIAVTVEDVEDIKSIPADTSFGGEQKEEQSTESAPQNKVVNVSEQSSTVSRISPAAKLLIKEHGLDTSSLRASGPRGTLLKGDVLAALKSGINSSSTKEKKSPAQPSSQPTRDSQSQASSISQKDDTYEDIPNSQIRKVIAKRLLESKQTTPHLYLSKDVVLDPLLAFRNELKELHGIKVSVNDIIIKAVAIALRNVPEANAYWNNDKEETQKCDSVDISIAVATEKGLMTPIIRNADQKTISAISAEVKQLAEKARAGKLAPNEFQGGTFSISNLGMYPVDHFCAIINPPQSGILAVGRGNKVVEPVVDSDGTEKAAAVTKMSLTLSADHRVFDGQVGGKFFTELALNFSDIRRLLL

SEQ ID NO: 224286 - protein, 124 aa, Zea Mays
MLVSEACLLLEEEEEALRQLRKNLVVRAKPVPSFYQEPPPKVELKKVPPTRAKSPKLTRRKSCSDTPHTPEGGNGGGGAVCCRLHRHSIGNSKDIGSKAQCSPKTGPAAKSRAPPNPGKTRGLP

SEQ ID NO: 224287 - protein, 116 aa, Zea Mays
MVLKHTDPTAHAEVTAIREACKKLGKIELSDCEIYASCEPCPMCFGAVHLSRIKRLVYGAKAEAAIAIGFDDFIADALRGTGFYQKANMEIKKADGNGALIAEQVFEKTKEKFQMY

SEQ ID NO: 224288 - protein, 299 aa, Zea Mays
MPSTTAQQKPHVVLVPFPAHGHIAPHVQLARALRARGVHATLVHTELYHRRLLRTKQQQATGGDDALDPDEGFSVEVIPDGLSLEDPPRTLRAYHEAMERNCLEPFKALLRDLLLPPTGVPPVSCVVADTPMPFAAVAAREVGVPDVQFFTASACGLMGYLQFQELLAREVIPLRPTYETDGSLDAPLDWVPGMKAVRLRDLPTFCHTTDADDWLVHFHVHQMKTAAASKAVVLNTLYDMEKDVVDALAPHLPPIYTVGPLASVVKASLPAPPRGAGDDTSVPAAGSEDRECMARSRPG

SEQ ID NO: 224289 - protein, 96 aa, Zea Mays
MAYLHSVCLKYERLCFSGSIEMSFIFYDYACVFQAILGTRASEIIKLVPFCLHLSVEGESPTNDPQLVSLVIRLDFFISPLENTSHYLTALFSCHF

SEQ ID NO: 224290 - protein, 244 aa, Zea Mays
MREIISIHIGQAGIQVGNACWELYCLEHGIEPDGTMPSDTSVGVAHDAFNTFFSETGSGKHVPRAIFVDLEPTVIDEVRTGSYRQLFHPEQLISGKEDAANNFARGHYTVGKEIVDLCLDRVRKLADNCTGLQGFLVFNAVGGGTGSGLGSLLLERLSVDYGKKSKLGFTIYPSPQVSTAVVEPYNSVLSTHSLLEHTDVAVLLDNEAIYDICRRSLDIERPTYTNLNSSLFLKSPMPSLSPQA

SEQ ID NO: 224291 - protein, 599 aa, Zea Mays
MTVAALQAMDALSRRATMLRDSLRRSQGNTDGMVTILGSFDHRLSALEAAMRPTQVRTHAIRTAHENIDRTIKAADGILSQFDLARRAEATILRGPHEDLESYLEAVDVLKGISRFFSSNKNFKSSEGVLNHVNNLLAKSTLKIEEEFKQLMSTYSKPIEPDRLFDCLPKSLRPTKGDHETDGGSHHPSKGLEAAVYRTPTLIPPRILPLMNDIAQQLVQAGNQQTCYKIYRDYRASALEVSLRKLGVEKLTKDDVQKMQWEALEAKIGNWIHFMRIAVKLLLAGERKICDQIFDGVNFNKGHCFAELTANSIITLFSFGDAVAKSKRSPEKLFVLLDMYEVMRELQPEIDEIFEGKPCTEMREAASSLTKRLAQTAQETFADFEEAVEKDASKTIVQDGTVHPLTSYVINYVKFLFDYQSTLKLLFQEFDSGTEAESQLAAVTTRIMQALQNNLDGKSKQYKDPALTHLFLMNNIHYMVRSVRRSEAKDILGDDWIQRHRRIVQQNANQYKRVAWAKILQTLSVQGAGSGGDLTSSSVSRATIKERFKSFNTQFEELHAKQSQWIVPDQELRESLRLAVAEVLLPAYRSFIKRFGIIV

SEQ ID NO: 224292 - protein, 921 aa, Zea Mays
MISTLLRRLLFSYVVAQQSNEAQLKRRPRRAQYCSITMEKSILEQANSKYEVQGEYVFPGTRDRFPVESQSNGFIEKAMGGHLGSIMSSMGRWRMRLEVPGAEVAEMLPLARLLSRSTDPVIRSRSKELFMQCLHSVGFNAESLNDQLKALEIYHDWLDDDTMEDIAFPGLAELRGYWRGSLDASGGGNGDTMADFDFNGEDWEWGTYKTQRVLASGSFSNNDGLRLDKLFIQKDNATLHADGSILGPLTNLHFAVLNFPVGLIPALVQAIESSTTDSIHFLRQWLTPIKGILHMEGDLRGTLAKPECDVQIRLLDGTIGGIDLGRAEVLASVTPTSRFVFDANFEPTIQSGHVNIQGSIPVTYVDNSSIEESPEEADGKQGIIRIPVWARDRGSSNEISEARMVRDKTEEGWEFQLAEKLKGLSYNMLEPGEVRIDADIKDGGMMLITALSPYANWLQGYADVFLQVKGTVDQPVVDGSATFNRAIVNSPFLRTPLTNFAGTIQVISNRLCISSMESRVGRKGRLSMKGSLPLKNSEPSANDKIDLKCEVLDIRAKNILSGQVDSQLQVTGSILRPDLSGMIRLSHGEAYLPHDKGNGAAVTRLTSNKSSYLLSGFDQSTTSQDVSRILGSLSTSAERDQSDTEKTLEHGSFNPNIDARLNDLKLTLGPELRIVYPLILNFAVSGDLELNGMVHPKYLRPKGILTFENGEVNLVATQVRLKNDHLNAAKFEPDLGLDPVLDLVLVGSEWQFKIQSRASMWQDNLVVTSTRSVDQDVLSPSEAAKVFESQLAESLLEGDGQLAFKKLATATLETLMPRIEGKGEFGQARWRLVYAPQIPSLLSVDPTVDPLKSLANNISFATEVEVQLGKRLQASVVRQMKDSEMAMQWTLIYQLTSRLRVLFQSTPSNRLLFEYSATSQE

SEQ ID NO: 224293 - protein, 1221 aa, Zea Mays
MSHCPRASLSLAPPSPFLFPHCPSPRRRRRPRGRSLHLTSRPLLTLARFDPPRLFRLKVSDSSASPGEAAHAHAHHSNHRAHAHHSPAPSLLPWPRALIGSLAPVWREGLFLVRCSVFAAVVSVAGALSWFAQLRARSFVEARLLPAACSALSEYLQREVRLGKVRSISPIGITLQTCSIGPHEEEFSCAEVPVMKIRVRPFASLRRGRVVVDAVLSEPSALVAQKKDFSWLGIPAPSEGTVKRHSGEEGIDYRTKTRRLAREKAAEQWNEERDKAAREAAEKGYTIPSGQSVPLSSNEILEADGPTEIGKSSPPLCADQMHKNDHHLATGIDSGSKHADLEKSFGFKSPIPGINLWSRVISSPSRLRYMRKAPSKVIPDVDNSSQQRILRRSADAAVSYFQNTGHINIDDSSPGPGKGSSDGGHANVGGSGINSNDETVSNSKTASTSLAESPSHSQLSSQCSSSNLDNLLLWHNLEDLQIGQAKNPSGNKPVPHQENIFGNFGSCTHAHNWVPFWPFQLKSCPVSFNSPWASLDLQIEKLKSQFAIGPGDFSAELTEGVSEIHPGGVQNALPITLDSVYFNGGNLMLLGYGDQEPREMKHASGHVKFKNNYNRVHVHVTGNCMEWRQDRSSQGGGYLSTDVFVDIAEETWHANLNIVDAFAPLFERILEIPVVWHKGRATGEVHICMSKGDSFPSIHGQLDVKGLAFQILDAPSSFSDIVAKLSFRGQRVFLHNASGWFGDAPVEASGDLGLNPEDGEFHLMCQVPSVEVNALMRTMKMKPLMFPLAGSVTAVFNCQGPLDAPVFVGSGIVSRKSFSVSGMPPSAASEAVMQNKEAGAVAAFDHIPFSHVSANFTFNLDNSVADLYGIRACLLDGGEIRGAGNAWICPEGEGDDSAMDINLSGTILLDKVLHRYIPGGIQLIPLKIGELNGETRLSGSLIRPKFDIKWAAPNAEDSFSDARGNIVIAHDYIMVNSSSVSFDLNSRVQTSYINDYLLNKETYQMKKIMPLIVEGVDLDLRMRGFEFAHIASSIPFDSPRPLHLKASGRVKFQGKIMKSSNIADGNINGVLQSNIDQNKLETNASKLVGDISLSGIKLNQLMLAPQSTGFLSISRDSMMLNATGRPDENFSIEVNGPLLFTSNEVIQDVRLLSIFLQKGQLRSNICYHPENLTSLEVRNLTLDELEFASLRGFVQKVCWMIMLRQNFSLIFRKEEAMVCCQ

SEQ ID NO: 224294 - protein, 688 aa, Zea Mays
MHIIVAILHVFHDFQKMGAGRKIETFFTATPSAQTQNQTNERYGTYPVAARNLREDELGGVIFGCKHNTIGECLSKQLFGLPSSHFSYVKNVKPGMPLFLFNYSDRKMHGIYEAASAGKLNIDQFAWSDGGRIKTQFPAQVLISMKTACLPVPESQFQSVISGNYYKPRHFFFELDHEQTRALIFLFKPAPVHDVSNKCHPSKSIQSPIVEAYVNPDGEYASESRTSTSHLDKEASNWDDVTTKEGTEFVNNDHPHINPPHVEQYGEVAVTQKQQDMFVLRQHEAESSKDTVDSASNKSMPQEAQFDATLPTDPSNSTSVGDVCIKDLTSLGQSRGNAELLHIVKELSKRNQAMEKKLSESDKEILFLRESMKDTGRRIQELEYQYEKLQSNYNSLVPLLGSRHDNMEGPSIILMGGYRGSTCLSSLDSFCPTTDRVVPLCSMSSARAYAAAVALKDHLYIFGGGNGSSWYHTVECYRMGSNKWIACPRLKHAKGSLAGTTLNDKIFAIGGGDGSAVFSEVEMFDPALGRWIDNVSMRQKRFAAAAAVLSGTLYVTGGYDGNTSAERYDPREGFWTLLPSMSARRGSHSVAVMGESLFAVGGYDGNSNISTVEIFDPRANSWRIGRSCSIARGYGCAVTMDGNLYFIGGVNDAGETLGTVEVYNERQGWSISGCKSVGKRAFACAITV

SEQ ID NO: 224295 - protein, 106 aa, Zea Mays
MHVLVEWTWKLREEGRLLEIVDPELKKYPEEQMLRFIKVALLCTQATSQQRPSMKQVVNMLSNKAEIDLQNVVAPGVLKEPRQRTGGFGSLTAGTSSKPKHQRQSS

SEQ ID NO: 224296 - protein, 150 aa, Zea Mays
MGYLAPEYALLGQLTKKADIYSFGVLLLEVISGENSSKPTWGPNMHVLVEWTWKLREEGRLLEIVDPELKKYPEEQMLRFIKVALLCTQATSQQRPSMKQVVNMLSNKAEIDLQNVVAPGVLKEPRQRTGGFGSLTAGTSSKPKHQRQSS

SEQ ID NO: 224297 - protein, 707 aa, Zea Mays
MAKTKPMAAAGEKKKSKGKKKGKNGPAKVAMKARGAAAEERNNPFEAIWSRRKFDVLGKKRKGEERRVSRSRSEAIRKRENTLLKEFVESAKSSVFHDRRIGERDDTLPEFDKAILRQQRERLAKLKRESKYNLSDDDEDEINIHNVLLSENDDFDEEVPLDDGSDEEGKMVLSKKRLSLQSDDHPSITDLPQETHGQKSKKEVMTEIISKSKFYKAQRAKEREEDEHLVDKLDSDFASLAQTRALLSLTESAKVKVNKTDSSTGLTGKEFSNKAKADTYEKLVKEMVMDQRARPSDRTKTPEEIAQEEKERLEKLEEERQKRMLGTADTSDEDDGNENDNHMKLGNSKPISGDDLGDSFSLDESTVKKKGWVDEIYEREGRKIGDDAAASDDGESDDENAGDDEADDEDSDSSDNDFGNMSARDWEQSDDDEVDVGDDEMEDFKEKGQEINDKVVNKDAHNLKGESNVKPQVKDGSIPFVIDAPNDLKDLSSLLDGRSEAEIIEIISRIRACNSIRLAAENRRKMQILWQVFYGVLLQYFAVLATQSPVKFRIIDILVKPLIEMSGETPYFAAICARERLIHTRTRLCEDIKVPGKSSWPNLKTLLLLRLWSLIFPCSDFRHVVTTPLLLLMCEYLMRCPIQSGRDVAVGSFLSSMVLVVTKESKKFCPEAIGFLQSLLVTSLKGKVETHLHNQVSINSDADCIFC

SEQ ID NO: 224298 - protein, 369 aa, Zea Mays
MDQIATPDETAHASAPSVHKLFDAKLGHHSVMDGTLASTSQSSNIKTQLIRSSSLSRSISVNLEKRSPESDPESPQSHVSHPKFAEPMFSNSSTFCTSLFSSSSTTEPCRQMGTLPFLPHPPKCEQQVSAGHSSSSSLLLSGDTGLDVAEQSDDLNDLLNLSGDASDGSFHGENNALAFDEQMEFQFLSEQLEIAITDNEKNPHLDDIYGTPPQLSSLPVSSCSNQNLGSPVKVQLSSSQSSSSSATANKSRLRWTLELHERFVEAVKKLEGPEKATPKGVLKLMKVEGLTIYHVKSHLQYRLAKYIPEPKDDKKASSEDKKAQLGKGSIDSSKNKNLQVAEALRMQIEVQKQLHEQLEMFSALMISIP

SEQ ID NO: 224299 - protein, 999 aa, Zea Mays
MPLSDEERRVGTPVVVTCNDQRREVSVAQNIANKQIDRTFAFDKVLGPKSQQQDVFNHAVVPLVSEVLDGYNCTIFAYGQTGTGKTYTMEGGGGKALNADLPTDAGVIPRAVKCIFDILEAQSAEYSMKVSFLELYNEELTDLLAAEESKFSDDKSKKPLALMEDGKGGVFVRGLEEELVSSAAEIYRILERGSAKRKTAETLLNKQSSRSHSIFSITIHIKECTPEGEEMIKCGKLNLVDLAGSENISRSGARDGRAREAGEINKSLLTLGRVINTLVEHSGHIPYRDSKLTRLLRDSLGGKTKTCIIATISPSVHCLEETLSTLDYAHRAKHIKNKPEVNQKMMKSALIKDLYFQMDRLKQELYAAREKNGVYIPREQYIADESEKKHDGGILQAMSEKLDRLELVLESKDKQLEELHGLYESQKVLSADLSDQLQTLQKRMKETECTLADLETRYMKANDTIKEKQYLIENLLKSEKVLVGEAQTLRSELENTAGDLHGLFSKLERKEKIEDKNGSIIQYFHSQLIQEMNVLHRTVSTSVSQQERQLKALEEEMQSFVTSKGKVAGGLQEHVRKLKESFNSRIAELHGFANELKHKSMLSFENLNSQVTTHTSSLEDCMKDLLVDADELLIALQNGLSQHEVNFATFIEQQHEGLSRNLEGTKFVSATTMNFFRTIDSHALGLLKILEESKMEHQKQLFQLQKKFEAVVADEEKYLMEKVAGLFAESNARKKNMVQDDICSLNRTVSESSNNLQTETTKLHDFTSSMKEQWEGYMKKTEEAFQQNVSSIEQKRGFLAGNFQQCKEKVESCSEQWITAQNLVLALGRRNAEAIGLVISDGNEVSNQLGARISSAVAAGFEDNDISSKSLLSCIDDSLKLDHGIRENVKSIVMTSRAQLHDLEHGHYEMTKAITGNADRSLGEDYKVDEATCSTPRRREINIPDSQSIIELVTPLEDIVKSFWDSRTPTKPALNAKGKQQLVGSTTPETQRAPLSAIN

SEQ ID NO: 224300 - protein, 129 aa, Zea Mays
MILGIFSYDTVFRICLQTTQPNADDKYVAIDKYMVLITCIICQVFLENSQRHCVQRTNHLQKCPIACCRYGRKTTIIEGKEEQVELEVFNFTGVGGVALSMYNTDEVHLVLATIPLRNGHCIFAPRTLF

SEQ ID NO: 224301 - protein, 89 aa, Zea Mays
MGESLKVLLSSWYVRDFATLVVDYGISINLIEVDPLILLKMQCSTFLLLLTFLIKQNAEFLTTKLLLDPTSNFACAYICLHPIMIFEFL

SEQ ID NO: 224302 - protein, 89 aa, Zea Mays; identical to SEQ ID NO: 224301

SEQ ID NO: 224303 - protein, 89 aa, Zea Mays; identical to SEQ ID NO: 224301

SEQ ID NO: 224304 - protein, 321 aa, Zea Mays
MEMASARRRAKPPQAVGGGGDQLALWAACVLLSSLSLLVAAAFSTGFGGAARLTLEAGPDRDREAAGALVTRATGAGSGRYCDEDDDLIDSMSVDGEWVLLRGAAERLYGPGQCPFVDEGFRCRENGRPDGDYAEWAWRPRRCALPRFLTAKWSWSSPKHMHASYIFDVCMRIRFDARRLLEMLRNRRLVFVGDSIGRNQWESMLCMLASAVADDRDKQASPGGASIYEENGSPITKRKGFLSFRFRDYNCTVEHYRSPYLVRRGRPPRHSPKRVATALRLGSMDAMAPRWKDADVLVFNTGHWWNHERLQQLTARRCGST

SEQ ID NO: 224305 - protein, 375 aa, Zea Mays
MEMASARRRAKPPQAVGGGGDQLALWAACVLLSSLSLLVAAAFSTGFGGAARLTLEAGPDRDREAAGALVTRATGAGSGRYCDEDDDLIDSMSVDGEWVLLRGAAERLYGPGQCPFVDEGFRCRENGRPDGDYAEWAWRPRRCALPRFDARRLLEMLRNRRLVFVGDSIGRNQWESMLCMLASAVADDRDKQASPGGASIYEENGSPITKRKGFLSFRFRDYNCTVEHYRSPYLVRRGRPPRHSPKRVATALRLGSMDAMAPRWKDADVLVFNTGHWWNHERLQQLGCYFQDGKTLRLNMSVEDAYERALNTLQKWVQKEVNTTKTLVVLRTYSPAHGVKRWWRWVCQGDGAGAEHVEDRAAPVAGPAQPEPGFN

SEQ ID NO: 224306 - protein, 144 aa, Zea Mays
MKFGKSLSGQIVETLPEWRDKFLSYKDLKKRLKLIGAGNGAERQPKRARRDDSGEADAAAAAAAMTPEEAEFMQLLEAELDKFNSFFVEKEEEYIIRQKELQDRVARAAGRESKEELMRVRKEIVDFHGEMVLLENYSALNYTD

SEQ ID NO: 224307 - protein, 843 aa, Zea Mays
MSAGWRTLLLRIGDRCAEYGGSADHKEHIETCYGVLSREYEHSRDAIFEFLLQCTEQLPHKIPFFGVLIGLINLENEDFSKAIVDTTQANLEDALHNENRDRIRILLRFLSGLMCSKVVVPSSIIETFETLLSSAVTILDDETGNPSWQPRADFYVYCILASLPWAGPELFEQVPDEFERVLFGIQSYISIRRHFDDIAFSVFETDEGHSPNKKDFMEDLWERIQALSRNGWKVKSVPKPHLPFEAQLVAGKSHRLSPISCPPPTPSQSSSEMLKGQEKHEADMKYPQRLRRLHIFPMNKAENMQPVDRFVVEECILDVLLFFNGCRKECAFYLVSLPVSYRYEYLMAETIFSQALPGAFPSVVVGAVHALFDRISNMDMECRTRLILWFSHHLSNFQFIWPWQEWSYVKDLPKWAPQRVFVQEVLEREVRLSYFEKIKQSIEDAAELEELLPPKAGPNFKFHSDESNESTDGLKLSKELIGLIRGKKSTYDIILWVEEQIIPKNGTEFALDVVSQTLLDMGSKSFTHLVTILERYNKIISKLCPNEEMQLLLMNGVSAYWKNSTQMTAIAIDRMMGYRLISNLAIVKWVFSPANVEQFHVSDRPWEILRNAVSKTYNRISDLRKEIQSLKKGLQVAKEASAKNRKELEEAKSVLEIVEGQPAPAERPGRIRRLESHVKNAEDEERTLEESLEAKGVLLARAHEESKDLLKLLFKSFVDVLTERLPPVSVDGEIPNLRSGDQNVNFAAQNSEAATMEIDNENGADNNSEPNERNTKNAYNVGELEQWCLCTLGYLKSFSRQYASEIWSNIAMLDEVFVGDVHPLIRKAAFSGLRRFTNEGSHP

SEQ ID NO: 224308 - protein, 187 aa, Zea Mays
MAGARGRATPTRTPPRSSSPAPRTEAVVPPDWDSAVSTVSSHPSPPVVVVCGPKNSGKSTFSRVLLNALLPRHGKVAYLDTDVGQPEFGPPGCLSFNVLDEAIADLMNPSLREAERCYFFGDISSKRDPEAYLNCLFHSYDYFVGKYRCDENEMLPLIVNTPGWVKGAGFDMLVEMLRWWANRTYDD

SEQ ID NO: 224309 - protein, 284 aa, Zea Mays
MNPSLREAERCYFFGDISSKRDPEAYLNCLFHSYDYFVGKYRCDENEMLPLIVNTPGWVKGAGFDMLVEMLRYICPTIVVQIRITIKNKNLPDGGFWLDGGQTGPMMINIDAAFHDASNRSLLIQKDSCGMRERRLVEYLKQCFPSNISLSTNKELAYALASLPPYQVPFSDVAIVHLHCKVPAGEIWHSLNATIVGLAVSNASEGTRSIPYCVGLGIIRGVDIQKGLLYLITPVPLQRLQCVDLLQQGLIEIPTALLQVRGCVSPYMSTNVLHKISERDLYAG

SEQ ID NO: 224310 - protein, 240 aa, Zea Mays
MVERHTNRHRGFGFVTFEDRRAVDSAIKEMHGQEIDGRTISVNKAEPKMNTDDTRYAGGGGRGEYRGGRGSHPSSVVAVALAGETAFLVQIGLVIVTWMIVMMVVAMGTVIKLMQGTGMLVAEIAMPMTVTHLVAITLVETGMEVVRIVMCQVVMVGSEKEATREMEFVVVVAAAAAMIGVAQGVVVGMTGMVHAAVEEVHAMMEEITGRGLGHMIALAGEDVLMIATDELPVDSSSLSW

SEQ ID NO: 224311 - protein, 92 aa, Zea Mays
MILATSTVSTFVKYIFYVSDMLMEDYVRYRKITSNMNERFPDATSEELDVEIGEQAEEEVPLRLLHGSFSSTGRILSTGTVPCCLPQCASQQ

SEQ ID NO: 224312 - protein, 362 aa, Zea Mays
MASTKAPGPGEKHHSIDAQLRQLVPGKVSEDDKLIEYDALLVDRFLNILQDLHGPSLREFVQECYEVSADYEGKGDTTKLGELGAKLTGLAPADAILVASSILHMLNLANLAEEVQIAHRRRNSKLKKGGFADEGSATTESDIEETLKRLVSEVGKSPEEVFEALKNQTVDLVFTAHPTQSARRSLLQKNARIRNCLTQLNAKDITDDDKQELDEALQREIQAAFRTDEIRRAQPTPQDEMRYGMSYIHETVWKGVPKFLRRVDTALKNIGINERLPYNVSLIRFSSWMGGDRDGNPRVTPEVTRDVCLLARMMAANLYIDQIEELMFELSMWRCNDELRVRAEELHSSSGSKVTKYYIVYL

SEQ ID NO: 224313 - protein, 348 aa, Zea Mays
MSMCPSSYSIPFFYRDVSQPEPGPLQFYLLKLMSPDRKGLLHDVTHILSDLELIIHRVKVSTTPDGRVVDLFFITDGMELLHRKERQEETCSALTATLGPSISCEVVPAEGFQQGFSSLPPEIAEELFRAELADTDSEVCSSPLSAELRKVRTTATVNFDNSLSPAHTLVQIVCADQKGLIYDILRTMKDCNIQIFYGRFRSDKKGSASKGSSGCREVDLFVKQVDGKKVTDPAKQDALRSRLRSETLHPLRVMVVGRGPDTELLVANPVEASGKGRPRVFYDATLALKALGICIFSAEIGRQAASERHWEVYRFLLDDSKEFPLASSLANRNCVVDRARKTLMGCYN

SEQ ID NO: 224314 - protein, 645 aa, Zea Mays
MLFPERPFKSSPKLKSYFDSDTGLDYPDDAPTKSKDMPIVQSSLPTLGIRNLVKDSIYMDSRELSVRICTKEVTDHPSNCGDQPRELNGPPRDSTQEKSKGLVDINESLRVLAKLREASWTPAESVHHARLSYDAPRFSYDGKEAASKLREVPRLSLDIKESHLRNGEIDSRLNPSLSSTDRSSNTVIGSNAAFEIQQKQPACKRLPSVVAKLMGLEELPEHNQSIASSHACKTVQGSKQEAMFNPLSISSHNEHALRQQRNHDSTVRNLPNSKFPVETAPWKQQERIILPRKLPKGSKGAHGREQPAASVISDIEKRLKDLDFRQSYKDLRALKHILDSMQAKGLLENKNREEISMPKLSDGNHNGQEIASVNMRVNSNTNNVCMPEESNAESSFKSPIVIMKPSKCANLFNEVDSSVFPLGGSSDPPQQQTSNSTYRRKASTRNRTAKEQHAKFSSKVPTSQPLVSYDRRSYGRNDDSSNNQKSSSLLVTESSSRRQQLPRDSSISMKKNKHSTTPRLQQRKLGSERRARPPIPCAESNKSQNQSGDRNNAETVSPRSKFRRKLLCPQEGDDDMPSGLNNRTRSLNQHGNDMSTRSDGSITVASELDIISNDRSTEVDIPNFDQGIGTPSGRNPQRVMTSVKH

SEQ ID NO: 224315 - protein, 122 aa, Zea Mays
MESRKEEQAAVGWMTVPAFGEWDVKNGAVPDYSMDFSKIREMRKQNRRELSRASLGGGDDDDDDLLQKKQQQQQEEGSKAQPRNKPSAAVADDAHRRALHDDSPTIKRSSMQVVGCWGKTQG

SEQ ID NO: 224316 - protein, 458 aa, Zea Mays
MGISRPLVMAMAVALLIAVAGATAEEQEPLLAADAVAGAVEAALGEVETAALRAELGQLRAKISALESDIEERSQELKNKDDAIMNLEKAIEEKSKAITSMLDEIASLQLIHVQAKGSVAAEEQANKANAKVVELEKQVDKIKKDIEAQSSQKAALEYRANDAEKKVEVLNEKLNTIQKESDEKKRKIKKTERALKVAEEELMRLQLEVTAKSKQLSEVHGAWLPPWLMAQYACYAEVVSGHWDQHGKPAVQNFLHKASEKSAQAKKWAEPHIETAKMKWIPVKQKLVALKKNAEPYVQKVSTRSVEFYESSRDAVTPHAVKVKVFVHSYYQKAKKFSKPYIDQIAEITKPHVEKIRTTLKPYTKRAVHAYGSFLKSATTYHRQAQASIMDYLHQHDITKSLATKELVWFLASALLALPVFIIYRLLVGTFCSKKNKRPRSSNGNHGHKRYKRRHADK

SEQ ID NO: 224317 - protein, 117 aa, Zea Mays
MGISRPLVMAMAVALLIAVAGATAEEQEPLLAADAVAGAVEAALGEVETAALRAELGQLRAKISALESDIEERSQELKNKDDAIMNLEKAIEEKSKAITSMLDEIASLQVCNLKHNS

SEQ ID NO: 224318 - protein, 721 aa, Zea Mays
MAPQPQMEHNGTEQCVNDQSLRSSHGCVNIEKPVFHTDNAGVQQETMADVVNESETGNLQKDPPAPTFIFHQPCMPESRSYVPPQEDTIDAVGLGARSSERSPIVEGNMSVGSVLASDGCDVPLQGSITEPFFQQDKHDHTVIVGPKSCKRKSPIPSYCAHGDGADGGGSSNQSSKVSIREGPSTHATVTSGFDRISDVLPTDAPESEHLPECITAQDTTISQPDSRKAHLSALQQERGEKVTQDLEDISANIGSVEKDHIHGDLTLPSASVLLSISCNGANQGSKYETNLQPGTATEDMMAFEEQNADKSHLEVSGINKANQALHDDGGVMKNNTVHGGLIVQTAPVSQNCNVTLHDKTSEQENEKNIQKDNCHTYVPGSSQDRGGESAKKTTNELKSGDISSKICVHFNVQDINDTLEDLSQQGLCIKCGEGGQLLECNGCFLAAHSSCFGSSATFEGTNFFYCPVCLYKKATEAYKKAKKTYCETRKNLVAFLGTAQATNQPDKQLNGAQPGAANRDEEPHDEQHSKGCGASKGAHENEVYNLAHQDEEHHQQRKKQKINAIVLQNNNKTPVKDPEKKQQAVNEEARKEGGNDNSSHETGASSPRRCDPPSNQDVEADQDDSLTTSNQSGGSDEIEATSSNDSAKQSSPPWRGMGHNKKGLHEKEPAVSSKSGKGIGKQDQHMHTSRRKKKMHTCKSAIPILLRHLEDANNSVGQKKK

SEQ ID NO: 224319 - protein, 247 aa, Zea Mays
MCCENYLFACYMADNMATLAKQANKGLLYLAELSQQAVVIGEMGEEYNQRYLHKGEYRETPETGIQWVTNCMGRPRYFYKMFRMSTDVFMALHDLLVSSYDLTSTNNVSSMESLAMFLWIVGGPQSFSQAENRFTRSLWTVHTKFHEVLKCLRKLSKDNIKPRYPTFKTEHDRIKEERFWPYFQGAIGAIDGSHVPVTVPAAEVLNYTCRHGYTSQNVLAICDFDMRFIFVVAGWPGSAHDTRILNH

SEQ ID NO: 224320 - protein, 522 aa, Zea Mays
MALAALLALLLALWRLVWRPHAVARSFARQGIRGPPYTFLAGSLPEAKRLLMAGRRGTAPLDAGCHDIMPVLLPQFHRWVADYGRTLLFWIGPIPAVLSTDLQLIKQVLTDRTGLYQKDFMIPVLKFLFGNGVILINGDDWKRHRKVVLPAFNHETIKSMSAVTAEVTEQMMQQWRGQIHGSEEESAEIDMIHAFNDLTSKVNGRVAFGTSHREVEEVIVLMREMQKLATAATLDAPILWYLPTRRNLHVRRLNKQLRSKIMSIMQARLAADGADRRGGRGGAVSGGGDLLGLLLEAWTPQPQHGNGGETLTTDEVIDECKTFFAAGQETTATLLVWAMFLLAVHPEWQDKVREEVVREFCTSDDGEVPHADVLAKLKLLYMVLLETSRLYPPIVYIQRRAAWDAVLGGIKVPQGTVISIPIAMLHRDKQVWGPDADEFNPMRFEHGLTKAAKDPKALLSFSLGPRVCTGQSFGIVEVQVVMAMILRRFSFSLSPKYVHKPKYLLSLTPKLGMPLIVRNVDG

SEQ ID NO: 224321 - protein, 80 aa, Zea Mays
MFDMSKLEAEELKTVQKADVIAWYNTYIRSSSPKRRRLAIHVYGCNSDIAEAAKLQEQSWTIIDDVESLKASSQFYSSLC

SEQ ID NO: 224322 - protein, 287 aa, Zea Mays
MKFQNESTLRSPGCTGGEKNTSQIPKALVGNGNEGGRMNWQQHRKNYPSAMRSSNGQTTLKSFLFKPRVVDGVPSPPPAAVMEAPICSPEPPKREIVRVTKTTIKEKASAFSSVGSTGKDGGGGALSAAVFKRFHSSAPRARAEGDRVQAGEDGDLELGGAGDARLDVEETGAESRRGPRSKRKSPIGGHEYMSEAKARRVVVLGDDPRPRSATTRGRARRSRGGEGEGGRALYNHLVCFGGRRERRRVVARRQGGRGRGRDRLDGRHVGGYGIRHARRPGVALAVP

SEQ ID NO: 224323 - protein, 129 aa, Zea Mays
MPSSAMSSGLEPVLCAPRPRRVQQLHPCSADLILGAPPFPRNANSKEKRTGKRIETRVRRNGLWYISQEDTALAIEEGVKIFCCTIADWDTHLLIVTKCRFIEEDNSWLRLQFHEEELQSTREDNMHPS

SEQ ID NO: 224324 - protein, 237 aa, Zea Mays
MGASSSSCLRFLEKFVSWSTGGGEEAPPFIICNDPLVKKELLPSGTQSTSGCSASIALGKLRQKRLFLEQSGACCIVMPCQFLHAWHDEISQGCSVPFIHVGDCVVKELKAANLKPVEYGSNVRVGVLFTDNKLATNCYLDKLESQGFEVLCPDKASMERTVLPSVAAFGKGDMEGARNLLRVSLQVLLVRAVNSIILASDDLVGILPDDDPLLKKCIDPLDALVREAIACARAPQP

SEQ ID NO: 224325 - protein, 276 aa, Zea Mays
MGAYKYVSELWRRKQSDVMRFVQRVRCWEYRQQPAIVRLTRPTRPDKARRLGFKAKQGYVVYRVRVRRGGRKRPVPKGIVYGKPKHQGITQLKFQRNKRSVAEERAGRKLGGLRVLNSYWVNEDSTYKYFEIILVDVAHTAIRNDPRINWLCNPVHKHRELRGLTSAGKKFRGLRGKGHTHHKNRPSRRATLTTRTGRPGGPPGSATRPFPSAATVEHTHLDALLLWNPPHAGSLIVFGIFVSLLNFATCVTFEPLELRCLYHGASDAYESMKMIV

SEQ ID NO: 224326 - protein, 68 aa, Zea Mays
MVSCPGSKKGQGAGGVMSCSMAMRGRRGRAPDAARTRRSCSSASCLECSTASKIYDLINYVRSPSVII

SEQ ID NO: 224327 - protein, 50 aa, Zea Mays
MHALAATHPPIPIHLISPSDDARGGRRSLPPRHQEWCRALGPRRGRVLEE

SEQ ID NO: 224328 - protein, 427 aa, Zea Mays
MPSYAHHHPYQRVQPMSVPTHCPNQNPQALMGHNLYHLSPYSFGTYFASSGLPRNLGVVITIWAPIVMVYFMDTQIWYAIFSTVFGGVSGALSHVGEIRTLGMLRARFKSIPEAFSQCNAIKQREQAFEHRSFFRVWNSFINSLREEDFISDREKDMLMAPSYSSNLSIIQWPPFLLASKVPAAVHMAMNSKEGDEHELIEKIKLDGDRYDAVIECYKSLMIILNSLLLDTNDQNIVNDIDKKVTYSMIKKTFLEDFEMAEIGKVSSTLARLLQLLKSEPINDVGERKIVNALQDFMEITTRDFMKDGQSFKDEDERNQRFMNLNMNMIKEDYWREKFVRLHLLLTMKDSAMDVPINLDARRRITFFANSLFMKMPRAPRVHDMISFSVLTPYYNEEVLYSSHDLNRKNEDGISILFYLQKIYPANS

SEQ ID NO: 224329 - protein, 739 aa, Zea Mays
MPSYAHHHPYQRVQPMSVPTHCPNQNPQALMGHNLYHLSPYSFGTYFASSGLPRNLGVVITIWAPIVMVYFMDTQIWYAIFSTVFGGVSGALSHVGEYVREKDMLMAPSYSSNLSIIQWPPFLLASKVPAAVHMAMNSKEGDEHELIEKIKLDGDRYDAVIECYKSLMIILNSLLLDTNDQNIVNDIDKKVTYSMIKKTFLEDFEMAEIGKKSEPINDVGERKIVNALQDFMEITTRDFMKDGQSFKDEDERNQRFMNLNMNMIKEDYWREKFVRLHLLLTMKDSAMDVPINLDARRRITFFANSLFMKMPRAPRVHDMISFSVLTPYYNEEVLYSSHDLNRKNEDGISILFYLQKIYPDEWNNFLERIGVESNNEVSIKGRMDDIRLWASYRGQTLARTVRGMMYYRRALELQCYEDMINDQGYGLADLDTAKAARSKAIADIKFTYVVSCQLYGVHKTSKDSRERGLYENILNLMLTYPALRIAYIDEKEVQLRNGKIEKQYYSVLVKGDDEEIYRIRLPGKPTEVGEGKPNNQNHAIIFTRGEALQAIDMNQDNYLEEAFKMRNLLEEFLLTHGKSEPTILGVREHIFTGSVSSLAWFMSSQETSFVTIGQRVLANPLKVRFHYGHPDVFDRLFHLTRGGISKASKIINLSEDIFAGFNSTLRRGNVTHHEYIQLGKGRDVGMNQISNFEAKVANGNGEQTLCRDIYRLGHRFDFYRMLSLYFTTVGFYFNSMEKR

SEQ ID NO: 224330 - protein, 513 aa, Zea Mays
MNQISNFEAKVANGNGEQTLCRDIYRLGHRFDFYRMLSLYFTTVGFYFNSMVAVLTVYVFLYGRLYLVLSGLEKSILQDPNIQNIKPFENALATQSVFQLGMLLVLPMMMEIGLEKGFGRALAEFVIMQLQLASVFFTFHLGTKTHYYGRTILHGGAKYRATGRGFVVRHAKFAENYRMYSRSHFVKALELLILLVVYLAYGSSYRSSSLYLYVTVSIWFLVFCWLFAPFVFNPSCFEWHKTVDDWNDWWKWMGNRGGIGLAPEQSWEAWWVSEHDHLRNATIRSLLLEFILSLRFLIYQYGIVYHLHIVHGNKSFLVYALSWLVIAVALVSLKVVSMGREKFVTRIQLVFRILKGIVFLVLIGLLVLLFVGFDLAVSDVGASILAFIPTGWFILLVAQLCGPLFRRLIIEPLHLLCCPYGTGGACRGPCCARFRQRTGAALRKMGPWDSIQEMARMYEYTMGLLIFLPIAVLSWFPFVSEFQTRLLFNQAFSRGLQISRILAGQNGSGTKSD

SEQ ID NO: 224331 - protein, 4108 aa, Zea Mays
MDPGGGGGMLLEDFGQRVDLTRRIREVLANYPEGTTALRELIQNADDAGAGRVRLCLDRRSHGRASLLSPALAQWQGPALLAYNDAVFTDEDFASISRIGDSRKVAQTWKTGRFGVGFNSVYHLTDLPSFVSGKYVVLFDPQGAYLPNVSASNPGKRIDYVSSSAITMYHDQFSPYCAFGCDMKASFQGTLFRFPLRSSEQASSSRLSRQSYTEDDILSLFAQLYQEGVYNLLFLKNVLSLEMYVWESGMTEPKIIYSCYLGPQSEKLSWHRQALVRFSGTPVESSKQKLDSFSMDFISEAFLGNKIEKKSSTYFIIQGMASASSKIGIFATAAAKEYDLHLLPWASVAACISNTGLEDTVLRQGQAFCFLPLPVRTGLSVHVNGYFEVSSNRRDIWYGADMDRGGKLRSDWNRLLLEDVVAPLFRELLMKLRTLSDSTISYYSLWPTGLYEDPWSILVEQIYKVIYTSPVLHSEIEGGTWISPADALLHDEGFSGSNNLNEALVLVGMPIVRVSNAIGDMFSKFYMQSMLKIVSPAIVRHFLKDYAKLATLGKSHKLILLEYCLTDVYNTDIGKCMNGLPLIPLANMRYGTFSASSQEDYYYVCDNIEYELLAEVGDRIVDRSIPPVLLDKLYQIASDSQANIRFIDGPIFCQLLPRLFPPGWKLKDQVPWNPGLGGSSPTAAWFKLFWQYIGGRSYDLHLFSDWPILPSTFGHLHRACTSSKLIKTESLSSLMNELLAKFGCKILDAEYLSDHKQLSFYVYDGDATGVLQSIFEVISLEGVDLQSLFQRITPGEKNELYQFLLDPKWYLGACLSVVSINQCKKLPIFRVFDGGSPSTYGFSDLFSSRKYLPPLGVPDHLLNDDFIFSICPSDEDIIMRYYGIERMPKSNFYQRYVLNRLDKLQTELRDSVLLTILQDLPQLSLEDPMFKETLKILRFVPTINGTLKSPQSLYDPRVEELYVLLQESGCFPHGLFQNPDVLDMLLCLGLRTSVSTDTILESARQIDSLVNIDQQKAHSRAKVLLSYLEVHAHKWYVNKLFDGRKKVNMLAKVTTALRPRDKSWEFDLEKFWSDLRLICWCPVLATAPSPALPWPSVSSMIAPPKQVRMQEDMWIVSASSRILDGECTSSALSYSLGWLSPPSGSVIAAQLLELGKNNEIVTDQVLRQELALVMPKIYSLLTNLIGSDEMDIVKVVLEGCRWIWVGDGFAKTDEVVLSGHLHLAPYIRVVPIDLAVFKDLFLELGIKEHLYPVDYASILGRMAIRKASASLEAEELRTAILVVQHLSEFRFQDQQTQIYLPDSSSRLCLSSELVFNDAPWLLDFGHDISGSASSIALSSKKYVHNFVHGNISNDVAERLGVRSLRRLLLAESSDSMNLSLSGVAEAFGQHEDLTTRLKHIVEMYADGPGILFELVQNAEDAKASEVVFLLDKTQYGTSSILSPEMAEWQGPALYCFNDSVFSPQDLYAISRIGQDSKLEKPFAIGRFGLGFNCVYHFTDIPGFVSGENIVMFDPHACYLPGISPSHPGLRIQFVGRRILDQFPDQFAPFLHFGCNLQQPFPGTLFRFPLRNAAAASRSQIKREQYAPQDVEMLFSSFSEVVSEALLFLRNVKKVTLYVKENNSKEMRLVHRVSRHNSSQIGKEPHALGAMLAFIHGSQPSGMDRNQFFSKLNKTKDSDLPWSCQKVTILEENPSSHLLHSWILAECIGGGHARKLSTASVSKSHFFVPWASVAAYLHSVSVDDTKGLSAEAEVNHDNSVFTNPDLGSSKFRKNFEARAFCFLPLPINTSIPVHVNAYFELSSNRRDIWIGNDMAGGGRVRSEWNLALLEDVVAPAYGHLLAAVAEELGPSDLFLSFWPSAAGVEPWSSMVRKLYVSIAELGIHVLYTKARGGHWLSTRQAIFPDFSFSKAMELAEVLSQAGLPVVSVTKPIIDSFINAYPSVHLLNPHLLRNLLIRRKRGFRSREEAILVLEYCLSDMGDPSFCDKLQGLALLPVANGSFTTFNKRGEGERVFLTSQIEFELLKDSIPHLVIDNSLPDGVSKKLYDIAYSACMNIYIFTSNLLIELLPRILPPEWQHAKQLSWFPEQQGQPSMEWMVSLWNFLRHSCDDISVFAKWPIIPLVDGKVVQLGNAANVIRDYGWSENMHSLLQKLGCLFLRSDLQIEHPQLANFVQESTAAGVLNAVQSVASNLQDIKELFMSTSLAEAHELRSFIFQSKWFSGNQISSSHMNTIRNLPIFESYKSRELVSLTNPRKWLKPEGVHEDLLDASFIRTESVKERSILVSYFDIKEPQKVEFYKDHVLPRMSEFLLQPAIISAVIRDVKLLIDNDDSARAALCETPFVLAANGAWVQPFRLYDPRVPELLKLLHQDTFFPSEKFMMTEVIELLGSFGLKRNFGFSTLLDMARSVSLVQNSGQGDAFDYGQKLLAYLNILESKTSKMEGGETFLEDGNLEASEISETLEPNNHGDVCDPSDQTSVSLFSNFDYDMPEDLFWSELKNISWCPVHVAPLLKGLPWFISEDIIAPPVITRPKSQMWLVSSKMRILSADSCSMYLQRKLGWCDPPNVSTLSSQLVELSKSHDELKMFSADTDIDAILQKEVQVMYSKLQDIIGTPSGNALKKYLDGFQWVYVGDRFVAPQALAFDSPVKYHPYLYTVPSELSEFKKLLSELGVRQTFDGMDYLNALRRLEGDVKGEPLSTDQLSFVHCVLEAFVDCYPDSQAPDVLLNSLAIPDSLGVLTPARNLVYNDAPWMNANPTSKNFIHLSIGNELANRLGVRSLRGSSLLDDELMRNLPCMEYAKISELLALYGESDFLLFDLIELADYCNAKKVHLIYDKREHPKQSLLQQSLGDLQGSSLTVVFEGTIMNREEVCSFQLPPPWKLRGNILNYGLGLLSSYFVCDALTILSGGYFYIFDPLGLTGGTTSTATSSARYFSLLGNDLVERFYDQFLPMRVTQDASLCTANSTIIRMPLSSKCLKELEAGCNIVQRVFDRFTQNPSSTLLFLRSIIQVSLSTWEDGASQSTLNYSVLVDPSVASLRNPFSEKKWRKFQISRIFSSTSAAIKMQAIDVHVIESGCSYIDKWFVALSLGSGQTRNMALDRRYLAYNLTPVAGVAAHIARNGVSTNIHPSSCILSPLPLSGFISMPVTTLGHFIVRHSGGRYIFDSPRDASLPELKEDRVRLVEAWNKELMLCVRDSYVEMVLEFQKLKTDPLSSAIEPRSAQSVSAILQTYGDRVYSFWPRSKQNPTSFTGRVSTGTNMDSPRASKADWQSLIEQVIKPFYVRLADLPVWQLYHGNLVKVDEGMFLAHSGNGDDDNLPSDSVCSFIKERYPVFSVPWELVSEIQAVGVTIREIRPKMVRGLLKASPSILLRSIETYIDVLEYCFSDMDPYRFSDDLPDESRVNSQHVGTTNSSISHSMPSSSSSLSYQSSTQMAGTSGGDALEIMTYFGKALYDFGRGVVEDISKTNSPAFHRTQAAETNVLSSIISELKGVPFPTSTMRLTKLGMAELWIANEQQQLLMSPLLDQFIHYKCLEKPFLALLLSTQVIHRPLKLRSFSPHLLAGYLKRILDERWIRIVLENKSSWIPWDNNAESSTTPTPKWIRSFWKIFSSLNGDLSLLSDWPLVPAYLDKPVLCRVKERHLIFVPPISDSPDPPGDDVAGQLDTPDSPREDTRAEQNAVLDTAFRSMNSEFPWLTSLLNQLNVPIFDPSFPECGAMCNLFPPNGRTLGQTIVYKLVAAKNAAHLPSLISLSSEDCDKLFGLFVSEFILTNNHLYQREELDVLRTLPMYKTVTGTYTSLLGSDHCILSPTAFFHPSDARCLSCSSNAHLFLQALGVEQLNDHEILVKFALPGFGNKTAQEQEDILTYLYASWKDLQLNSAVVETLKETNFVANANEFCKEFFKPEELLDPSDALLTSVFSGERNKFPAERFMSDGWLVILRKAGLRTSTEADMIIQCARKIETMGHDIMSSLEDADDFEADFTDSKNEIPFEICSLAESVVNVLFANFATLYDSAFCEKIGKIAFVPAEKGFPSIGGKRGGRRVLASYNGAILLKDWPLAWSSAPILTKQTIVPPEYSWGAFRLRSPPAFSTVFRHLQVNVTKKLNK

SEQ ID NO: 224332 - protein, 296 aa, Zea Mays
MVGLDHKALFYSALRCAREMIGVTDGSKNLIRAINNRLSALSFHIREYYWVDMKKINEIYRYKTEEYSHDAINKFNIYPEQIPSWLADWIPVKGGYLIGNLQPAHMDFRFFSLGNLWAIVSSLATQRQAEGILNLIEAKWDDIVANMPLKICYPALEYEEWRIITGSDPKNTPWSYHNGGSWPTLLWQFTLACIKMGRRDLARRAVEVAEKRLSDDKWPEYYDTRTGRFIGKQSRLYQTWSIAGYLSSKMLLDCPEMASILVCDEDFELLEGCACSLNKNARTKCSRRAAKSQVLV

SEQ ID NO: 224333 - protein, 100 aa, Zea Mays
MVNPFVHSTLILPISHTSTPMVYFTLRAAEKRCRLSLLPGGCRSDNIPIREPRCLVPSINTGKEEQEKLGGSICSICVFRSMICCRSVVCSPRYLRFCHY

SEQ ID NO: 224334 - protein, 337 aa, Zea Mays
MLSTRTAAVAASASPASPWKLGGRSEGGASCDGCRTYRNTLRRRAAPAKVRALPPSEELPVMPWATSVASGYTLLRDPHHNKGLAFTEEERDGHYLRGLLPPAVLSQELQIKKFMNTLRQYQTPLQRYIAMMNLQETDERLFYKLLIDNVVELLPFVYTPTVGEACQKYGSIFGRPQGLYVSLKDKGKVLEVLRNWPHRNIQVICVTDGERILGLGDLGCQGMGIPVGKLALYTALGGVDPSVCLPITIDVGTNNEKLLNDEFYIGLRQKRATGEEYDELIEEFMSAVKQFYGEKVLIQLRTLPITMPLICLKNIARAILFSMMISRAQHQWSLQVC

SEQ ID NO: 224335 - protein, 2165 aa, Zea Mays
MSTAQGTALRSAPLGAGRWARRGRPVAAPYRSGWQAYGGVSLEGSGFLGRVHRTEERVAPRAPHAAARDAEVVRPLSKLPNSSIGLYDSSFERDACGVGFVAELSGDYKRETVNDAIEMLERMAHRGACGCEKNTGDGAGIMVALPHDFFKEVAKDAGFELPPPGEYAVGMFFMPTDEKRREKGKAEFMKVAESLGHVILGWRLVPTDNSDLGESALETEPVIEQVFVTKSSRSEAEFEQQLYILRRLSIISVRASLNIKRGGERDFYMCSLSSRTIVYKGQLKPSQLKGYYYADLGHENFMSYMALVHSRFSTNTFPSWDRAQPMRVLGHNGEINTLRGNKNWMTAREGLLEAEKLGLSKEQLSRILPIVDATSSDSGAFDNVLELLVRGGRSLPEAVMMMIPEAWQNDVNMDPEKKALYEFLSALMEPWDGPALISFTDGRYLGATLDRNGLRPGRFYVTHSGRVIMGSEVGVVDVPPEDVLRKGRLNPGMMLLVDFENHTVVDDEALKAQYSKAHPYGEWLKRQKIYLKDIVESVPETDRVAPSISSSLSQKNENIDHVGISGILTQLKAFGYTVEALEMLLLPMAKDGVEALGSMGNDTPLAVMSNREKLTFEYFKQMFAQVTNPPIDPIREKIVTSMECMIGPEGDLLETTEKQCNRLALKGPLVSIDEMEAIKKMNYRGWRSKVLDITYPKKSGRKGLEETLNRICAEARKAIREGYTILVLSDRGFSSDRVAASSLLAVGAVHQHLVANLERTRIGLLVESAEPREVHHFCTLVGFGADAICPYLAIEAIWCLQNDGKITPNGDGQPYSKEELVAKYFYASNYGMMKVLAKMGISTLASYKGAQIFEALGLSSEVVGKCFEGTPSRIEGATFEMLARDALRLHELAFPSRALPAGSADAKALPNPGDYHWRKNGEIHLNDPLAMGKLQEAARVNSRAAYKEYSKRIQELNKACNLRGMLKFKHVSDKISLDEVEPASEIVKRFCTGAMSYGSISLEAHTALAIAMNKLGGKSNTGEGGEQPSRMEPLPDGSMNPRRSAIKQVASGRFGVSSYYLTNADELQIKMAQGAKPGEGGELPGHKVIGDIAVTRHSTAGVGLISPPPHHDIYSIEDLAQLIHDLKNSNPGARISVKLVSEAGVGVVASGVVKGHADHVLISGHDGGTGASRWTGIKNAGLPWELGLAETHQTLVANGLRGRAVLQTDGQLKTGRDVAVACLLGAEEFGFSTAPLITLGCIMMRKCHMNTCPVGIATQDPVLREKFAGEPEHVINFFFMLAEELREIMANLGFRTITEMVGRSDMLEVDPEVVKSNEKLENIDLSLILKPASEIRPGVAQYCVEKQDHGLDMALDNKLIDLSRTAIEKQVRVFIETPIQNTNRAVGTMLSHQVTKRYHMNGLPAGTIHVKFTGSAGQSFGAFLCPGITLELEGDSNDYVGKGLSGGKIVVYPPRNSSFSPEDNIVIGNVALYGATMGEAYFNGMAAERFCVRNSGAQAVVEGIGDHGCEYMTGGTVVILGKTGRNFAAGMSGGIAYVYDVDGKFSARCNNELVDLYHVEEEDDIITLKMMIEQHRRNTESVLARDILSDFDNLLPKFVKVYPRDYKRVLESMKVEKAVAKHAKEPKMANGISVTTKKVQPDQSASRPTHVANAKKYRGFITYERESISYRDPKERVRDWKEVAIESTPGPLLNTQSARCMDCGTPFCHQESSGAGCPLGNKIPEFNELVHQNRWREALDRLLETNNFPEFTGRVCPAPCEGSCVLGIIENPVSIKSIECAIIDKGFEEGWMIPRPPLQRTGRKVAIVGSGPSGLAAADQLNKMGHFVTVFERADRIGGLMMYGVPNMKTDKIGVVQRRVNLMAEEGVTFVVNANVGSDPLYSIERLRSENDAVILACGATKPRDLTIPGRELSGVHFAMEFLHANTKSLLDSNLEDGKYISARGKKVVVIGGGDTGTDCIGTSIRHGCTSLVNLELLSKPPSTRAADNPWPQWPRIFRVDYGHQEAATKFGKDPRTYGVLTKRFIGDGNGKVKALEVVRVKWEKVDGRFQLKEMEGSEEIIEADLVLLAMGFLGPEATIAEKLGLEKDNRSNFKAQFGDFATSVDGVFAAGDCRRGQSLVVWAITEGRQAAAAVDKYLSRYDQNAAATGDSTPSGTGLVQPVAA

SEQ ID NO: 224336 - protein, 1366 aa, Zea Mays
MRVLGHNGEINTLRGNKNWMTAREGLLEAEKLGLSKEQLSRILPIVDATSSDSGAFDNVLELLVRGGRSLPEAVMMMIPEAWQNDVNMDPEKKALYEFLSALMEPWDGPALISFTDGRYLGATLDRNGLRPGRFYVTHSGRVIMGSEVGVVDVPPEDVLRKGRLNPGMMLLVDFENHTVVDDEALKAQYSKAHPYGEWLKRQKIYLKDIVESVPETDRVAPSISSSLSQKNENIDHVGISGILTQLKAFGYTVEALEMLLLPMAKDGVEALGSMGNDTPLAVMSNREKLTFEYFKQMFAQVTNPPIDPIREKIVTSMECMIGPEGDLLETTEKQCNRLALKGPLVSIDEMEAIKKMNYRGWRSKVLDITYPKKSGRKGLEETLNRICAEARKAIREGYTILVLSDRGFSSDRVAASSLLAVGAVHQHLVANLERTRIGLLVESAEPREVHHFCTLVGFGADAICPYLAIEAIWCLQNDGKITPNGDGQPYSKEELVAKYFYASNYGMMKVLAKMGISTLASYKGAQIFEALGLSSEVVGKCFEGTPSRIEGATFEMLARDALRLHELAFPSRALPAGSADAKALPNPGDYHWRKNGEIHLNDPLAMGKLQEAARVNSRAAYKEYSKRIQELNKACNLRGMLKFKHVSDKISLDEVEPASEIVKRFCTGAMSYGSISLEAHTALAIAMNKLGGKSNTGEGGEQPSRMEPLPDGSMNPRRSAIKQVASGRFGVSSYYLTNADELQIKMAQGAKPGEGGELPGHKVIGDIAVTRHSTAGVGLISPPPHHDIYSIEDLAQLIHDLKNSNPGARISVKLVSEAGVGVVASGVVKGHADHVLISGHDGGTGASRWTGIKNAGLPWELGLAETHQTLVANGLRGRAVLQTDGQLKTGRDVAVACLLGAEEFGFSTAPLITLGCIMMRKCHMNTCPVGIATQDPVLREKFAGEPEHVINFFFMLAEELREIMANLGFRTITEMVGRSDMLEVDPEVVKSNEKLENIDLSLILKPASEIRPGVAQYCVEKQDHGLDMALDNKLIDLSRTAIEKQVRVFIETPIQNTNRAVGTMLSHQVTKRYHMNGLPAGTIHVKFTGSAGQSFGAFLCPGITLELEGDSNDYVGKGLSGGKIVVYPPRNSSFSPEDNIVIGNVALYGATMGEAYFNGMAAERFCVRNSGAQAVVEGIGDHGCEYMTGGTVVILGKTGRNFAAGMSGGIAYVYDVDGKFSARCNNELVDLYHVEEEDDIITLKMMIEQHRRNTESVLARDILSDFDNLLPKFVKVYPRDYKRVLESMKVEKAVAKHAKEPKMANGISVTTKYNLISQQADQHMLPMPKSTGALLHMSERVFHTEIQKSVLEIGRKLQSNLHLVHY

SEQ ID NO: 224337 - protein, 1367 aa, Zea Mays
MRVLGHNGEINTLRGNKNWMTAREGLLEAEKLGLSKEQLSRILPIVDATSSDSGAFDNVLELLVRGGRSLPEAVMMMIPEAWQNDVNMDPEKKALYEFLSALMEPWDGPALISFTDGRYLGATLDRNGLRPGRFYVTHSGRVIMGSEVGVVDVPPEDVLRKGRLNPGMMLLVDFENHTVVDDEALKAQYSKAHPYGEWLKRQKIYLKDIVESVPETDRVAPSISSSLSQKNENIDHVGISGILTQLKAFGYTVEALEMLLLPMAKDGVEALGSMGNDTPLAVMSNREKLTFEYFKQMFAQVTNPPIDPIREKIVTSMECMIGPEGDLLETTEKQCNRLALKGPLVSIDEMEAIKKMNYRGWRSKVLDITYPKKSGRKGLEETLNRICAEARKAIREGYTILVLSDRGFSSDRVAASSLLAVGAVHQHLVANLERTRIGLLVESAEPREVHHFCTLVGFGADAICPYLAIEAIWCLQNDGKITPNGDGQPYSKEELVAKYFYASNYGMMKVLAKMGISTLASYKGAQIFEALGLSSEVVGKCFEGTPSRIEGATFEMLARDALRLHELAFPSRALPAGSADAKALPNPGDYHWRKNGEIHLNDPLAMGKLQEAARVNSRAAYKEYSKRIQELNKACNLRGMLKFKHVSDKISLDEVEPASEIVKRFCTGAMSYGSISLEAHTALAIAMNKLGGKSNTGEGGEQPSRMEPLPDGSMNPRRSAIKQVASGRFGVSSYYLTNADELQIKMAQGAKPGEGGELPGHKVIGDIAVTRHSTAGVGLISPPPHHDIYSIEDLAQLIHDLKNSNPGARISVKLVSEAGVGVVASGVVKGHADHVLISGHDGGTGASRWTGIKNAGLPWELGLAETHQTLVANGLRGRAVLQTDGQLKTGRDVAVACLLGAEEFGFSTAPLITLGCIMMRKCHMNTCPVGIATQDPVLREKFAGEPEHVINFFFMLAEELREIMANLGFRTITEMVGRSDMLEVDPEVVKSNEKLENIDLSLILKPASEIRPGVAQYCVEKQDHGLDMALDNKLIDLSRTAIEKQVRVFIETPIQNTNRAVGTMLSHQVTKRYHMNGLPAGTIHVKFTGSAGQSFGAFLCPGITLELEGDSNDYVGKGLSGGKIVVYPPRNSSFSPEDNIVIGNVALYGATMGEAYFNGMAAERFCVRNSGAQAVVEGIGDHGCEYMTGGTVVILGKTGRNFAAGMSGGIAYVYDVDGKFSARCNNELVDLYHVEEEDDIITLKMMIEQHRRNTESVLARDILSDFDNLLPKFVKVYPRDYKRVLESMKVEKAVAKHAKEPKMANGISVTTKKYNLISQQADQHMLPMPKSTGALLHMSERVFHTEIQKSVLEIGRKLQSNLHLVHY

SEQ ID NO: 224338 - protein, 513 aa, Zea Mays
MAQEGSEASVASSPPPPASSSSSSWWRDMHPAAAAYGGAWPPPPPTAARWPPMAASSSRHQQQQQQHGGGRTTSSGGGADDDLSASNATMTSSSFTNTSATNRSGLSMDDDSGGGGPAEAAAAAAAESHHLWNQVLIMGGGGGEVGRSMHDAHDDSENFLELLNSRTLVPELFADPPACDYLKKMEYGSSHGGGGWPDHHQFTTAAALEKHLSSGYGGGALAHQHQHAAAGGAPERLTANLSDLVSNWSIAPPNPCLGDAHHHHRTGVVAAACDNDNAKAGMFLGSGGGVCNHEIGGHGAMLEGAATGGGGGGGQEFLRPAAGAGYSSMLGLSRNNRTMYMEAPWGSNAAGATRSLSDLISFGGAPLGKAEEPAPPTSTKALAEYKKQGHDIPSPASSQVPKVKLGDKITALQQIVSPFGKTDTASVLYEAINYIKWLHEQVQLLSDPYMKTSSKDYNYNAWGRLEDKEGAEMVDLRSRGLCLVPVSCTPQAYRDSNDGPDYWTPPYRSCLYR

SEQ ID NO: 224339 - protein, 628 aa, Zea Mays
MSVNGNHLNGDLPDTFDSLNRLVNLDISSNNLSGVLPSSMKNLASLTSLHMQDNQLSGTLNVLQDLPLKDLNIENNLFSGPVPASLLNIPNFKKDGNPFNTSIVPSASPPSTGPAPTPAASKPAPTPAPTTSNSTPPAPAPSFPSRSPPPPKTTSNSSEGSTTRDSTSPSKKHSTSTLKIVGFVLAGVVLFIIIVLLVLFCLSKYQERRSRYDHNRSQQARVHHRVEPQIKPPPVQQSNDLKKGEVLDRRGHELSSSTAALAKKSPENQKEHVINFDRTDSDLFPVSLPPPPPPPPLPPIERVIANPIVPPEKRYSPPPKTSSSTSATSFSIASLQQYTNSFREENVIRESRLGKVYLAELPDGKLLEVLKIDNANGRISVDDFLEEVECILDIKHPNILELVGYCAEYGQRLLVYNHFSRTTLDDTLHDGEDTESALSWNARLQVALGSGKALEYLHASFQPPIVHQNFEPANVLLDKKFSVCVAECGLAELMPPSSVTQLSGRMRALLNYEAPELQDSGVVSERGDVYSFGVVMLELLTGRKPYDSSRPRHEQHLVRWASSQLHDIESLSKMVDPSIRGQCSEKALSRFADIISRCIQQQPEFRPPMSEIVQDLARLVNATGEESE

SEQ ID NO: 224340 - protein, 777 aa, Zea Mays
MQRAPERRRGAGPLLLLALLVALAAAPRLVRAVTDATDVSAINGLYMSLGSPLLPGWTGNGGDPCGESWQGVVCTGSSITGITMNAANLGGQLGSLGNFTAITSLELNNNNIGGTIPEDLPVTLQSLFLSANQLTGSIPSSLSKLENLTAMSVNGNHLNGDLPDTFDSLNRLVNLDISSNNLSGVLPSSMKNLASLTSLHMQDNQLSGTLNVLQDLPLKDLNIENNLFSGPVPASLLNIPNFKKDGNPFNTSIVPSASPPSTGPAPTPAASKPAPTPAPTTSNSTPPAPAPSFPSRSPPPPKTTSNSSEGSTTRDSTSPSKKHSTSTLKIVGFVLAGVVLFIIIVLLVLFCLSKYQERRSRYDHNRSQQARVHHRVEPQIKPPPVQQSNDLKKGEVLDRRGHELSSSTAALAKKSPENQKEHVINFDRTDSDLFPVSLPPPPPPPPLPPIERVIANPIVPPEKRYSPPPKTSSSTSATSFSIASLQQYTNSFREENVIRESRLGKVYLAELPDGKLLEVLKIDNANGRISVDDFLEEVECILDIKHPNILELVGYCAEYGQRLLVYNHFSRTTLDDTLHDGEDTESALSWNARLQVALGSGKALEYLHASFQPPIVHQNFEPANVLLDKKFSVCVAECGLAELMPPSSVTQLSGRMRALLNYEAPELQDSGVVSERGDVYSFGVVMLELLTGRKPYDSSRPRHEQHLVRWASSQLHDIESLSKMVDPSIRGQCSEKALSRFADIISRCIQQPEFRPPMSEIVQDLARLVNATGEESE

SEQ ID NO: 224341 - protein, 932 aa, Zea Mays
MPATRIPLKRCTAVVPGVEDPGPAASMPPAKRRRERVVPSRFRGSMPPPAPVGEEVEVEDRDGDVYNVEVRMAEPKGDTFGPVETAVWTPVLPAPMDADLYRACRNINKSGSCGGAASGSVLTSVSNAASDGGAGGNGTTVRLSNAGSGGGGGGNGGLEGRPVVVECKPKREVSGRKEDFYWPQDFVLGDVVWARSGKKSPTWPALVIDPLLHAPEVVLNSCVPGALCVMFFGYSANGHGRDYGWVKQGMIFPFVDYLDRFQGQPLYKLRPSKFRAAIEEAFLAERGFFDLETDGVCSPRKSVNKQSDPIGFQEEAASNNEQECQSESQVVGKSALCCDSCGNRLPSKVSKKRKQAGEQMLCMHCEKLLQSKQYCGICKKIWHHTDGGNWVCCDECQIWVHVECDLTCNNVEDLENADYFCPDCKSKSKTVPATENLNTSTSECASTSKGKLTAMIAVCCNGEDALYVPEKHMILCQCKSCKERMMSLNEWEKHTGSRKKNWKMSIRQKSTGELLINLLDDIPCGTSKYSNPGIKKEELLQLQANPYSPVCAKWTTERCAVCRWVEDWDYNKIIICNRCQIAVHQECYGACAVQDLTTWLCRACESPQQKRECCLCPVKGGALKPTDIDGLWVHVTCAWFQPKVSFPVDETMEPAMGIMSIPVEYFKKTCVICKQMHGACTQCYKCSTYYHAICASRAGYCMELQCSERSGRHITKMVSYCDFHSTPDPDNVLIVKTPEGVFSTKFFLQNGEKQTAARLVRKENHQEKVLPPIISDCLVAKCLTYEMSKYKKQPGEAIAHRIMGPRHHSQDFIDGLNACMDRKDDQSFSTFKERLRYLQKTENLRVSCGRSGIHGWGLFAARNIQEGQMVIEYRGEQVRRCVADLREAQYHREKKDCYLFKISEDVVIDATDKGNIARLINHSVCRTAMLGS

SEQ ID NO: 224342 - protein, 358 aa, Zea Mays
MALNHYGALCQAMHGAPLYIAETSPSQIRGTLISLKELFIVLGILLGYLVGSLEIDNVGGWRYMFGFSAPLAAIMAIGMWTLPSSPRWLLLRAVQGKASLEDNKKKAIQALRTLRGRTASEKVLADDVDDTIVSIKAAYAGQEAEGNVWDVFEGASLKAFTIGGGLVLFQQITGQPSVLYYAASILQTAGFSAASDAAKVAILIGLFKLLMTGVAVFKVDDVGRRPLLIGGVGGIALSLFLLAAYYKILNNFPFVAVGALLLYVGAYQVSFGPISWLMVSEIFPLRTRGRGISLAVLTNFGSNALVTFAFSPLKELLGPANIFFLFGVIAVLSLVFVILVVPETKGLSLEEIESKILK

SEQ ID NO: 224343 - protein, 57 aa, Zea Mays
MLGQILTGIHIRNPVGSRGSAPVRRAQGHATATNIRWRTGLGTLDASSTTTSNVWMN

SEQ ID NO: 224344 - protein, 664 aa, Zea Mays
MGERAKEWLLAAGAGAAVGALSAAAVIDLLSRSKRRERYARDLLESNGMTTGNTRSSKHLGSLGSSALLSDEVVSEQLTSHAASMLLRSGVGRLLLVDFDQVSLSSLNRHAVATRDDVGTSKALCLKKHFSMIYPECQIDAKVQLYDASSEEEILSGQPDFVLDCIDNIDTKVSLLAACVRRGLKVLSAMGAGARADPTRIRVADLRESSNDPLSRSVRYRLKKEHGIEGGIPVVFSLEKPKAKLLPFQASKEEETPSDYQIVPGFRVRIIPVLGTIPAIFGQVMASYVVTQLAGLDFQTEPVVNLDLDHYRILHQRLIEHEELMYGTAEQVLVDAEEVMYIVKELWRGRSARDQSQDTGRKMWRSVNELMLVRWDKSKAAGISNLILVKFSEADAHESTTLDRIKEQEPEFYSMVSLSTRVELDCHGREDLNHLPQRTWYGASGPRATSPASPQAQRARCLALPEPPSTMVHVATARRRIPMRRRWRPHWRKQGCAARGQGHGTPTRWPRFSWDPRCRARSSIAPRHRKQDAAGRRPKRRHGDEDNPSPTPTALCWQTPPSWARTTAEVEAAEEKRLRISPRPDSSAAAAAERAPGEGGRDGGSRQQPPPRAGVFGAQASWHHTNYFPITDDPLEPTAAEEGEDADDNEGNTEEWRTLSSASD

SEQ ID NO: 224345 - protein, 664 aa, Zea Mays; identical to SEQ ID NO: 224344

SEQ ID NO: 224346 - protein, 518 aa, Zea Mays
MEELIVLRRLIDLCFLFSKKPFPVFRELAGFSQEDVLIEEPKAGILKPAHTIIRDECTKSFLVLIRGTHSMKDTLTAATGAVVPFHLSLLDEGDVSKLVLGYAHCGMVAAARWIARGVTPCLREAVRQCPEYQIKIVGHSLGGGTAALLTYILREHKEFSSTTCVAFAPASCMTWELAESGKHFVTTVVNGADLVPTVSTASIDDLRSEVTASSWLNDLRDQIQQTRFLNVVYRSATALGTRLQSFSGARERVAGAGAFLRPVSNKTQVVMKQAQNVAQAVARSRSAFSSWSCMGARRRGVGVVTACSKDDMRVETHVTSTVESKSVLVEHCGAKTIEELQYTAASVSVHDAAEEEEALLSEHETSRENAEEETTEGELWYEFEKDLDRQAEMEARTREEEAAAAKEIMEEESAVLKGVDDRQSFTPDSLERQQFYPPGRIMHMVAMPPTDADPDDPVAADECCVGIYETPRDLYSKIRLSNTMINDHYMPMYKKMMETLIEKFARDEDCYCTGSTAE

SEQ ID NO: 224347 - protein, 102 aa, Zea Mays
MPPHMAAISHRIAGSGPRVAVVAPPRPRGRAAVVAGAAAKGAHRERTLEGASDDLRAAAAQCLDWAPARRRVRAAFAPVLPTLDHCLFKMAHNEIQMEEVRA

SEQ ID NO: 224348 - protein, 235 aa, Zea Mays
MPPHMAAISHRIAGSGPRVAVVAPPRPRGRAAVVAGAAAKGAHRERTLEGASDDLRAAAAQCLDWAPARRRVRAAFAPVLPTLDHCLFKMAHNEIQMEENYETNSKGVEIFWKSWLPREGTATKAALFFCHGYGDTCTFFFEGIAKRIAAAGYAVYAMDYPGFGMSYGLHGYIASFDGMVDHVIEQYARIRGMKEVCELPHFLLGQSMGGAVALKVHLKQQQEWDGVLLVAPMCK

SEQ ID NO: 224349 - protein, 267 aa, Zea Mays
MASNGIAPRDVCVVGVARTPLGGFLGALSSLPATKLGSIAIEAALKRANVDPALVQEVFFGNVLSANLGQAPARQAALGAGIPNTVVCTTVNKVCASGMKATMFAAQSIQLGINDIVVAGGMESMSNAPKYIAEARKGSRFGHDTLVDAMLKDGLWDVYNDCAMGMCAELCADNHALTREDQDAFAIQSNQRGIAARDSGAFAWEIVPIEVPVGRGKPPVLIEKDESLDKFDPAKLKKLRPSFKENGGTVTAGNASSISVYCLLLLV

SEQ ID NO: 224350 - protein, 743 aa, Zea Mays
MAEADSCLESFELYESESKFYILGTNCNKTIWRLLKIDRMEPSEVNVHEDSTVLSQSDYLDMLKNLDEQHRSTGGVKFVTNCFGIIGFIKFLGPYYMLIITEQRKIGDIFGHMVYQVSKTAMIELSNSTTRPKLINSKDENRYKKLLQTIDLRKDFFFSHSYHIMRSLQKNFNDPQEGWELYDTMFVWNEFLTRGIRDILKTTLWTVALVYGFFKQDKLAICGKDIMLTLIARRSRHYAGTRYLKRGVNEEGRVANDVETEQIVYEDMLGPWQISSVVQNRGSIPLFWSQETSKLNLKPDIILHGKDKNYEATRLHFENLRKRYGNPIIILNLIKTREKRPREIILRREFDRAIKIINSGLPGEDHLRYLHWDLHKNSQSKSTNALQVLLKVAFEALNLTEFFYRQVSPAQRAENSPNLSPTLKNGFGPHVCDDDNNCGNADYVDDLDDISQEDTCGNYDPGNGIAEDRSEVNGSTQIKPPKFQKGVLRTNCIDCLDRTNVAQYAYGLAALGYQLHALGSVESPEVHLDSPLSRHLMHFYERMGDTLALQYGGSAAHNKIFSAKRGHLKFAIQSQEFFRTLQRYYSNAYMDAYKQAAINLFLGYFQPQVGKPALWEPESGDEHVLDDETSNGPNGVLNSALTGSKNEGQHPNWSSDSVHGMSSASDNSMSKSRYTPTVSHIKHISCELDYYNGSGDSNFLDLDWLSASDNERLFMLFFSFCGLSGVLFFVHGMVYTEMTVRSK

SEQ ID NO: 224351 - protein, 365 aa, Zea Mays
MQREMVHGHGDGNHHQHQQLPRYSAAAAATGVARASKKSKPKKIPQRGLGVAQLEKLRIEEQKMEGSMPVSGPTHLGVGVGGFGHLLPMHPPPHAPLPLLPRPGADGGVHCGYPSVLWDPASASAVADPMKHPFYKRSLCPLPPLPTVSVGLSLTAASSSHPTEPPSNQMYSSGGGGAETAAAEDDEDREAAGVDRPWPLVFEGLNTTAFRTTAAGKAPLAVAARTTREAAAAAAGLPDACAAADLSRYEFSRATTNYYSLNASFPDWSSPELGHCKSSKEKEPAPAYLTLSAQPAPRGKQPPPALPSIKLPELGHWGVMQPPQATRERFGVVVRVGVAAVLQLHAGWSGSHRQTPDRDQGRRRL

SEQ ID NO: 224352 - protein, 216 aa, Zea Mays
MQREMVHGHGDGNHHQHQQLPRYSAAAAATGVARASKKSKPKKIPQRGLGVAQLEKLRIEEQKMEGSMPVSGPTHLGVGVGGFGHLLPMHPPPHAPLPLLPRPGADGGVHCGYPSVLWDPASASAVADPMKHPFYKRSLCPLPPLPTWHGQVSVGLSLTAASSSHPTEPPSNQMYSSGGGGAETAAAEDDEDRVHAVVEVSQLCTSLLLRLPVCVQ

SEQ ID NO: 224353 - protein, 212 aa, Zea Mays
MQREMVHGHGDGNHHQHQQLPRYSAAAAATGVARASKKSKPKKIPQRGLGVAQLEKLRIEEQKMEGSMPVSGPTHLGVGVGGFGHLLPMHPPPHAPLPLLPRPGADGGVHCGYPSVLWDPASASAVADPMKHPFYKRSLCPLPPLPTVSVGLSLTAASSSHPTEPPSNQMYSSGGGGAETAAAEDDEDRVHAVVEVSQLCTSLLLRLPVCVQ

SEQ ID NO: 224354 - protein, 372 aa, Zea Mays
MQREMVHGHGDGNHHQHQQLPRYSAAAAATGVARASKKSKPKKIPQRGLGVAQLEKLRIEEQKMEGSMPVSGPTHLGVGVGGFGHLLPMHPPPHAPLPLLPRPGADGGVHCGYPSVLWDPASASAVADPMKHPFYKRSLCPLPPLPTVSVGLSLTAASSSHPTEPPSNQMYSSGGGGAETAAAEDDEDRVHAVVESVGGGRRGQTLALGVRGLEHDRLPDDGGGEGPSRSRRQDNERGRRRRRWLARRLCRRRPEQIRVQQSHHELLQLEREFSRLVIAGVGALQEQQGEGACPCLPHLERAACATREAASSCAPLDQTPGVGSLGRHAASSARERFGVVVRVGVAAVLQLHAGWSGSHRQTPDRDQGRRRL

SEQ ID NO: 224355 - protein, 377 aa, Zea Mays
MQREMVHGHGDGNHHQHQQLPRYSAAAAATGVARASKKSKPKKIPQRGLGVAQLEKLRIEEQKMEGSMPVSGPTHLGVGVGGFGHLLPMHPPPHAPLPLLPRPGADGGVHCGYPSVLWDPASASAVADPMKHPFYKRSLCPLPPLPTWHGQVSVGLSLTAASSSHPTEPPSNQMYSSGGGGAETAAAEDDEDREAAGVDRPWPLVFEGLNTTAFRTTAAGKAPLAVAARTTREAAAAAAGLPDACAAADLSRYEFSRATTNYYSLNASFPDWSSPELGHCKSSKEKEPAPAYLTLSAQPAPRGKQPPPALPSIKLPELGHWGVMQPPQHGSASASSSASASRPFYSFMPAGPVRIDRPRIGIKADDASDGVDLELKL

SEQ ID NO: 224356 - protein, 213 aa, Zea Mays
MVQFLMSRPDWEFHHASSSPSRPESSLLPAPAISAAACGPAEMGSTSSMLTQYDIEEVQDHCNHAFSQQEIVSLYHRFCQLDRNGGGFVSADEFMSVPEFAVNPLSQRLLRMLDGLNFKEFVAFLSAFSPRTSLQQKIEFIFRVYDTDCNGKVAFDDILSILRDLTGSFMTEQQRQKVLIHVLEEAGYTKDSHFTLPDFMKLEGSAIFSLDQL

SEQ ID NO: 224357 - protein, 174 aa, Zea Mays
MIRTCVPQGAMGWQGPPQSPSSYIVKKILRLEVPTEAYPNFNFIGRLLGPRGNSLKRIEASTGCRVFIRGKGSIKDSGKEEQLKGRPGYEHLSEPLHILIEAELPANVIDARLAKAQEILEELLKPVDESQDYYKRQQLRELAMLNSPLREESPHPGGAPPSPFSNGGMKRVKQ

SEQ ID NO: 224358 - protein, 550 aa, Zea Mays
MEQGENQSADSFVVSSSDNNELEDLPVKERCFEQREALPGEPRCVVCGRYGEYICDQTDDDICSVECKTILLSRIVAKTKPAVKAAKRVNLPLGDESFCIKDINFPNILTLADSRISSLRSKLDICVKGDAVPDPIMCFSACGLPEKLVHNLETAGYCMPTPVQMQVIPASMSNRSLLVSADTGSGKTASFLIPIIAHCSRLRSQECTGNQGPLAIVLAPTRELCLQVEEQAKVLGKGLPFKTALIVGGDPLPQQIYRIENGVELIVGTPGRLIDLLMKHNVDLTYVSVFVLDEVDCLLERGFRDQAMQIFQSLSHPQVMMFSATIHSEVEKMSNSLANNVISISCGNPNRPNKLVKQVVIWVESKKKKQKIFEIMKSKQHFKPPAVVFVSSRVGADLLSEAITVATGLEVVSIHGEKTMIERRENLRRFLTGEVSVVVSTGVLGRGMDLLKVRQVILFDLPNSIDEYIHQVGRASRMGEEGMAVVFVNEEDRRIFKELVQVLKTAGAPIPREIANSRYTAGVYVGSERKRKLSSRGLHCHVCMPAKIQV

SEQ ID NO: 224359 - protein, 208 aa, Zea Mays
MELDPRLYENVSVSDNDVRNIVLSYLMHNCFKETAEAFLSSTGLNLPVDYSVDVDKRKEGNALKAIELTEEMAPNLLENDMDLHFDLLSLHFIELVRSKKFTEALDFGQKKLTSFQKVTKYIEKLEDFMALLAYEEPEKSPMFHLLSPEHRQNVAEGLNRAVLAHANLPAYSSLERVVQQATVVRQYLQQEVGKDSYPPFSLKAFLSK

SEQ ID NO: 224360 - protein, 477 aa, Zea Mays
MEDYFSRFLNLENLVRTINRIPQRLGVQFSASHGGSLTGTTVYFHERASTLSVNTITTTEKQTANGTSEGAIFRKGLSSIYERSCVRSSYLLHGFMLVRRLAFSVRDLWNLFSSEVHAKLTRILHRFWTTLQGSCEDIGWLQRTRASLRSVDGTGRFKEILHEIRNGVHCLPDTLIYLFIPGLFSNHSPLYFTNTKRFFSKMGLACHIAKIHSEASVEKNAWELKQYIEELYWGSGKQVLLLGHSKGGVDAAAALSLYWSELKGKVAGLALVQSPYGGTPVASDILREGQIADKETRRIMELIVCKLIKGDIRALEDLTYAKRKDFISQHKLPIDELPIISFHTEASTAPTALASLTRVAQAELLPWLPLPRFFLSASEFVESMLASLKVPVVAPVSAAMAVTALHLRLRYGERSDGLVTRRDAEVPGSVVVRPERRLDHAWMVYSTLKMGSAEADASEMCEALLAMLVEIGRKKFC

SEQ ID NO: 224361 - protein, 276 aa, Zea Mays
MGLACHIAKIHSEASVEKNAWELKQYIEELYWGSGKQVLLLGHSKGGVDAAAALSLYWSELKGKVAGLALVQSPYGGTPVASDILREGQIADKETRRIMELIVCKLIKGDIRALEDLTYAKRKDFISQHKLPIDELPIISFHTEASTAPTALASLTRVAQAELLPWLPLPRFFLSASEFVESMLASLKVPVVAPVSAAMAVTALHLRLRYGERSDGLVTRRDAEVPGSVVVRPERRLDHAWMVYSTLKMGSAEADASEMCEALLAMLVEIGRKKFC

SEQ ID NO: 224362 - protein, 234 aa, Zea Mays
MASRRCLLRFLSIRLVPQRSQPLAPISTATRTLTSLSEALGSPAPRALASPRLYYPSRCHFATRSSGDEDDGEDEEEHYDDEGSDGEWGDDEEVVAAEIGYKVLGPLGADDKPFKPYEPVFAVVQIGSHQFKVSNGDSIFTERLKFCDVNDKLVLNRVLMLGSQAQTVIGRPILPDAAVHAVVEEHALDAKVIIFKKKRRKNYRRTKGHRQELTKLRITNIEGIDKPEAAAVAT

SEQ ID NO: 224363 - protein, 258 aa, Zea Mays
MRAASSTVYPVYLSLHRHPNSHQASFRPSRANHDNTHKCTKPPKVLRRSLFSLPASFLLLHTSSSLAVDDANMPSTSTIDTTITDRIFMDFSVCPSYFRSDRPLGAELSSCPDSEPLGRVVFGLYGRLLPVTTANFKATCTAAAYRGTLVHKLLQGQFFAAGRQGPRHDKGEVQPPSGLVRNSETVNPKAFELRHARPGTLSLCLGQNDDDDDIKLNPNYHNLEFLVTTGPGPCPELDGQNIVFGTVLEGVSSFMKKP

SEQ ID NO: 224364 - protein, 293 aa, Zea Mays
MERDGQQTRRDKLIIDTDPGIDDSMAILMAFRAHTLEIIGLTTIFGNVDTEGATCNALLLCERAGHPEVPVAEGSHEPLKPRIADFVHGSDGIGNLFLPAPSAKKVEESAADFMVNKVSEFPGEVSVLALGPLTNVALAIKRDPSFASKVNKIVVLGGAFFVAGNVNPAAEANILGDPEAADIVFTSGADVIVVGINITTQVCLTDEGLLELRNSKGKHAPFLSETCKFYRDWHVKSDGFHGIFLHDPVSFTAVLHPEYFTFKKGVVRVETQGICTGHTLMDQGLKKYAFFSE

SEQ ID NO: 224365 - protein, 88 aa, Zea Mays
MSLRPSEREQMRKGNYKQTVDAEESRCRCEGQMMDMRKAKREESFQKKRCDGFPASAAGVPPMGHSTALQQKSPNRRGDQHRSGAAIH

SEQ ID NO: 224366 - protein, 1127 aa, Zea Mays
MAPKAGRGKGRGGGGRGGDRRKKEEKVVPSVVDVTVVTPYESQVTLKGISTDRVLDVRRLLGSNVETCHLTNYSLSHVARGHRLEDGVEVVALKPCALRIVEEEYATAEQAEAHVRRLLDILACTTAFAKPRDGAAKHRPSKHGRPASPGAHGAVSGEAAAPPPISEAHDMAAIRPPPKLGEFYDFLSFAHLTPPVHLIRRKEASGASREGVYFEIEWLIQFDLRFSVKSQPCNSQSTRRVGMSIRLMKEFICAQVKVCNGKLLHVVASRKGFYLAGKPQNVSHSLVDLLQQLSNAFANAYEALMKAFVDHNKFGNLPYGFRANTWLIPPIYVDPATKCPALPVEDENWGGNGGGCGRDGRYDRRCWSKEFSVLSRMPCKSDEERVIRDRKAFLLHNLFVDTAIFRAASTIRRLIDQSMNSIGSRGTTHGSNVFEEHIGDMNITVKKDEADASSKVDDKVDGVAFCKTGAMDIAQKNLLKGLTSDENVLIKDSSTLGVVIVKHCGYTATVKVSGRAKDSNDVKQTHDVSDNFDGMLNIDVPDHPDGGSNALNVNSLRIPLQSVTHPETVVGKQNPSPKSHAYNPARKLACKILEDSLVKLDSMPSINSRIIRWELGSSWLQQLQKKDSPASENVKRNATKADKESAVKGLGKHFEQLKKIKKKECNIDGSSSEKEECNSNCSSMNEDAFFRLKSLGAGLHEKSLEELTKMAHNFYDETALPKLVADFASLELSPVDGRTMTDFMHTRGLNMSSLGRVVELAEKLPHIQSICIHEMVIRSFKHIVRAVIAAVDDMQNISAAIAETLNILLGSPRLENGADTDAHIDNNLRLKWVGLELVARDYDMNSPNPFDKSDIVSIVPVCKHVVYSSIDGRNLLESSKMALDKGKLDDAVSYGTKALSKIIAVCGPYHRLTANAYSLLAVVLYHTGDFNQATVYQQKALDINERELGLDHPETMKSYGDLSVFYYRLQHIEMALKYVNRALYLLQFSCGLSHPNSAATYINVAMMEEGMGNVHVALRYLHEALKCNKRLLGADHIQTAASYHAIAIALSMMDAYSLSVQHEQTTLQILQEKLGQDDLRTQDAAAWLEYFESKALEQQEAARRGMPKPDSSIASKGHLRYETTNNL

SEQ ID NO: 224367 - protein, 1661 aa, Zea Mays
MAPKAGRGKGRGGGGRGGDRRKKEEKVVPSVVDVTVVTPYESQVTLKGISTDRVLDVRRLLGSNVETCHLTNYSLSHVARGHRLEDGVEVVALKPCALRIVEEEYATAEQAEAHVRRLLDILACTTAFAKPRDGAAKHRPSKHGRPASPGAHGAVSGEAAAPPPISEAHDMAAIRPPPKLGEFYDFLSFAHLTPPVHLIRRKEASGASREGVYFEIEVKVCNGKLLHVVASRKGFYLAGKPQNVSHSLVDLLQQLSNAFANAYEALMKAFVDHNKFGNLPYGFRANTWLIPPIYVDPATKCPALPVEDENWGGNGGGCGRDGRYDRRCWSKEFSVLSRMPCKSDEERVIRDRKAFLLHNLFVDTAIFRAASTIRRLIDQSMNSIGSRGTTHGSNVFEEHIGDMNITVKKDEADASSKVDDKVDGVAFCKTGAMDIAQKNLLKGLTSDENVLIKDSSTLGVVIVKHCGYTATVKVSGRAKDSNDVKQTHDVSDNFDGMLNIDVPDHPDGGSNALNVNSLRIPLQSVTHPETVVGKQNPSPKSHAYNPARKLACKILEDSLVKLDSMPSINSRIIRWELGSSWLQQLQKKDSPASENVKRNATKADKESAVKGLGKHFEQLKKIKKKECNIDGSSSEKEECNSNCSSMNEDAFFRLKSLGAGLHEKSLEELTKMAHNFYDETALPKLVADFASLELSPVDGRTMTDFMHTRGLNMSSLGRVVELAEKLPHIQSICIHEMVIRSFKHIVRAVIAAVDDMQNISAAIAETLNILLGSPRLENGADTDAHIDNNLRLKWVGLELVARDYDMNSPNPFDKSDIVSIVPVCKHVVYSSIDGRNLLESSKMALDKGKLDDAVSYGTKALSKIIAVCGPYHRLTANAYSLLAVVLYHTGDFNQATVYQQKALDINERELGLDHPETMKSYGDLSVFYYRLQHIEMALKYVNRALYLLQFSCGLSHPNSAATYINVAMMEEGMGNVHVALRYLHEALKCNKRLLGADHIQTAASYHAIAIALSMMDAYSLSVQHEQTTLQILQEKLGQDDLRTQDAAAWLEYFESKALEQQEAARRGMPKPDSSIASKGHLSVSDLLDFISPDQERKERDMQRKCRRAKNNIRAHHGESVEEKENFQLVSGSPLEASKDSFQEEKLDVHPPAVLEENYAAHDEHKQCDVLSPEEYSDEGWQAASMRGRSANVRKKSSRRKPALMKLMVDHFEGSHTGSVYRTGLQPQTKGDKEDSVSAPSQLSFGSFLKTDKLNGDSSIAEDKTCNGSANQEQRTKLTGINRPTSIASKFISYKDVAVSPPGTVLKPILEKKEAKEKDSGRDIDLALSSEEEDKKFTEKEKEKPSEDSSKEILSIQRDLESHAEIPPDSNSDEGPSAASKASGSKLSASAPPFNPGSVLSMSQPYSTVAVYDASAILQAIPSQAMEILPSAIDTRVPRGPRSTLYYRTGHSFQRKQGYTHSQSTIVRGSYSPTTMNPHAAEFVPGKTSQQSDVADREPSPANPVANSDLDVVSQTTDEARAETPATEKAGQVEKVVSGKGKENRGKDIVRNSYKTELARQILLSFIVKSVHDSLGPSRAEPERKPSGSDEASNEQTSVLGKNASGSGRKDPDKQEKATEVTKGLKDTEGFTVVSKRRRRPQPFMNPINGLYSQPSICTSVS

SEQ ID NO: 224368 - protein, 815 aa, Zea Mays
MAPKAGRGKGRGGGGRGGDRRKKEEKVVPSVVDVTVVTPYESQVTLKGISTDRVLDVRRLLGSNVETCHLTNYSLSHVARGHRLEDGVEVVALKPCALRIVEEEYATAEQAEAHVRRLLDILACTTAFAKPRDGAAKHRPSKHGRPASPGAHGAVSGEAAAPPPISEAHDMAAIRPPPKLGEFYDFLSFAHLTPPVHLIRRKEASGASREGVYFEIEVKVCNGKLLHVVASRKGFYLAGKPQNAYEALMKAFVDHNKFGNLPYGFRANTWLIPPIYVDPATKCPALPVEDENWGGNGGGCGRDGRYDRRCWSKEFSVLSRMPCKSDEERVIRDRKAFLLHNLFVDTAIFRAASTIRRLIDQSMNSIGSRGTTHGSNVFEEHIGDMNITVKKDEADASSKVDDKVDGVAFCKTGAMDIAQKNLLKGLTSDENVLIKDSSTLGVVIVKHCGYTATVKVSGRAKDSNDVKQTHDVSDNFDGMLNIDVPDHPDGGSNALNVNSLRIPLQSVTHPETVVGKQNPSPKSHAYNPARKLACKILEDSLVKLDSMPSINSRIIRWELGSSWLQQLQKKDSPASENVKRNATKADKESAVKGLGKHFEQLKKIKKKECNIDGSSSEKEECNSNCSSMNGMQVSDKISVDETNKGADVSKLMSEDAFFRLKSLGAGLHEKSLEELTKMAHNFYDETALPKLVADFASLELSPVDGRTMTDFMHTRGLNMSSLGRVVELAEKLPHIQSICIHEMVIRSFKHIVRAVIAAVDDMQNISAAIAETLNILLGSPRLENGADTDAHIDNNLRLKWVESFLSKKILLETER

SEQ ID NO: 224369 - protein, 1667 aa, Zea Mays
MAPKAGRGKGRGGGGRGGDRRKKEEKVVPSVVDVTVVTPYESQVTLKGISTDRVLDVRRLLGSNVETCHLTNYSLSHVARGHRLEDGVEVVALKPCALRIVEEEYATAEQAEAHVRRLLDILACTTAFAKPRDGAAKHRPSKHGRPASPGAHGAVSGEAAAPPPISEAHDMAAIRPPPKLGEFYDFLSFAHLTPPVHLIRRKEASGASREGVYFEIEVKVCNGKLLHVVASRKGFYLAGKPQNAYEALMKAFVDHNKFGNLPYGFRANTWLIPPIYVDPATKCPALPVEDENWGGNGGGCGRDGRYDRRCWSKEFSVLSRMPCKSDEERVIRDRKAFLLHNLFVDTAIFRAASTIRRLIDQSMNSIGSRGTTHGSNVFEEHIGDMNITVKKDEADASSKVDDKVDGVAFCKTGAMDIAQKNLLKGLTSDENVLIKDSSTLGVVIVKHCGYTATVKVSGRAKDSNDVKQTHDVSDNFDGMLNIDVPDHPDGGSNALNVNSLRIPLQSVTHPETVVGKQNPSPKSHAYNPARKLACKILEDSLVKLDSMPSINSRIIRWELGSSWLQQLQKKDSPASENVKRNATKADKESAVKGLGKHFEQLKKIKKKECNIDGSSSEKEECNSNCSSMNGMQVSDKISVDETNKGADVSKLMSEDAFFRLKSLGAGLHEKSLEELTKMAHNFYDETALPKLVADFASLELSPVDGRTMTDFMHTRGLNMSSLGRVVELAEKLPHIQSICIHEMVIRSFKHIVRAVIAAVDDMQNISAAIAETLNILLGSPRLENGADTDAHIDNNLRLKWVGLELVARDYDMNSPNPFDKSDIVSIVPVCKHVVYSSIDGRNLLESSKMALDKGKLDDAVSYGTKALSKIIAVCGPYHRLTANAYSLLAVVLYHTGDFNQATVYQQKALDINERELGLDHPETMKSYGDLSVFYYRLQHIEMALKYVNRALYLLQFSCGLSHPNSAATYINVAMMEEGMGNVHVALRYLHEALKCNKRLLGADHIQTAASYHAIAIALSMMDAYSLSVQHEQTTLQILQEKLGQDDLRTQDAAAWLEYFESKALEQQEAARRGMPKPDSSIASKGHLSVSDLLDFISPDQERKERDMQRKCRRAKNNIRAHHGESVEEKENFQLVSGSPLEASKDSFQEEKLDVHPPAVLEENYAAHDEHKQCDVLSPEEYSDEGWQAASMRGRSANVRKKSSRRKPALMKLMVDHFEGSHTGSVYRTGLQPQTKGDKEDSVSAPSQLSFGSFLKTDKLNGDSSIAEDKTCNGSANQEQRTKLTGINRPTSIASKFISYKDVAVSPPGTVLKPILEKKEAKEKDSGRDIDLALSSEEEDKKFTEKEKEKPSEDSSKEILSIQRDLESHAEIPPDSNSDEGPSAASKASGSKLSASAPPFNPGSVLSMSQPYSTVAVYDASAILQAIPSQAMEILPSAIDTRVPRGPRSTLYYRTGHSFQRKQGYTHSQSTIVRGSYSPTTMNPHAAEFVPGKTSQQSDVADREPSPANPVANSDLDVVSQTTDEARAETPATEKAGQVEKVVSGKGKENRGKDIVRNSYKTELARQILLSFIVKSVHDSLGPSRAEPERKPSGSDEASNEQTSVLGKNASGSGRKDPDKQEKATEVTKGLKDTEGFTVVSKRRRRPQPFMNPINGLYSQPSICTSVS

SEQ ID NO: 224370 - protein, 456 aa, Zea Mays
MHQPRARYPPGYGSGGGGGAGRGGGGGNGGGGGNHNYYGRNPQQHHYHQQQQSQHSHRNSSYQQQWLRRDQAPAVAGAASGNAVAKTASQLDAVGSSSQDWKAQLNIPAPDTRYRTEDVTATKGNEFEDYFLKRELLMGIYEKGFERPSPIQEESIPIALTGSDILARAKNGTGKTAAFCIPALEKIDPEKNAIQVVILVPTRELALQTSQVCKELGKYLNIQVMVSTGGTSLKDDIMRLYQPVHLLVGTPGRILDLTRKGICVLKDCSMLVMDEADKLLAPEFQPSVEALIHFLPPSRQLLMFSATFPVTVKEFKDKYLPRPYVINLMDELTLKGITQYYAFVEERQKVHCLNTLFSKLQINQSIIFCNSVNRVELLAKKITELGYSCFYIHAKMLQDHRNRVFHDFRNGACRNLVCTDLFTRGIDIQAVNVVINFDFPKTSETYLHRVLFFNLV

SEQ ID NO: 224371 - protein, 64 aa, Zea Mays
MGAWLFLTEVSLRQGKPPAAGRRCCFTTVGDGVRVGVGGEVGLPPRLSCSPQQTGTIQNFLSVI

SEQ ID NO: 224372 - protein, 942 aa, Zea Mays
MFKSRWRGGRAKAVFKLQFHATQVPELGWEAMVVVVTPQDAGRPTARSEPAEVTDGACRWAAPVMEATKLPTGKDKIYQFLVYETVTIQRVVGGAGGCGDDASGENGDALPAVAKTPKRRTTLQSQLSKFEDEDSEKARAAADAMSPVQDGLLIRKPPDMRFPSRRNVPMSADPVGHLHNGSSFDAVSVSGSDGSSGRYTPKISASTHNSFLQDSSNALSPFANNRTVRNPLTSSGDWSGSSAPDASTDGSTSNSGEAGLRGEEDDVDKLRSEIATLTRKVDVSDMELQTLRKQIVKESRRGQDLFKEMSSLREERDALRRECERLRGAKNMIHDSNGSEKRLSDGDDPWSQIEELKQDLSHEKNLNSDLRLQLQKMKESNSELLLAVKDLDESLDKKNREISILQEDTQEDQQEAEYEHALSNVHNSGQKLALSETSSYQEKEDELMLDALAKKRDDISTSELEKKVLELSNEIELYKKDREDIEMQMEQLALDYEILKQENHDVSSRLEQAQLREQLRMQYECSAHLAIISDLEANVESLDNELQTQAKKFEADIAEITSAKVEQEQRAIKAEDSLRKIRWNNAATAERLQEEFKVLSSQVSSAFSANERHLVQARKEVAELQLQKSQLEELLQKAQGDLGSVQDQHRAKVQQLITLVDFKSKEIDRLLTELKSKSDEFHDQKRCDEARLNALSEEMDLLNAKIDELSSERNDLSEKNAQKDKELAGISEKDMQLQDKTAEITSLNKELVSLKDQVKTHLDELHDLKCLKDRKEETIGKLQIDIGSLKLQCDNLKTSLSKKESEKDNLASQVLELRRSLETREEGAKANGQNSDAKNNPHTNNKRMKHNTGSTGSIAALPGTNGQGEDDGDCNGHDMRNAAADGAAKELASLKESSKAVEEELKELHERYSAISLRLAEVEGERQQLVMTVRSLKNSSLR

SEQ ID NO: 224373 - protein, 149 aa, Zea Mays
MAEKEGAKVGAEEMEEREQEGEAEEVEVKFRLFDGSDIGPVRCNAATTTVAALKDRVVADWPKDKQIIPKTASDVKLISGGKILENDKNVAQCRAPFGDLPSSAITMHVVVQPSSAKSKPEGEQVAQNHSLLMYHTVNYMKVKSLRDQQ

SEQ ID NO: 224374 - protein, 840 aa, Zea Mays
MSFTPVPRFRGAAYSQLCPQSSSCAEHLVNVDGASAKDLSVDPSTFCIPQDANQGFCSRALQYTSSVSKQGFAAQGLPVNAAEFGLNNDSSLVGGYQQFDYLLGPPQTEVCEGMWMKNINTSIIHRRRPSNASCLDHTEELTSYENDEGAISFGSSCSTGIASYPYSTPLQRNSHISDTRDGTWDALVQMQEALEASNSDNGLNEECSDLTFNHAELSGGNAVKHKVVWDNGSLNSPSFTSNLLSFPGDTETTLTSASTVYCTFQNFADLQHKMNNNEQNKLSSEVELPRQKVPMTNHVNGSGGEMHSAEWGTNPGLIESSGFMPSNEDRQNDISHQPSSSFVYSADGTVDHCSKKSPLMYECEEQMEIDSLLNSFGVSTDSFSQTYGMFERSNNLVEFDMKTELDESGSAACFNNNAPYMQTGPPESAISDGSSYPEQYQSTSQTCGLVYASASQWQNMSSSGLPLLDCRKSIGEPTSIISLGGNGKGHLLPTSEDTLLQKPQSVAPDARLEMTDNVADCYLESAASLDGHSCPLGASACHDEAMAAKDLQTAQHGVVTDCTFGIHTSNHAGHSDMLLPITQTTSVQEPGLSLSKDLNSSCIRGTEVKKVDLTATYNSERHGILRLKSFEQKTPESMGMKTYIYHCGDHSQIVDPQQSIILAASKPSHSSVLPVDKSDGKVVSQQKKRKRAAENLLAWHDHIMPGHGSMHRRRTPELDWARATKRLVEKVDGENATMGSSTFNTPARKRLILTTSLIQYILPVVPARLLAANVTNSIEAIVYHISKSALSDACDTALSVVNDTLPNQSSTSGKEGSRILSEVLETYESRLGKLEISLLS

SEQ ID NO: 224375 - protein, 785 aa, Zea Mays
METTSTTNEQTDRGAMWELERNLDQPMDAEAGRLRNMYREKSYPTLVLLQLAFQSLGVVFGDLGTSPLYVFSNIFPHEIEDTEQIIGALSLVIYSLTLIPLVKYVFIVLRANDNGQGGTFALYSLLCRHAKINTIPNQHRTDEELTTYSRHTYDEKSLAAKIKRWLEGHQFRKNVILILVLFGTCMAVGDGILTPAISVLSATGGIQVEEKKMKNDAVVIVSVVILIGLFSMQHFGTDKVSWLFAPIVFVWFILIGVLGAVNISKYDQSVLKAFNPIYVYRYFKRGKTSWASLGGIMLSITEALFADLSYFPVQAIQIAFTVVVFPCLLLQYTGQAAYIAQNKDHVSHAFYFSLPDSVLWPSFIVATAAAIVASQATISMTYSIIKQALALGCFPRVRIIHTSKKYLGQIYSPDINWILLVFCIAVTAGFKNQSQIANAYGTAVIMVMLVTTFLMIPIMLLVWRSHWTLVILFTVLSLFVEIPYFTAVVRKIDQGGWVPLVFAVAFLIIMYVWHYGTLKRYEFEMHSKVSMAWILGLGPSLGLVRVPGVGLVYTELASGVPHIFSHFITNLPAIHSTLVFVCVKYLPVYTVPLDERFLVKRIGPKNFHMFRCVARYGYKDIHKKDDDFEQMLFDSLMLFVRLESMMEEYTDSDEYSTRETNLSGSANPRINGISAGSNMDLSYTSHDSIIQVQSPNYTGNSQAVSPGQLYHTVGDEIAFLNACRDAGVVHILGNTVIRARRDSGFIKKIAINYLYAFLRKICRENSAIFNVPHESLLNVGQVFYV

SEQ ID NO: 224376 - protein, 354 aa, Zea Mays
MTLEALCPTSSDVLVYDTFNAAAACAAASAGTFLFGNAPPVEVPAAAAAQANGENSVQQGRRKRRRRQRSTKNAEDAESQRMTHIAVERNRRRQMNEYLAALRSLMPDSYVHRASVVSGAIDFVKELEQQLQSLEAQKLALKRQLQQQQQRSVTAAIRDDAAQPARGRDDIGAGAGGDAAARSEVSAPEPDPPPFARFFRYPQYARRHAAAREDAGAEETSRASAVADVEVGVVVDAHASLRVMAPRRPGQLLRMVAGMQALGLAVLHLNVATAAVDATALYTLSLKVRRRRTLPDGWVASKATVPFSFRPRTRTNRRRQSLVACHTLARFLVPEMVLSPCSNMHFGHHRCHCP

SEQ ID NO: 224377 - protein, 112 aa, Zea Mays
MLLFGRSCTNQLQIALVSISSLTFLALVLCMKPETMLVYMQKILFRLWRRLKGYLTFLQTHSSPSMQMQKMDLLVKEEVPWPHLSHLHVPCGLRFYDMLIYSIHRRRLLCLL

SEQ ID NO: 224378 - protein, 231 aa, Zea Mays
MTAACTGSVIEAILEIGVIHGTRSDSENFEIPSVVIKELSEAVSAAVRLLSKLLNFDLFIRSINGEKITSLLRRTLKSNFPLQSKDCLAACLIKLESRAGLSGDHGVSSIDMEITIYETIPRLIEQMMISLSFENKRSAVIELNKIISGGVLEYTRAVADSGGIFPLVKMLEEADGDALEAILSILYNLSMDPENHPAIIAAGAVPLLKRIVRTEAPQWSSAIQLLRTLPV

SEQ ID NO: 224379 - protein, 532 aa, Zea Mays
MTGTTWIIDSQRFATKIKNASGSLDPSKQKWIGNPSKECPKCSHVIDNSDVVHQWPGLPKGVKFDPSDQELIWHLMAKHGKSGIKPHPFIDEFIPTVEEDEGICYTHPQKLPGVKQNGSVSHFFHRTFKAYNTGTRKRRRINTDDADVRWHKTGKTKPVLVDGKHLGCKKIMVLYISPLKGGKAEKTNWVIHQYHLGTGEDERDGEYVVSKLFFQQQFKPGDKNAQELTTSDDLESMAAESNLPDFTTLPTDKHVGTVQEVVHNPEHNLYQVVHQWPGLPKGVKFDPSDQELIWHLMAKHGKSGIKPHPFIDEFIPTVEEDEGICYTHPQKLPGVKQNGSVSHFFHRTFKAYNTGTRKRRRINTDDADVRWHKTGKTKPVLVDGKHLGCKKIMVLYISPLKGGKAEKTNWVIHQYHLGAGEDERDGEYVVSKLFFQQQFKPGDKNAQELTTSDDLESMAAESNLPDFTTLPTDKHVGTVQEVVHNPEHNLYQLNRNCEISIEETVVLPPSVKTIKDGDNLQSQDQKLWEGDS

SEQ ID NO: 224380 - protein, 95 aa, Zea Mays
MVALVDMDSEEIQVYIDYFDITLVPATIFFFNAHHMKMDSGTPDHTKWIGSFSSKQDFIDVVEAIFRGAMKGKLIVSCPLPPERIPRFQLLFKDV

SEQ ID NO: 224381 - protein, 53 aa, Zea Mays
MTGIDFLFGVNTLLLVYIEFWHFTQTGPGVCVCVGGGWGACPHGIAFKKKHFT

SEQ ID NO: 224382 - protein, 245 aa, Zea Mays
MASISPSLHHPCNSRTGFLGKTHGTRPRLFSAGRVGFVRTLVECKESRIGKQPIEVPPNVTLTLEEQFVKAKGPLGELSLSFPGDVKIVKEESGNLRVYKTAETKRANQMHGLFRSSKQKHLRQGHMQAGTTRRTLTDNIIVGVSKGFDKKLQLVGVGYRAAVEGNDLVMNLGFSHPVRMAIPEGLAVKVEENTRITVSGYDKSAIGQFAATIKKWRPPEPYKGKGIRYMDEVVRRKEGKAGKKK

SEQ ID NO: 224383 - protein, 184 aa, Zea Mays
MPSPLGGRIQFGPGKAGMPSASLARRLLSTISSPAIPSRSTSTSASNSNSCGFSTRRARKKRSCVSWTVSAATPADMATNSALAKLAPLEAILFDIDGTLCDSDPIHFCAFRELLQQAGFNGGVPITEEFYSANISGGHNDDLARSLFPGMDHQKAMRFMDDKEAMFRKSSLKSGCVKSEPAVE

SEQ ID NO: 224384 - protein, 478 aa, Zea Mays
MASNLGSSNKKNINRGFGFVRFSSHAAAARVIRIGSRTDFMLGDILHPAINWADKESHLDPDEMAKMKSAFIGNLPEDVNEEYLRKLFGQFGEVVRVAISRKGQCPVAFVHFAKRSELENAIEEMDGKTVRGPGRGPSFKIQVSVARPTADNDKKRSREEVRTRRSNASGDRRDYSHGRYGHDSLDRQVKAPRLSNYVADAADPYESAVNSLPSAVKEVLLRILRLRIGTRYDIDIHCVKSLDELPESSALAVLNQFLISGGDKHNKGDYFASLVAKHQAETFGLTHALHGTTYLSRNPEMHSKRYPHEDYDFVTPRSSRYDSSAHHPSTYYEDDPPVSESRVRRYAEERSTIVRSPEPRPRYDETDIRINPEPRLPYESRHNAEKHLDRRYIQEHSSNIERPAEEALLSRERRFLPAAGYMPNPGGSDFRSRSPAEYSAQRQQMRFDPFTGEPYKFDPFTGEPIRPDPNQRRSGSLY

SEQ ID NO: 224385 - protein, 160 aa, Zea Mays
MSGMLPMSNVSANPSQLTIFYGGSVCVYDSVPPEKAQAIMLIAAAAAAAAATKSSAAPTVKPPMVPAATVAPAAVVSPVLTRSPSLQSTSVATGQPQVVAEPSSICKLQADLPIARRHSLQRFLEKRRDRVVSKAPYSTAKSSDGMESPRIEVTAEGKAQ

SEQ ID NO: 224386 - protein, 105 aa, Zea Mays
MLPMSNVSANPSQLTIFYGGSVCVYDSVPPEKSTSVATGQPQVVAEPSSICKLQADLPIARRHSLQRFLEKRRDRVVSKAPYSTAKSSDGMESPRIEVTAEGKAQ

SEQ ID NO: 224387 - protein, 284 aa, Zea Mays
MIPPSYYQDSNGIQSVTASDNIFNPSEGIPSTMNADALDAFQTSCLSECFPSSIQEFIGSPDINTLAFMSPEMQQLDAGSNLPSTSNSYVQMSFSEESHSASLSGLHMEAIHINSSSCSQPLATGSFDAGAFPKLSNIRECQPLPLQEIHTSSMGTPSCSMDAAAEYGTDRSAKQMKPPVRTYTKVQKLGSVGRCIDVTRFRDYHELRSAIACMFGLQGKLEHPGSSDWKLVYVDYENDVLLVGDDPWEEFINCVRCIRILSPSEVQQMSENGVHVLNDCIQIA

SEQ ID NO: 224388 - protein, 68 aa, Zea Mays
MSATYIPYDGHEPAASASAGRLLSCMDVLASASFHCLEKCPDLHRSLRALLLLLPAPLLLAVLTELSK

SEQ ID NO: 224389 - protein, 408 aa, Zea Mays
MHQQWRRAAVGVRRGSPVPKRRRGVGVATGFGFTAQSLNDDILRSVFSRLDDHFDLARCSAVCGSWIIETAHLMRDMYYKRNPPARGSSSNISVKSYFEMLAMDEHASAFSRGPAEAFQWIGHPMRATLCRMKSGLILTGVGDKIVGLTSSQICIWRRSEPRSIFQSGGASFNHGLCMSFADPEVVIGCEDGRAFVYDMYSRSCSRIYRLHSSPVTCLMITDDQLIVGGSTFGNVAIADQTSGQKLGVLKSDHGPLAIRSLSSCTNSHMIFAGSSAGYAHCWDLRTLRPLWEKRVSPNVIYSTRHLPGDTATLAVGGIDGVLRVICQRTGDIIRSLVVDADLPAEATSRSRQQIEKKRVRRIDPDAQLDGIPRRLRPQITSLSVGMKKIVTTHGENYIRVWKFRMKSS

SEQ ID NO: 224390 - protein, 370 aa, Zea Mays
MGDCVVEDGHGHHYSEAVEGAVSLTVAVELDERAEESREEEEGGGQRKKMGGIPREPSFSRWCRDPSAASASNTAAAAATSDSDASEEFELPLLPSSSGGGGSPMDIEVGATARSDDLPISPRLLAKVIGLIACWYTLSTCLTLYNKEMLGKHMWKFPAPFLMNTVHFTMQAVASRAIVWFQQRGLEGGPSKMSWKDYCLRVVPTALATALDINLSNISLVFITVTFATMCKSASPIFILLFAFMFRLEKPSFSLLGIMLVVSFGVLLTVAKETEFNLWGFMFIMLAAVMAGFRWSMTQILLQKEEYALKNPFTLMSHVAPVMAIVTAIISIVMDPWHDFRASHFFDSSTHIIRSSVLLLLGGALAFFMV

SEQ ID NO: 224391 - protein, 370 aa, Zea Mays; identical to SEQ ID NO: 224390

SEQ ID NO: 224392 - protein, 289 aa, Zea Mays
MAESFVLSTGSRIPSVGLGVWQIQPDAANDAIYAAVKAGYRHIDCAAAYNNEEEVGLALKKLFEDGVVKRDDLFITSKLWAANHAPEDVEEGIDTTLQDLQLDYLDLYLIHGPIRIKKGTSTMTPENFLPTDIPATWAAMEKLYDSGKARAIGVSNFSCKKLHDLLAVARVPPAVNQVECHPVWQQDKLRKLCQSNGVHLSAFSPLGSPGSPWINGPSVLKNPIVVSVADKLQKTPAQVALRWGIQMGHSVLPKSANESRIKENIDIFGWSIPEDLMAKFSEIKQAADS

SEQ ID NO: 224393 - protein, 280 aa, Zea Mays
MAESFVLSTGSRIPSVGLGVWQIQPDAANDAIYAAVKAGYRHIDCAAAYNNEEEVGLALKKLFEDGVVKRDDLFITSKLWAANHAPEDVEEGIDTTLQDLQLDYLDLYLIHGPIRIKKGTSTMTPENFLPTDIPATWAAMEKLYDSGKARAIGQDKLRKLCQSNGVHLSAFSPLGSPGSPWINGPSVLKNPIVVSVADKLQKTPAQVALRWGIQMGHSVLPKSANESRIKENIDIFGWSIPEDLMAKFSEIKQVRLLTAEFVVHPQAGYNTLEDFWDGEI

SEQ ID NO: 224394 - protein, 419 aa, Zea Mays
MAFCTEVEDVISMSLTVVKSLLKNYNIDPKCIGRLEVGSETVIDKSKSIKTWLMQIFEESGNTDIEGVDSSNACYGGTAALFNCVNWVESNSWDGRYGLVVCTDSAVYAEGPARPTGGAAAIAMLIGPNAPISFESKYRGSHMAHVYDFYKPDLASEYPVVDGKLSQTCYLMALDSCYNVFCKKYEKHEGKQFSIFDADYVVFHSPYNKLVQKSFARLYYNDFLRNCSTVDEESREKLAPYAGLSSEESYQSRDLEKASQQVAKNLYESKVQPTTLIPKQVGNMYTASLYAALASVIHNRHETLAGQRIVMFSYGSGLTSTMFSFKINEGHHPFSLLNIANIMDVSKKLKARHVVPPKKFIEVLKLMEHRYGAKDFVTSQDTSLLSVGTYYLTHVDSKYRRFYDVKGDGVTTTAMSNGH

SEQ ID NO: 224395 - protein, 362 aa, Zea Mays
MASEAKDVGILAMDIYFPPSCVLQEELETHDGVSKGKYTIGLGQENMAFCTEVEDVISMSLTVVKSLLKNYNIDPKCIGRLEVGSETVIDKSKSIKTWLMQIFEESGNTDIEGVDSSNACYGGTAALFNCVNWVESNSWDGRYGLVVCTDSAVYAEGPARPTGGAAAIAMLIGPNAPISFESKYRGSHMAHVYDFYKPDLASEYPVVDGKLSQTCYLMALDSCYNVFCKKYEKHEGKQFSIFDADYVVFHSPYNKLVQKSFARLYYNDFLRNCSTVDEESREKLAPYAGLSSEESYQSRDLEKASQQVAKNLYESKVQPTTLIPKQVGNMYTASLYAALASVIHNRHETLARGLLCFRMAVG

SEQ ID NO: 224396 - protein, 448 aa, Zea Mays
MAMENHHEELETHDGVSKGKYTIGLGQENMAFCTEVEDVISMSLTVVKSLLKNYNIDPKCIGRLEVGSETVIDKSKSIKTWLMQIFEESGNTDIEGVDSSNACYGGTAALFNCVNWVESNSWDGRYGLVVCTDSAVYAEGPARPTGGAAAIAMLIGPNAPISFESKYRGSHMAHVYDFYKPDLASEYPVVDGKLSQTCYLMALDSCYNVFCKKYEKHEGKQFSIFDADYVVFHSPYNKLVQKSFARLYYNDFLRNCSTVDEESREKLAPYAGLSSEESYQSRDLEKASQQVAKNLYESKVQPTTLIPKQVGNMYTASLYAALASVIHNRHETLAGQRIVMFSYGSGLTSTMFSFKINEGHHPFSLLNIANIMDVSKKLKARHVVPPKKFIEVLKLMEHRYGAKDFVTSQDTSLLSVGTYYLTHVDSKYRRFYDVKGDGVTTTAMSNGH

SEQ ID NO: 224397 - protein, 91 aa, Zea Mays
MFVTASFKFCFFKDQDSHAFLKKKEEEERKTGIQPVKKIGKAESPNLQSFVKQQFSGTPPDQQKGILNQRELVPLSSQGLGSHQHECQHEL

SEQ ID NO: 224398 - protein, 105 aa, Zea Mays
MFVTASFKFCFFKDQDSHAFLKKKEEEERKTGIQPVKKIGKAESPNLQSFVKQQFSGTPPDQQKGPEDRPKDTTHTEDATTDNERYTEPTGTGATFKPGTWQPPT

SEQ ID NO: 224399 - protein, 84 aa, Zea Mays
MFQNAGPDSKISSSPVVDMCLAVVTLLAPESVKNRECHCSIHGYDVKNYYSSIQNVTLIRVMMNAINLKKLCNSIIFLDNFTFL

SEQ ID NO: 224400 - protein, 214 aa, Zea Mays
MDYLDLYLIHMPVCQKPGPPVFPARREDARPFDFKGVWQAMEECQRLGLARAIGVSNFRTKHLDKMMPFATITPAVNQVEVNPVCQQLKLRGYCAEKGIHVQAFSPLGGQSWAAERNAVLESEVLAEIAKARGKTVAQVSLRWVFEQGVSFVVKTYKKERLKENLEIFDWELTDEDRVKISRIPQKKLSGFSFMFKPEGEFTSVDVSEINPIEE

SEQ ID NO: 224401 - protein, 757 aa, Zea Mays
MLLTPPETPLFRSLDDEENQSITQVSRGRAQSKPVQTSRSSTMDNSQRASRSSASPSRLSPSPRSMGRTRSSSSASRSSPPLAVQTQMPSQRSSAPPIAKTLTPPRRSPSPVSRRMSTGSSRPTLNETRGASPVKPNHRSSQKLHGWQSNVPGFPYDAPSNLRTSLTDRPVCRSRGGSPSSFSGLEKGSRSRRQSMSPTPPRRASSSHSIERDRMSSYSKASATSSGEDDLDSMQSVPISYSSSPVVKKSLVVMKTRTMAPSKNLSKNFTPSSVPKRTFDSALWLMDHRKAPQDRFRPLLSGAPASTFGSGNGNDVHKPMFSHNSSLTTSSNASSYHGATFGSYMHGSQEQHDLVGEWEADDSSRGHEDIFMFDKLDELNKEDIHYKSTGSTDNSLVIVKHLVSSRHDLEGSSRPNQSLCHSADSSQVGNSKNANCSRCGKFFDAMDVDEEGVYCDVCASMIGNILTSPIVQPIGEENQQFDKTTNLKHCIASDPPIPTGCIGYSKEVSLDHQLVNSESYTDCLDQVPPIHSMGHTPQEMLLGREEKIDAEHRKKHVGDSLGNTNDIVFHQSNVTECEQIEPTSVGHDLFIRDQMDNHNHGSSQYNETISETVTSDSSHQPGSTTYQNPKLETTEGTGISVLLVPKSNSNKWPIVEGRALAATNMLCSEPYYARDGVSMMKRSFGLDSTSAASSSDLGSSRQSIICFERLRSGKRGDFEKSQISSTMSRQSIASVSDMSICSSSASLCPQIGAVGYC

SEQ ID NO: 224402 - protein, 398 aa, Zea Mays
MALPSMSLVAKGVLPFSARTSSGVTQRPVSVTASLEHKTSDARRKFLKLALGNLGVGLPTLLGAKKALADEQGVSSSRMSYSRFLEYLDKDRVKKVDLFENGTIAIVEAISPELGNRVQRVRVQLPGLSQELLQKTPGFSGADLANLLNEAAILAGRRGRTAISSKEIDDSIDRIVAGMEGTVMTDGKSKSLVAYHEVGHAICGTLTPGHDPVQKVTLVPRGQARGLTWFIPMDDPTLISRQQLFARIVGGLGGRAAEEVIFGEPEVTTGAAGDLQQITGLAKQMVVTFGMSEIGPWSLMEGGAQSGDVIMRMMARNSMSEKLAEDIDSAVKQLSDEAYEIALRHIRNNREAIDKIVEVLIEKETVTGDEFRAILSEFAEIPVENRVPPATPAAALPA

SEQ ID NO: 224403 - protein, 305 aa, Zea Mays
MRALSYPVREMQDRMRRQGQYGEADINSMVAAQLHHYQAQQRVQKHPENSYTGRDPAQASAEHQYTPPKARQSQWDRGGPNAPSQVPSYAYNEAQGAGGAQSFYDGQRSDTKVGLEKQPSKESREQPRTERTETRYENYNLPRTFEGLEQSFHEDIILLSKELQEAEDAENSRHMERLKDINTQYQEKLLALRARQANYRDEFLRKESLARQQQYQHASMSHYASNSTAGEQHGYNPTAAGTPPVAAGGAYGEAHRGYASGQYESFSDRPDYPEFHDGGRGRGRSSEQRAQYPGGRAYNSGGRRF

SEQ ID NO: 224404 - protein, 749 aa, Zea Mays
MDESGEASVGSFRIGPSTLLGRGVAFRVLLFSSLWRLRARAYAAISRVRSAALPVAASWLHLRNSHGVLLMAVLLALFLRKLSAARSRAALARRRRQHEKAMLHAGTYEVWARAAKVLDKMSEQVHEADFYDEELIRNRLEELRRRREDGSLRDVVFCMRGDLVRNLGNMCNPELHKGRLEVPKLIKEYIEEVSTQLRMVCESDTDELLLEEKLAFVQETRHAFGRTALLLSGGASLGSFHVGVVKTLVEHKLLPRIIAGSSVGSIICSIVATRTWPEIESFFTDSLQTLQFFDRMGGIFAVMRRVTTYGALHDISQMQRLLRDLTSNLTFQEAYDMTGRVLGITVCSPRKNEPPRCLNYLTAPHVVIWSAVTASCAFPGLFEAQELMAKDRFGNIVPFHAPFATDPEQGPGASKRRWRDGSLEMDLPMMRLKELFNVNHFIVSQTNPHISPLLRMKELVRAYGGRFAGKLARLAEMEVKYRCNQILEIGLPMGGLAKLFAQDWEGDVTMVMPATLAQYLKIIQNPTYAELQMAANQGRRCTWEKLSAIRANCAIELALDESIAVLNHKRRLKRSMERTAAASQGHSNYVRPKTPRRIPSWSRISRENSLESLSEEISAVAASSMQQGAALVVGAPPTTLSQHVRRSSHDGSESESETIDLNSWTRSGGPLMRTASADRFISFIHNIEIDTELSRPCAVEGDAADAQKILGPSRATLSTPELLLPQAWLFVKEICCRLKALLIMSYLTL

SEQ ID NO: 224405 - protein, 609 aa, Zea Mays
MVCESDTDELLLEEKLAFVQETRHAFGRTALLLSGGASLGSFHVGVVKTLVEHKLLPRIIAGSSVGSIICSIVATRTWPEIESFFTDSLQTLQFFDRMGGIFAVMRRVTTYGALHDISQMQRLLRDLTSNLTFQEAYDMTGRVLGITVCSPRKNEPPRCLNYLTAPHVVIWSAVTASCAFPGLFEAQELMAKDRFGNIVPFHAPFATDPEQGPGASKRRWRDGSLEMDLPMMRLKELFNVNHFIVSQTNPHISPLLRMKELVRAYGGRFAGKLARLAEMEVKYRCNQILEIGLPMGGLAKLFAQDWEGDVTMVMPATLAQYLKIIQNPTYAELQMAANQGRRCTWEKLSAIRANCAIELALDESIAVLNHKRRLKRSMERTAAASQGHSNYVRPKTPRRIPSWSRISRENSLESLSEEISAVAASSMQQGAALVVGAPPTTLSQHVRRSSHDGSESESETIDLNSWTRSGGPLMRTASADRFISFIHNIEIDTELSRPCAVEGDAAGILSESTFPNGPRPNNSSSVSMPGRCTENSGTESCNTVNTRASTPTSMAVREGDLLPPESTTDNVLLNIVKRDALQDGVTELAESSCAEGYAANCDTVSGLDC

SEQ ID NO: 224406 - protein, 267 aa, Zea Mays
MATRPRSDIYVNLPALEKLDDMLLEILYSFQKTEFWYVNDKGQKDDSVATPCRPVSHRGEEKWWLPVPCVAKPGLTETARRDLQQKRDCASQIHKAAMAINNAVLAEIRIPDLYKEALPKCGRASVGDLIYRHMSFPGKFSPEYLLDCLEISSEHEALEAADRVEAAMHVWRRKASQRSPWSAVKDLMESDKNVMLARRAEDVLLCLKQRFPGLSQTTLDASKIQYNKDVGQAILESYSRVLESLAYNIVTCVDDVLFADEAARKIA

SEQ ID NO: 224407 - protein, 806 aa, Zea Mays
MLYLFGEYVLSADAKGNVFMWAFRGAEPNTEPVGSISLGDKFTPTCIMHPDTYLNKVIVGSEEGSLQLWNISTKKKLYDFNGWNSPVRCCVSSPALDVVAVGCSDGSVHVHNVRYDEELMSFNHQIRGAVTALSFRTDGQPLLASGGSSGVISIWNLEKRRLHSVIREAHDGSIVSLHFFANEPILMSSAADNSVKMWIFDSNDGGARLLRFRSGHSAPPRCIRFYGNGKCILSAGQDRAFRLFSVIQDQQSRELSQRHVAKRAKKLRVKEEEIKLKPVVTFDCAEIRARDWCNVVTCHMDTPQAYVWRLQNFVIGEHVLTPSSSTVTPIKACVISACGNFTILGTEGGWIEKFNLQSGFSRGSYIDTSLAMQCAHDGEVVGLACDARNGFLISAGYQGDIKAWDFKTCKLKSRLDVGKSVTKIAFHRPNGLLATVAGDMVLILFDTVSMKMVRRFEGHTDRITDLCFSEDGKWLISSSMDGTLRIWDISLARQIDAMHVDVSITSISMSPNMDVLATTHVDQNGVYLWVNQSLFSVSTNTENYASGKHVRNVCLPAVSSTERSEEEQVQNLGESYKSSIKPFVITDHQIPNLVTLSLLPKSQWQSLTNLDIIKVRNKPIEPPKKPEKAPFFLPSVPSLSGEILFEPPASSKDTDISTTKNTNHKMSELSSHFSQQLQFCGETKNYSAFTDYLKGLSPSSLDMELRMLQILDDEESEDLEQRPELQSISSLLDYFIHELSFRNNFEFVQAVLKLFLKIHGETIRRHSMLQSKVKKLLEVQSLVWQKIDKIFQGARCMVTFLSNSQF

SEQ ID NO: 224408 - protein, 270 aa, Zea Mays
MGVPKQRWTPEEEAALKAGVAKHGPGKWRTILRDSDFSALLRLRSNVDLKDKWRNLSVTAGGYGSREKARMALKKGRRVVPKLTAEPMDVDEKDMDNAHDTVIDVEPLAMAFEPLPFLESPDKSVARLDDLIVEAIRKLNEPSGSNKAVISGYIEDQYWPPADFQYLLSTKLKSLVNSGKLIKVNQKYRIAPSSSLGGISTKMKGMTREEAAAFAAKAVAEAEVAMAEAEEAARVAEAAENDAEAAKAFLDAVILSMRNRNAASMILRAC

SEQ ID NO: 224409 - protein, 328 aa, Zea Mays
MALGNILGYSSGSTNNWHKWFPFLKTSACCEACANLKGAFLVAVVFLVLCLTVTLIFAKEVPYRANENLPTTKAGGEVETEPTGPLAVLKGFKDLPPGMPSVLLVTAITWLSWFPFILYDTDWMGREIYHGDPKGSNAQISAFNEGVRVGAFGLLLNSVILGFSSFLIEPMCRKVGPRVVWVTSNFMVCVAMAATALISFWSLRDYHGYVQDAITANASIKAVCLVLFAFLGVPLAILYSVPFAVTAQLAATRGGGQGLCTGVLNISIVIPQVIIALGAGPWDALFGKGNIPAFGVASAFALVGGVVGVFLLPKISKRQFRAVSAGGH

SEQ ID NO: 224410 - protein, 239 aa, Zea Mays
MQKIASHIGNASKFSKASKLALQLIEAGSVKPGTIGHFFAILEAAMSSPGVCNEPSVRADYHKLFDAAQGVTELLNQEQKNRFNIWVLHAVVANDLFTDDSFVFSKAVGKIKDAISALPVATVDDDNDEAAALAAASKTDVATDNEAGHGVPAAASDSVVDDGAHAVALEPEEESSDPFGLDGLLEHRPKKTSGRAREKAVAALNRKTVEEEAKRVLKSQREALLKCLEIAARRYRIPW

SEQ ID NO: 224411 - protein, 512 aa, Zea Mays
MTPCALTVDSLNPKVLALADHLGDNAIARRAQCIQNEIEAEPESHPFREIIDCSLSNPQSMGQRPNKFFREVLALCDYPHLLEQSGTNSLFSSGAIARAREILDLFPGRATGGYSHSQGTEGLRDIIAAGIAARDNFPCNADDIFLTDGAAPPVHMMMHLLIRDKKDGILCPVPSHSLYTSAMLLQGATLVPYFLDESRGWGVSMSDLKKQLDSARSMGVFVRGLVVINPGNPTGHVLVEENQREIVDFCRNEDLVLLADEVYQENIYADEKGFHSFKKIARSMGYGEGDISLVSFHSVSNGYYGECGRRGGYMEVTGFNSDVKKQVYKVVSLSSCSNISGQILMSLVMNPPQVGDESYASYQAERDGVLSSFARCAEAMVRSFNGLEGVTCSEAEGAVFVFPSVRLPKKAVAAAEASNTQPDAFYALRLLETTGIVVVPGSVFGQMHGPATRREEDDDGDHLQLCGVSSSLHGRVSRLTDFSSSSSISVLYHNLMLYFGENLDLSKCMIPV

SEQ ID NO: 224412 - protein, 267 aa, Zea Mays
MAASVTVENLNPKVLKCEYAVRGEIVIHAQRLQQQLQTQPGSLPFDEILYCNIGNPQSLGQQPVTFFREVLALCDHPCLLEKEETKSLFSADAISRAKQILATIPGRATGAYSHSQGIKGLRDAIAAGIMSRDGFPANADDIFITDGASPGVHMMMQLLIRNEKDGILCPIPQYPLYSASIALHGGALVPYYLNEKTGWGLEISDLKMQLENARSKGIDVRALVVINPGNPTGQVLAEDNQYDIVKFWYIKRTSMWTTRNLTLSRRL

SEQ ID NO: 224413 - protein, 448 aa, Zea Mays
MSMNHLGSMMILLQPSAQTFIQETSTAGPVDNQSATSNNFSMQAFLQGKPRRENQSAEILPSEVDEKMTATDNKNYVDDGGNVLPSKLEDITESDWTRLENYASTGEKVEVELINCSAKGFVVSLDSLIGFLPYRNLATKWKFLAFETWLRRKGGDPSLYKQSLGLEDSFEVNDTNLEPESSSVSKIAGEDQESLSSKPKFEDLIRAYNQEKSKFLSSFIGQRLRVSVVLADRNSKRIFFSMKPKESEEMIQKKKNLMARLNVGDIIQCTIKRFVYFGIFVEVEGVPALIQQWEVSWDDTLDPAVSYKIGQVVDAKVIQLDYNNIRIFLSLKDVKPNPSVGALESVVGEDLSFGGALEPVQADFEWPEVDALMEEMRRTEGVRDVYKGRFFQSPGLAPTFQVYMAPVVGPKYKLLARYGNSVQEVMVETALGKEELKEAVLMCTNRVS

SEQ ID NO: 224414 - protein, 350 aa, Zea Mays
MGSSGADTPSKEQQPPATSGAAIPPVYPDWSSFQAYPPIPPHGFFPSPVASSPQGHPFMWGAQAMIPPYGTPPPYVMYPPGVYAHPSMPPGAHPFTPYAITSPNGNADATGTTVAAGNTDGKPSEGKDKSPTKRSKGSLGSLNMLTGKNPSEHGKSSGASGNGVTSQSGESGSDSSSEGSEGNSHNDSHHKESGQEHDGDVRSSRNGVSRLQSEGKLNQAMAILPIPSSGPATDPTTNLNIGMDYWANTASSAPAIHGKATSTTVPGAVVPAEQWTQAECEELAQRADVLKQENASLRDEVNRIRKEYEELLSRNNSLKEKLEGKQHKTDEAGLNNKLQHSGDDSQKKGN

SEQ ID NO: 224415 - protein, 291 aa, Zea Mays
MAAPVADDASASPGYVLRSTLEGHRRAVSTVKFSPDGRLLASASADKLLRVWSSSDLTPVAELEGHGEGVSDLSFSPDGRLLASASDDRTVRIWDLAVGGGARLVKTLTGHTNYAFCVSFSPHGNVLASGSFDETVRVWEVRSGSYDGLCRVWDSATGHCVKTLIDDESPPVSFAKFSPNGKFILAATLDSTLRLWNFSAGKFLKTYTGHVNTKYCIPAAFSITNSKYIVSGSEDKCVYLWDLQSRRIVQKLEGHTDTVIAVSCHPKENMIASGALDNDKTVKVWVQKEED

SEQ ID NO: 224416 - protein, 62 aa, Zea Mays
MLFHSLACIQITKTLDHVMRGYFSDCQTLLACLQEFLVLQPLATFFRKVLGIVCLRCLLCCT

SEQ ID NO: 224417 - protein, 375 aa, Zea Mays
MSIAILPMSSEFSWSPATVGLIQSSFFWGYLLTQILGGIWADRFGGKLVLGFGVIWWSIATVLTPLAAKIGLPCLLTMRAFMGIGEGVAMPAMNNILSKWIPVSERSRSLALVYSGMYLGSVTGLALSPLLISRFGWPSVFYAFGSLGSVWFALWQSKAHSSPDDDPELSKAEKRHILGGSPLKEPVTSIPWRLILSKAPVWALIISHFCHNWGTFILLTWMPTYYNQVLKFNLTESGLLCVLPWLTMAVFANIGGWIADTLVQRGISVTNVRKIMQSIGFLGPALFLTLLSKGSDAFSQSGLYSNHQDIGPRYAGVLLGLSNTAGVLAGVFGTAATGYILQKGSWDSVFKVSVVLYIVGTVVWNVFATGEKVLE

SEQ ID NO: 224418 - protein, 186 aa, Zea Mays
MARRRDDVALAAITFAIVALCARYASAVGTTPQSSFSYREGDPTGPTKWATLQKDWDVCDSGTEQSPIDVAKVEVSEDLDPLQQTYEPGDAVMHNRLHDFMLNWTGGNGGLTIEGKKYKLKQVHWHVPSEHTVNGTRFDAEMHMVHEDSTDAKSKAVVAVLFSAKAGKSSKLLRDVPQALLREARW

SEQ ID NO: 224419 - protein, 531 aa, Zea Mays
MDSARSWFTKLQTREKSIGKKKELPPNGKEPGDDAPSSATKQRVAAAKQYIEKHYKEQMKHLQDRKERRCSLEKKLADADVSEEEVNNILKQFEKKETEYMRLQRHKMSVEDFELLTMIGKGAFGEVRVCREKTTGNVYAMKKLKKSEMLRRGQDSEYLYLIMEYLPGGDMMTLLMRKDTLTEDEARFYVGETVLAIESIHRHNYIHRDIKPDNLLLDKHGHLRLSDFGLCKPLDYSNFPDLNEKDVTPPTKSSAMHGDGKQQSMPKRSQQEQLEHWQKNRRTLAYSTVGTPDYIAPEVLLKKGYGMECDWWSLGSIMYEMLVGYPPFYSDEPMTTCRKIVNWRTHLKFPEEARLTADAKDLISKLLCNVDQRLGTKGAEEIKEHPWFSGLEWGKLYEIEAAYLPQVTDELDTQNFEKFEESSDGSSVQGSAKAGPWRKMLSSKDLNFVGYTYKNFELVNDHDVPGMAELKKKEKAKRPSVKSLFGADSPEGDGGRGEPQPEVDDETASAEGSARKPAEPELTRSLSSPST

SEQ ID NO: 224420 - protein, 399 aa, Zea Mays
MPDPLPSATPTGLGSGVATTSLLSLTANTSGYLSASNSSTMEETPYRTRPLTGGPLSKLQAPLSNYNLKDDMDVFSPLVDVQPFTPSSGNWWDEHGSDDAKKDDKPGEKKFSTTRKYSYMEGNDEPHPIADWRSTARQDSISSVTTTSMPSWKSELSVSSPEPATGNALPDRLTQRQLISRFGSSAFPTGGLAFTASQDPASAPSHSLKGSLTSNILMNLQNKGILNNVSSSLDASSPNLQSSLPSSYVSKTMPSVIPDQLGAAQSTSLWRPTTYTDRMSSSSVFSDGLASAFGSPKSKKTGAEAKDELLSNILSRQTAAGSSSAIPLASNGVVPPQLANTGSSSDQLGASSFSLQYVQRMLEESLGSVQKSIHEDVRNLHIELLRQFHMHEANVCSSG

SEQ ID NO: 224421 - protein, 369 aa, Zea Mays
MFLSTVKARKVHDCRNSWHSEWWPAKLALWLGLTAVTFLAPSPLVQLYGGAFRSRGFPGDPADQRHQVHHVAQRLVPRRDDPEEIPLADSGGVHRHVRGVAPGDRAHVRVVRAQPGLQAQHPLHHRHAGARAAHDLRLHELQGEGRVRGAGADGDLRRVPVLVGDQKRAAHGGLQQEGRSRHERRLGEHRELCDRRRRHRGGDLLDGDRLQVPPVQAGGGGVGGGGGGRHPLRPRLLPPGVLHGRHVLRHDLRRLEREREPHHGEVDDRRRVGEHVGARRQRVAGGNRVHMDDDRARHLEDEAGGIGGGDVSSFSADSEFLTAGIYIYIQTQEQIKGTGNGKRWCVLTPMHRIPGCSLVNDDAALLQLG

SEQ ID NO: 224422 - protein, 334 aa, Zea Mays
MAPEVLKRNYGPEIDIWSAGVILYILLCGVPPFWAETEQGVAQAILRGNVDFKREPWPNVSDNAKDLVRQMLQPDPKLRLTAKQVLEHPWLQNAKKAPNVPLGDIVKSRLKQFSRMNRFKRRALRVIADHLSAEEVQDIKEMFKVMDTDNDGIVSYEELKSGIANFGSHLAESEVQMLIEAVDTNGRGALDYGEFLAVSLHLQRMANDEHLRRAFLFFDKDGNGFIEPEELQEALMEDGGADTMDVVNDILQEVDTDKDGKISYDEFVAMMKTGTDWRKASRHYSRGRFNSLSIKLIKDGSVKLGSGSLFQCRWGASAEGLHTCTPAHLLRCST

SEQ ID NO: 224423 - protein, 218 aa, Zea Mays
MDMDRPEEEGQQRRETMTPVLLRLFGVDVHRGGGSGEPEESPMDLRKSSSMPDLTINPLLSPEEKEGCKGYASDDAELASGQQKRRRRKAQDRKKGIPWTEEEHRKFLDGLRQLGKGDWRGISKGFVTTRTATQVASHAQKYFLRQTNPGMKKRRASLFDVGIADYKDNQVPGPQSIVAAKPAPTQEIIHTDRGDVPIPRYRGLGEILGSNMQVRLIN

SEQ ID NO: 224424 - protein, 376 aa, Zea Mays
MNSTWYDLVKDAKDRECFFKARDDDFFARTMDQFRLMQNSQVTDNVSRWNIECQCAPDAQLTCDNHATIPDKAPDAQLTGDNRATIPDKAQVVEPAHAEQVPMQSERAAEKTWQLCLNQLSHIPSFAPGEQLTDEKVVEPAHAKQVHLAQLSPSPSRERARLSQFAQGAQLTDEEAAALEEEDHPQIDLLDGLRRGGRLRGSGAARLAEVRRRRRSGVLTSMASLSSKHHVLIQVLLARGPLSERDFHAFIDGAFGKNTGTKRLASEDLANDWDNKRLNPGNDNYPLSTGAANNLFLGIEQGAGSSNGQSAFPKFDNGSSVALPSGQGMSGLMGKGAKWRDGDWLCNNCNNHNYASRAFCNRCKTQKESAVHPGVL

SEQ ID NO: 224425 - protein, 301 aa, Zea Mays
MRRAEEENQRWYSISICSPIRQNNGGNIGFVDCVMRTNVALTRAKHCMWILGHEFNMVTDNVSRWNIECQCAPDAQLTCDNHATIPDKAPDAQLTDEEAAALEEEDHPQIDLLDGLRRGGRLRGSGAARLAEVRRRRRSGVLTSMASLSSKHHVLIQVLLARGPLSERDFHAFIDGAFGKNTALGTKRLASEDLANDWDNKRLNPGNDNYPLSTGAANNLFLGIEQGAGSSNGQSAFPKFDNGSSVALPSGQGMSGLMGKGAKWRDGDWLCNNCNNHNYASRAFCNRCKTQKESAVHPGVL

SEQ ID NO: 224426 - protein, 930 aa, Zea Mays
MDDSVPFNDLGPSKPPSASFYDDMFESYFNRAAEAPEPAPKASSSPSTPPPVFDKPVFDDDPYTADPFDAIPLFGGGGGGEEEDLHGGVRSAAKPERTELEVVGFDEDLFPGLAGSTNFPMEKPAREVERDRQPVGFDDELIPGFDGSMKPAPQMEPETVAFDDDVIPDCSGGTSYPSSAREEPITRQESESISSSKISMSMPEDPFVTLGGTHKSGYSSLGLFSNLLNNIGMPRKEADTTPDNTSGIFQGSDIFTEFPKAMPPFSFTSENQSDRTERRYTENIISTSHSDRLPQEKTVQQASTEAPANTLTEMNFPEASVVHEVPVTTSFQTLNPFVEEDDLLEVNQSSQTTNDVWLTVLDIALVTLPTSAPPPSRPPPPLAAKKPPTESVTSEAYAHHCNQRYHHSICSSNTSKTSQIDELEDFFLTKPANSAIGHPQVLKHEGNGHYPSAATASFMDWTEMGHCKRGNQGAFDSMFTSSQYRQPEIDEKAEVCAHETESTDEEKRLENEQIQREHKEEQIRAEREMEEELERERENVRQREQEEQRRREKERVARQAVDKAIREARERSAAEARMQAEKEARQRAERAAVWKAATEARERAAVEAKERAAKAAAEAKEREAAEARERAATESRERDAKVAADARERAARAAAEAREKETAEFQEKATAEARAKAERAAVEKAAAEARWRAERAAFERVATEVKQRAFNDARERAAAAAAAEALARENQQRRATTEPDLESFFGMPSRSSSLPRSYNNTTTNPFDVQPGNAGSGGVRRTPSGSGFPFTQPSSSNLMDGLSSIFGAPLPSAVFQEVDGESEERRKARLERHQRTMERAAKALAEKNERDLQAQQEQEERHRIGESLDFEIKRWAAGKEGNLRALLTTLQYQHLSRKNTGKQHCVSILIRCSRRVQIFNRNTLQKRYLTF

SEQ ID NO: 224427 - protein, 843 aa, Zea Mays
MGSRSKNEDDKALVLCQERKRFVREALDGRCAFAATHFAYIQSLRHTGFALRKFVEPEVPTDSSLFTSTSATPEPPTIMQKPMTISPSLSHHASDSFSPVPSPLSSGRFHVNHMKAGGNSVTTVKEKVIEPVTATLETSSPVRGQAIHDLDDSSTFEAPPGTPPWDYFGLFQPVESQMSFHDDKELGHDFENDDDIRRLREKEGIPELEEELEKSPAYPDYLKRRLGQEKPPDLKDVEKSPMNGGEDDLALSEDDFDNPTSESLVRMFKNRNDTPVAHIATDHSSTSLPKDDLVSETIDSQPERPKDDRAVDSQTERLKDVTPDDPQTEKPKDHAGVDSPTEKTKDHPGVDSPAEKPKHDMRVLDISMYESDETPVTSPPKEISSSTAAFQVNGKFKKPLHDVRNVARDLNSCIKEIEILFIKASDSGKEVPRMLEADKVNFRPLLPEEKAPGSTASGFFATLFACCREEVPLPQPPPQAEVKYLTWHRSMSSLSSSSRIPLGTTSKEDTDGLNGNIFGGVYMNSGSHASTLDRLYAWERKLYDEVKASSVVCRQYDEKCRQLRHQESRGESQMSIDKTRAVVKDLHSRILVAIQRIDMISKNIEDLRDKELQPQLEELIGSLTRMWATMLECHRHQHDIIKLVSSTRNMKTSIRSESQFQATLLLQVELNTLCSNFQKWIASHKAYLQSLNSWLLKCVKALQRKRKSSRKKNIKADPITKYAVAPIFKTCESWINLLDDLPTDLEDAIKDLAADINRYVPHQEKQRGGSKLTLSLSRSGRSNGEMGEVHRSYTPMDLQSSLETFLGKLEMFSDVSLQKYMKLKEDIDEAKERYEEAQAAQRI

SEQ ID NO: 224428 - protein, 580 aa, Zea Mays
MVKVYLEEEPLLRNQSAAARRPSWLGKFFERSITARRALLFMSILGMCMLIGDGILTPAISVLSAIQGLRGPFPSVRNSVVEALSAVILIGLFLLQKYGTSKVSFLFSPIMAAWTFTTPIIGLYSIVHYYPGIFKAISPHYIVRFFLRNKKEGWRMLGGTVLCITGAEAMFADLGHFSKKGIQIAFLSSIYPSLVLTYAGQTAYLINNVNDFSDGFYKFVPRPVYWPMFIIATLAAIVASQSLISATFSVIKQSVVLDYFPRVKVVHTSQHKEGEVYSPETNYILMVLCVSVVLGFGAGNAIGNAFGVVVIMVMLITTVMLTLVMIIIWRTPPVLVALYFVPFVVMEGSYVSAVFTKIPEGGWLPFAVSIILAMVMFGWYYGRQRKTEYEIANKVTVERLGELLAKPEVQRVPGLCFFYSNIQDGLTPIVGHYIKNMSSLHAVTVFVTLRYLLVAKVDERERVLVARLGPDGVYGCTVQYGYADSLSGGDLTAQVTGSLRRHFGTAEAGAEEAARLEAARTNGVVHVRGKMRFYVGEDAGWFDKVMLGFYEFLHGICRSALPALGTPLQQRVEIGMLYKV

SEQ ID NO: 224429 - protein, 224 aa, Zea Mays
MSQATEVVGNPYAAELAAAKKAVALAARLCQRVQRSILHSDIQSKADKTPVTVADYGSQVLVCLVLKKELPSHSFSIIAEEDSKDLREDGAQEIIEHITTLINETIVNDGSYNMSLSKEDVLSAIDGGKSEGGPSGRHWILDPIDGTKGFIRGDQYAVALGLLDEGKVVLGVLGCPNLPLKSTNKNNSSSFGDRIGSLFFATIGCGAQVEALEGSEPQKCLLHQ

SEQ ID NO: 224430 - protein, 215 aa, Zea Mays
MDNTNMVVVTTRDSGILARFLIKPAAFHPWRDRATTQPTHQRRPNKSPALRARRLATLTFLPCSAAATVASTAMVSAEVGIDYVLWTEDEVSTRVGEVAAELAADLRALPEPAVIVGVATGAFLFLADLVRRVDVRLVVDLVRVESYGAGTESSGKPRITADLKVDVAGKHVVVILLTQGILCPISLLIWRRKVHHPYRFALFLTNQQEGKSMFI

SEQ ID NO: 224431 - protein, 222 aa, Zea Mays
MTLYLEEANDLLMQIPIIINEVCSHCNIVVLLLRSPTISGKANPFTFLFSKVHQLCFFLKVNANDVPSASPSGWRLKTRASNGHKLSKACLLTKRKRKFILYDHFIKSLSKQLRIIPSCANTLSISSLQSTLLIVLVQFMGIALTCIKVLSHSRCTIGCCISPNIMAAILALSLLYHVVCILYFDEMLPHFGTGSHHFPFTSFVFSITNLNNLNRTTCISHI

SEQ ID NO: 224432 - protein, 157 aa, Zea Mays
MSAPAAQAVVALALAAILSTPAPQADTFSNVPPTLSGGDGKQERIKHPRSAKALQCTTKCVGTCIRGGGGAPGEGPLNVRRPLVVFKDGFRSRQYWMGRTDPETGQRNNMPKPKVVGATAMAAVQARYGIRFFCQASRSRTSEATRVIRYSKPVSNI

SEQ ID NO: 224433 - protein, 200 aa, Zea Mays
MLLQFPTNVTGWICHVLVTSSLLKAVGVGSFTGTSAAASAAAIRWVSKDGIGAFGRLLIGGRFGALFDDDPKKWRMYADFIGSAGSIFELSTTLYPGYFLPLASLGNLAKAIARGFKDPSFRVIQNHFAESGNLGEVAAKEEVWEVGAQLLGLSIGVLIMDKTGVKSSYLTLVLTWLSVRLLHLWLRYQSISVLKFRTVR

SEQ ID NO: 224434 - protein, 187 aa, Zea Mays
MYADFIGSAGSIFELSTTLYPGYFLPLASLGNLAKAIARGFKDPSFRVIQNHFAESGNLGEVAAKEEVWEVGAQLLGLSIGVLIMDKTGVKSSYLTLVLTWLSVRLLHLWLRYQSISVLKFRTINLKRGRILVKSHVAQHTVPGYVACNEEENILTWERYLRPQVSFGVPMERMLGGDKSSDMEAKA

SEQ ID NO: 224435 - protein, 252 aa, Zea Mays
MATARLPSRSFLSPAQQSYPRLPASVRLCLSHHEQPPTGPKRHRRAATSHPAFSAAARGRAKKIPIADTDEPAAGVRVTDRGISYRLDGAPFEFQYSYTEAPRARPVALREAPFMPFGPEATPRPWTGRKPLPKSRKELPEFDSFVLPAPGKKGVKPVQSPGPFLAGMEPRYQSVSREDILGEPLTKEEVSELVKGSLKSKRQLNMGRDGLTHNMLENIHSHWKRKRVCKIKCKGVCTIDMDNICHQLEEKV

SEQ ID NO: 224436 - protein, 260 aa, Zea Mays
MATARLPSRSFLSPAQQSYPRLPASVRLCLSHHEQPPTGPKRHRRAATSHPAFSAAARGRAKKIPIADTDEPAAGVRVTDRGISYRLDGAPFEFQYSYTEAPRARPVALREAPFMPFGPEATPRPWTGRKPLPKSRKELPEFDSFVLPAPGKKGVKPVQSPGPFLAGMEPRYQSVSREDILGEPLTKEEVSELVKGSLKSKRQLNMGRDGLTHNMLENIHSHWKRKRVCKIKCKGVCTIDMDNICHQLEVLGSRAREMTL

SEQ ID NO: 224437 - protein, 826 aa, Zea Mays
MASSDEPDSRSKNPAMQPSSPLSSEYAFQGTSPAWPARSPSIQFVSNVVVGDGDAVAASLSACPSSTASSSRGSSSDIEIQVLFQGGDDDDGSTTTSPAAAWSRSTSFRGCSDGELDVEAGRSRLLRAHSSVRSVEEFIQRDCTGELRWSALEGGLQFASKSRSNAGENESYSSTIYPLPDNVNINSSRSISRCPSHGIRIAMDSCDRNSTSRITGKDIKQAIMFSASLNKLTLNQDEATEYTNLILEELQTGQGVLQMNVMSKGLSRDLQPTCGPIPVPMKCSRQRHILTATVVFFQAHWRRIFVVFLWLMACAALFTWKFMQYRQRLAFEVMGYCLSTAKGAAETLKLNMAIVLLPVCRNTVTWLRRSRVINSVIPFNDNINFHKLVAAGIVIGVILHGGIHLACDFPRITRTDKAFFGRTIAADFGYHQPSYLEIVVSTEGTTGIAMVVLMFVAFLLASSPSRRNPGMLPPLVRQLAGFNAFWYSHHVFIAVYVLLIVHSMFLFLAKDVAEKTTWMYVAIPVVIYIGERMFRMVRSMVFDVKILNATVYPGMVLALKVTKPPGFRYQSGMYVFVQCPEVSKFEWHPFSLTSAPDDDHLSIHIRSLGDWSYQMYDVFQQMLLSSNSSMPKIFFDGPYGAASQDHSKYEIILLIGLGIGATPFISVLKDIANGLDKGHGNLNYHSDRLKKAYFYWVTREQGSFEWFRDIMKEVSVLDSKQGVIEMYNYLTSVYQEGDKRSMLISAIQALHFARHGIDIISKTPVHTHFSRPNWPRVLHGLARRHIGERIGVFYCGPDDLGRQLEKLCHKVNTKTFTRFVFHKEHF

SEQ ID NO: 224438 - protein, 221 aa, Zea Mays
MRPLPLKASQDILRLMHHAYRNQGFQLHVSFFEIYGGKLFDLLNDRSKLCMREDAKQKVCIVGLQEYRVSDVETIKELIEKGSATRSTGTTGANEESSRSHAILQLAIKRRVDGNDSKPPRPVGKLSFIDLAGSERGADTSDNDKQTRIEGAEINKSLLALKECIRALDNDQTHIPFRGSKLTEVLRDSFIGDSRTVMISCISPSSGSCEHTLNTLRYADR

SEQ ID NO: 224439 - protein, 217 aa, Zea Mays
MRPRRRGRISSPDIAPTDFDDDDREENGDDGSKESSSVDDHSPDVRPKRSRRWPMPRRSPAKAIGNTDNSIEDNDDSGGARDFMTASPLRGEMLAWGKNGTRSQTRHGNSSGSSGRMGRSGRVAKLVDQFRNADDFDNELNLYLVLLPLDGQSVPKLEKPYLSCLPTLSVRHLCQLLLSSCLGNPKKSRYISGKARMHACQPITPVNTRQSQNSLMV

SEQ ID NO: 224440 - protein, 1267 aa, Zea Mays
MLVELIQHEDSCSGDSNGPTSTYKLLLLKESISKEIEKTELEIDSLEGELKSVNTEAATTLEGSPTGVTHTENLSPSSGTSKVPGSVEICDTSDMIKEPGELIGSPKVPVVQYDDVKSADMMEIETAPVHNAKTVPSEAGAISPVVAEGKACAAADLSSLKASEEAGSQNDIDNGRLETSSRQANADSMKIEISDDLPVKKWTYHDHKSDLLSSVTSANSAIAKEINEVLFKSLPADTPRLDLFASSHLLSQRKSDLIVKERLGVCKTRLRLKEQMLTMKFKAYCHLWKDVQLFSANKQRSKSNKRTDQSNRTSQIGSQRQRSSNRSRLTMPAGNLSTFSTPEMSDVAMRLFSEFKIKRCRNYLKMPALIIDEKEKEWLKLMNKNGLVEDPVLVEKERVMINPWTQEEKKIFMELLAKFGKDFSKIASFITHKSTADCVEFYYKHHKSDSFREVKKLLDLRQQQPTSNFLGAKSGHKWNPESNAASLDMLGVASVVAAHGLEYAKQVEKISAKSLIRTAYGPNVTSVANKSSDKECIDHVPLHERESVAADVLAGICGTLSPDGMGSCITSSADPGQKISMKRVEHVLSQENDKTVEEEDTLSDQECEVDPVDWNDDEKSIFIEAMNNYGKDFARISSCVKSKSYEQCKVFFSKARKSLGLDLIHQGAADVSMPASDTNGGKSDTDEACAVEMDSAICSTQSCSKIAMDVCPTEGAIGGPNSVIISKQAEAYISNGCNADVKIEEDEKVADKNCSIVDAKRSSDATHEAGPIDINCPGSTDKLQGTDDVVDLVNMHSNSGISSSAKHAVAIHSEMRSTLHSVEVLQTDKGEGTGTDLSWVEECSHHALDNTPMKNGNSGAPAFLASDSGIKDNVRISNITAASTVSPAFTSSYQHSVPGDMPLPKPKPLVTPLTPKDLMPVQFSSVLPDPTAIRFEGIASITTPNFEDTGNRVSGALGAKEMSKYPAFRDPSGNQQSTLFCNIDGYMNHRLTTELPFFSERTASGTVNTSQADRLTQTKLQNGRSSSLCLQNNSDGIQWPRDHEGGLEGSLRPCSRNTSSEGDEQQKRPGDVKLFGQILSHQSTLQSSGLSCNGNKSKPPSPKIDTSVRSMNNPMDRVVCSSRPGTTPHLGLEERLARCYGHLDGSTAQPEPLLVMAKRQRSLAGVQFYSAKNGTLGVLPDYQQPSTQPQQSDPKRVERLSDPQKRNVLELISGFQQPGRVARFGGAGILVSGNVSDPVAAALKAQYGPGSKIMGSDVDPWTDIGSR

SEQ ID NO: 224441 - protein, 307 aa, Zea Mays
MRRKKPIPFTQKFPNADPLALCLLERMLAFEPKDRPSAEEALADPYFKNIASVDREPSAQAVTKLEFEFERRRVTKEDIRELIYREILEYHPKMLREFLEGTESSGFMYPSAVDHFKKQFAYLEEHYAKGSTGTPPERQHNSLPRPSVVYSDNRSQTTANITEDLSKCMLRENTQKTHPYSASVASKFPPHVPQGDVARPGKAVGSVMQYSPCPAPAAERYEQRRIARHPAVAPNNIPSGSSYPRRSQTCKSETGDAESHMDRTNYLLPLIVVVVTGRISAVHQKAIPNRFLTCYQYRLLLLSATLF

SEQ ID NO: 224442 - protein, 98 aa, Zea Mays
MSNEESLGTQQLPQTISLLEAHTPEEARPARVRQVMPKAIWMRTKLGSQSHMQRTNYLLPLIVVVVTGRISAVHQKAIPNRFLTCYQYRLLLLSATLF

SEQ ID NO: 224443 - protein, 152 aa, Zea Mays
METKPERNPLERNSPNDAPYWNLDMVLNKKGMAAAFGSGALFSIVSGMGTPNPVANAITTGVGFAVFQGGFFMISQKFSQPQSGDTYYSRGRSMLQKLGLQNYEKNFKKGLLTDQTLPLLTDSALRDVKIPPGPRLLILDHIKRDPELTKAN

SEQ ID NO: 224444 - protein, 212 aa, Zea Mays
MVVGGTETTSNTVEWAMAELMQKPELLAKVRQELDAVVGRDAVVEESHLPQLPYLHAVVKETLRLHPALPLMVPHCPSADATVGGYRVPAGCRVFVNVWAIMRDPAVWKDPRDFVPERFLDGAGEGRKWDFTGSEMEYLPFGSGRRICAGVAMAQRMTAYSLAMLLQAFDWELPAGARLELDEKFAIVMKKATPLVAVPTPRLSKPELYYSA

SEQ ID NO: 224445 - protein, 62 aa, Zea Mays
MSCFPAGSRSLSSPGPSNATRSSARNSAPKSSPFNRKMQVTPSHLPLMVDTFHCISLHDRSI

SEQ ID NO: 224446 - protein, 84 aa, Zea Mays
MEGGVRYCCRTTLLLNNKSYAYKWWRPGGSRSLSSPGPSNATRSSARNSAPKSSPFNRKMQVTPSHLPLMVDTFHCISLHDRSI

SEQ ID NO: 224447 - protein, 71 aa, Zea Mays
MKINVNNLMDLYPNNRPTNALQKSVDHIDEAIIVHPNGNDTITHEVFVHPYGKLQEMHILQNDIILLSCVL

SEQ ID NO: 224448 - protein, 71 aa, Zea Mays; identical to SEQ ID NO: 224447

SEQ ID NO: 224449 - protein, 851 aa, Zea Mays
MSPVHSPMISRSIRNLQIAVLSYQNKTNTSAVTDVEEHKCLNSELWHACAGPLVSLPAVGSRVVYFPQGHSEQVAASTNKEMESQIPSYPNLPPQLICQLHNVTMQADAETEEVYAQMTLQPLNPQELKDPYLPAELGLVSKQPTNYFCKTLTASDTSTHGGFSVPRRAAEKVFPPLELMATDLHGNEWKFRHIFRGQPKRHLLTTGWSVFVSAKRLVAGDSVLFIWNDNNQLLLGIRRANRPQTVMPSSVLSSDSMHIGLLAAAAHAASTNSRFTIFYNPRASPSEFVIPLAKYVKAVYHTRISVGMRFRMLFETEESSVRRYMGTITGISDLDSVRWPNSHWRSVKVGWDESTAGDRQPRVSLWEIEPLTTFPTYTSPFPLRLKRPWPTGLPSLHGGKDDDLANSLMWLRDTTNPGFQSLNFGGLGMNSWMQPRLDTSLLGLQPDMYQAMATGAFQDPTKQASPTMLQFQQPQNIAGRAAPLSSQILQQAHPQFQQQPYIQNISESTIQAQGQSEFLKQQIQRSQSFNEQKPQLQPQQESQQQQQSQCLQAPQHQQIQQNIANYQSVSNALSAFSQLSSASQSTPMALQTILPFSQAQSFTDTSASSLSPSNTNTMQNTLRPFSSEAVSHLSMPRPTAIPVPDAWSSKRAAVESLLPSRPQDSSQMQQLDSTPASIPHSSALAPLPGRGCLVDQDANPDPQNHLLFGVSIDSQSLLMEGGIHGLQNGNDSTAIPYSTSNFLSPSQNDFPLDHTLNSSGCLDDSGYVPPCSDNSDQVNRPPATFVKVYKSGTYGRSLDITRFSSYHELRRELGRLFGLEGQLEDPLRSGWQLVFVDREEDVLLVGDDPWQ

SEQ ID NO: 224450 - protein, 495 aa, Zea Mays
MAAPQPVAPASEAPPSAQMVGNAFVQQYYLVLHQSPDLVYRFYQEASRLARPASAAGAAGMDSVTTMEAISEKIMEMDVSKAEIRTVDSQESLGGGVAVLVTGHLTGRDGVRREFSQSFFLAPQEMGYFVLNDIFRFVGDIPASTAVEAQPEAVAVVPPVAAPLANGTATPAVEPATPDDHGAVPQQEHHVVDRSLPQPEEDEAEVYNPPQEEVVDEEQPVAEVINEVPNNVAPVVATTVASVLQEEAPKKSYASIVKIMKEVPLPAPAPPTRPSPPKLEKQSPPPATPVTDVPPFSSNPENINIQEPEVDAHAIYVRNLPLNATETQLEDEFKKFGTIKQNGIQVRSNKIQGFCYGFVEFEDSTSVQSAIEASPVAIGGRQCYVEEKRAPGSRAEAAGSHQAGATVSEVKVPEGVVTTVEEGATGGVNLVTGLITGSEVVAEVAHYVELMLATRGLTMLDMLVVVVAAQQLLAHLQNEGHHSCCASFGSVVRWL

SEQ ID NO: 224451 - protein, 393 aa, Zea Mays
MKGIMVDAPFAVFDENPSMRRSPAIRRVEDMFEQVKTKLPGAPKFLLCVLAERKNSDIYGPWKKKCLAEFGIVTQCVAPTRVNDQYLTNVLLKINAKLGGMNSLLQIETSPAIPLVSKVPTIILGMDVSHGSPGHSDVPSIAAVVSSREWPLISKYRASVRTQSPKMEMIDSLFKPREAEDDGLIRECLIDFYTSSGKRKPDQVIIFRDGVSESQFNQVLNIELQQIIEACKFLDEKWNPKFTLIIAQKNHHTKFFIPGKPDNVPPGTVVDNKVCHPKNFDFYMCAHAGMIGTTRPTHYHILHDEIGFSPDDLQELVHSLSYVYQRSTTAISVVAPICYAHLAAAQVGQFIKFDEMSETSSSHGGHTSAGSVPVQELPRLHEKEGSSWYDVKC

SEQ ID NO: 224452 - protein, 640 aa, Zea Mays
MAAPEAPACYVGIARQSAAFRLMKQMGWEEGEGLGKDKQGIKGHVRVKNKQDTLGVGVDSPHNKWVYDTTQFDNILKKLKVQSANPVQEEVAAVESDSPDITPKKDKSAKHEVTKVTRPQGRYKKRERGKSVNSYSATDLQGILVRKNEDNSKVDQKLEPTCLDEPDPIICLDAVSQADDVNWWGHKFGFLSGGFLGAKSRKNKSSQKDLANVRQTFAEEDQENLYNLVQDKATSGKQGLGIKGLPMKVAGQRWKGNKTSFVDSDDDNSAQSDEYSEIEENGDEEEHISASESIDTDKNADKELLVDARPKTKVKKLCKRILRQAPSQSMKLKDLKVAVEEHSNVVFSSFSGRREALLFLKKKICECITSGPSHAIDVTREAIKDGVDAVIAVGGDGTLHEVVNGFFWEGSPVCALDRGPDHSTALGLIPLGTGSDFARTFGWTNDPHDAIDRIVRGVKSKLDVGVMEGPNREPHFFVNVADIHLSAKAGYFASMYKSFGNLCYVFGALRAFWGHNNQDMRIKVNGGEWRTVHNVTALCIGNAKYFGGGMKITPTADPFSGNLEVVILQDFKWYDFILKLHRLYGGTHLSVNGVSSMRVQSIEVAEVAASGGVFVQSDGEHFGFLPTKFSVLPRAVDFFC

SEQ ID NO: 224453 - protein, 394 aa, Zea Mays
MKVAGQRWKGNKTSFVDSDDDNSAQSDEYSEIEENGDEEEHISASESIDTDKNADKELLVDARPKTKVKKLCKRILRQAPSQSMKLKDLKVAVEEHSNVVFSSFSGRREALLFLKKKICECITSGPSHAIDVTREAIKDGVDAVIAVGGDGTLHEVVNGFFWEGSPVCALDRGPDHSTALGLIPLGTGSDFARTFGWTNDPHDAIDRIVRGVKSKLDVGVMEGPNREPHFFVNVADIHLSAKAGYFASMYKSFGNLCYVFGALRAFWGHNNQDMRIKVNGGEWRTVHNVTALCIGNAKYFGGGMKITPTADPFSGNLEVVILQDFKWYDFILKLHRLYGGTHLSVNGVSSMRVQSIEVAEVAASGGVFVQSDGEHFGFLPTKFSVLPRAVDFFC

SEQ ID NO: 224454 - protein, 381 aa, Zea Mays
MMAPLSPRLVVPVDVKKLPREQKVPLHNRWHPDIPPVADVTEGELFRVEMVDWSGGRVRDDNSADDLKFMDFTIAHYLSGPLRIVDSEGVPASPGDLLAVEICNLGPLPGDEWGYTAILERENGGGFLTDHFPSARKAIWYFEGIYACSPQIPGVRFPGLTHPGVVGTAPSLELLNIWNEREKSLSETSLETIKLCEVLHQRPLAHLPTPENCLLGKVQEGTAEWHIIANEAARTIAGRENGGNCDIKNLSRGSRIYLPVFVEGANLSTGDMHFSQGDGEISLCGAIEMSGFLELKCEIIRGGMKEYLTPVGPTPLHVSPIFEIGPVEPRFSEWLVFEGISVDESGKQHFLDASVAYKRAVLNAIEYLSKFGYSKEQSGLG

SEQ ID NO: 224455 - protein, 193 aa, Zea Mays
MSRVAILTPQNLQVPTMNEMIDMWKKNKMNTFGIIYSWFLAKVASQLEVLPGAEFRVAFEEAMSYGGKVILGDRPVQITLRRTWGKMSLWHRAKFLYYIIFQSVFLPSPEELNKMLKDMDDVDMLTLVIQEMSKAFPSLMDTLLHERDVYVFNVVEVGQGIFFSGCSCGKGACFWNKEKLATANSGKLLIRIT

SEQ ID NO: 224456 - protein, 104 aa, Zea Mays
MTHLPLSTRTRKRNLTLRNVTFAIMLMYYYILALLVLSHKWKSWKIERRIKIKELRSQCMYHLICESNVKCINDLRIDRKIFHILCEMLRDVGGLRGTRNAPLE

SEQ ID NO: 224457 - protein, 401 aa, Zea Mays
MTADGKIAASSGHASWISGKASRGRVFELRGRSDAVIVGGNTVRFDDPRLTARHVKGHVPVRIVMSQSLNLPEEANLWNLNDAYTIVATQRGARRDFQRKLAMKGVEVVEFDMLNPRAVMSYCYDRGYLAVLWECGGTLAASAISASVIHKVYAFWAPKIIGGLNAPTPVGELGMSQMTQAINLIDVSYEQIDRDMLMSGFIEPIPDLSPVIPSVEEIPSIDPEVSPYETNIISFYKTWDIFGAFSNFSPHSIQMPDENGDYFTWPTVEHYYQAHKFVGVDNPQARDIVQEIKLAKSPEEAARIGRTRQKGFPELVRTDWESTKIDVMYRAIKCKFSTYPHLTNMLLSTAGSVLVEASPHDLFWGGGREGEGLNYLGRLLMQLRSEILGTVPASAEVGEAD

SEQ ID NO: 224458 - protein, 485 aa, Zea Mays
MEAGAPPRGWRCGVLWLVSVEIVLVLVCTRGAGADSGESKGSFLQDSEAGEKDVYLSHSCIHDEILHQRRRAGRKEYSVMPQVYHESREDAERVRGRHLLGMSSWRAPHENARKPIRIYLNYDAVGHSPDRDCKNVGDIVKLGEPPVSSAPGTPICDPHGDPPLVGDCWYNCTLEDIAGKDKRQRLRKALGQTVEWFRKALAVEPVKGNLRLSGYSACGQDGGVQLPHAYVEDGVANADLVLLVTTRPTTGNTLAWAVACERDQWGRAIAGHVNVAPRHLTAEAETLLSATLIHEVMHVLGFDPHAFTHFRDERKRRRGQVTAQSLDKKLGRMVTRVVLPRVVMHARHHYGAFSQNFTGLELEDGGGRGTSGSHWEKRLLMNEIMTGSVDTRSVVSRMTLALLEDSGWYQANYSMAEHLDWGQNQGTEFVISPCNSWKGAYHCNTTQLSGCTYNREAEGYCPIVNYSGDLPKWAQYFPQANKGCC

SEQ ID NO: 224459 - protein, 615 aa, Zea Mays
MKTGEGKTLVSTLAAYLNALTGKGVHVVTVNDYLAQRDAEWMGRVHRFLGLTVGLIQAGMKSDERRASYRCDITYTNNSELGFDYLRDNLSRNKEQLVMRWPRPFHFAIVDEVDSVLIDEGRNPLLISGEDNRDAVRYPIAAKVAELLMEGVHYTVELKGNNIDLTEDGVAHAEIILGTDDLWDENDPWARFVMNALKAKVFYRRDVQYIVRDGKAIIINELTGRVEPKRRWSDGIHQAVEAKEGLKIQADSVIVAQITYQSLFKLYPKLSGMTGTAKTEEKEFSKMFKMPVIEVPTNLPNIRVDLPIQAFATARGKWQYVRAEVESMFQLGRPVLVGTTSVESSEYLSELLKVHKIPHNVLNARPKYAAREAEIIAQAGRKHAITISTNMAGRGTDIILGGNPKMLAKEIVEDNILPFLTHEPPNIDMEGESTSHKGLSNVELSPSSVGLLAKAAIMSKYIHKSERNEWSLSKAKSTIAESIEMGQMIGMEKLQERMTEESEMYPLCDAIGLAYLSVLRDCEVHCSFEGAAVKRLGGLHVVGTSLHESRRIDNQLRGRAGRQGDPGSTRFMVSLQDEIFQKFNLDTEWAVRLISRITNDEDIAIESNVVVKQVG

SEQ ID NO: 224460 - protein, 343 aa, Zea Mays
MTGTAKTEEKEFSKMFKMPVIEVPTNLPNIRVDLPIQAFATARGKWQYVRAEVESMFQLGRPVLVGTTSVESSEYLSELLKVHKIPHNVLNARPKYAAREAEIIAQAGRKHAITISTNMAGRGTDIILGGNPKMLAKEIVEDNILPFLTHEPPNIDMEGESTSHKGLSNVELSPSSVGLLAKAAIMSKYIHKSERNEWSLSKAKSTIAESIEMGQMIGMEKLQERMTEESEMYPLCDAIGLAYLSVLRDCEVHCSFEGAAVKRLGGLHVVGTSLHESRRIDNQLRGRAGRQGDPGSTRFMVSLQDEIFQKFNLDTEWAVRLISRITNDEDIAIESNVVVKQVG

SEQ ID NO: 224461 - protein, 774 aa, Zea Mays
MAGGGGGSLSSPSASFLSSPTPTPPPRLLRRCSTKSASRDSPILRPKKPPPLFCAAAATPTPAPAAASKSAGSWRDLCSLNAWVVRDYRRLVDSVGALEPALRRLSEEQLKAKTAEFRSRLTRGETLADVQADAFAVVREAARRTLGMRHFDVQIIGGAVLHDGCIAEMKTGEGKTLVSTLAAYLNALTGKGVHVVTVNDYLAQRDAEWMGRVHRFLGLTVGLIQAGMKSDERRASYRCDITYTNNSELGFDYLRDNLSRNKEQLVMRWPRPFHFAIVDEVDSVLIDEGRNPLLISGEDNRDAVRYPIAAKVAELLMEGVHYTVELKGNNIDLTEDGVAHAEIILGTDDLWDENDPWARFVMNALKAKVFYRRDVQYIVRDGKAIIINELTGRVEPKRRWSDGIHQAVEAKEGLKIQADSVIVAQITYQSLFKLYPKLSGMTGTAKTEEKEFSKMFKMPVIEVPTNLPNIRTARGKWQYVRAEVESMFQLGRPVLVGTTSVESSEYLSELLKVHKIPHNVLNARPKYAAREAEIIAQAGRKHAITISTNMAGRGTDIILGGNPKMLAKEIVEDNILPFLTHEPPNIDMEGESTSHKGLSNVELSPSSVGLLAKAAIMSKYIHKSERNEWSLSKAKSTIAESIEMGQMIGMEKLQERMTEESEMYPLCDAIGLAYLSVLRDCEVHCSFEGAAVKRLGGLHVVGTSLHESRRIDNQLRGRAGRQGDPGSTRFMVSLQDEIFQKFNLDTEWAVRLISRITNDEDIAIESNVVVKQVG

SEQ ID NO: 224462 - protein, 783 aa, Zea Mays
MAGGGGGSLSSPSASFLSSPTPTPPPRLLRRCSTKSASRDSPILRPKKPPPLFCAAAATPTPAPAAASKSAGSWRDLCSLNAWVVRDYRRLVDSVGALEPALRRLSEEQLKAKTAEFRSRLTRGETLADVQADAFAVVREAARRTLGMRHFDVQIIGGAVLHDGCIAEMKTGEGKTLVSTLAAYLNALTGKGVHVVTVNDYLAQRDAEWMGRVHRFLGLTVGLIQAGMKSDERRASYRCDITYTNNSELGFDYLRDNLSRNKEQLVMRWPRPFHFAIVDEVDSVLIDEGRNPLLISGEDNRDAVRYPIAAKVAELLMEGVHYTVELKGNNIDLTEDGVAHAEIILGTDDLWDENDPWARFVMNALKAKVFYRRDVQYIVRDGKAIIINELTGRVEPKRRWSDGIHQAVEAKEGLKIQADSVIVAQITYQSLFKLYPKLSGMTGTAKTEEKEFSKMFKMPVIEVPTNLPNIRVDLPIQAFATARGKWQYVRAEVESMFQLGRPVLVGTTSVESSEYLSELLKVHKIPHNVLNARPKYAAREAEIIAQAGRKHAITISTNMAGRGTDIILGGNPKMLAKEIVEDNILPFLTHEPPNIDMEGESTSHKGLSNVELSPSSVGLLAKAAIMSKYIHKSERNEWSLSKAKSTIAESIEMGQMIGMEKLQERMTEESEMYPLCDAIGLAYLSVLRDCEVHCSFEGAAVKRLGGLHVVGTSLHESRRIDNQLRGRAGRQGDPGSTRFMVSLQDEIFQKFNLDTEWAVRLISRITNDEDIAIESNVVVKQVG

SEQ ID NO: 224463 - protein, 455 aa, Zea Mays
MYGDISAKAAHMLGQPAVLDFFAKLIQRVSPKSYQQALAEVQVSQKFLENFCGDQVRFLARSFAVPGNHLGQRSNGYRWPYGPVAIITPFNFPLEIPLLQLMGALYMGNKPVLKVDSKVSIVMEQMIRLLHDCGLPAEDMDFINSDGAVMNKLLLEANPKMTLFTGSSRVAEKLAADLKGRVKLEDAGFDWKILGPDVQEVDYVAWVCDQDAYACSGQKCSAQSVLFMHKNWSSSGLLEKMKKLSERRKLEDLTIGPVLTVSQGRSQPFFGGQLTPVTTEAMIEHMNNLLKIRGSKVLFGGEPLANHSIPKIYGAMKPTAVFVPLEEILKSGNFELVTKEIFGPFQVVTEYSEDQLELVLEACERMNAHLTAAVVSNDPLFLQDVLGRSVNGTTYAGIRARTTGAPQNHWFGPAGDPRGAGIGTPEAIKLVWSCHREVIYDVGPVPESWALPSAT

SEQ ID NO: 224464 - protein, 77 aa, Zea Mays
MLAARRLSAATSPLLLRRLSAQTHPTASSAQPPPEVTDSGPGAWAGRAVTLSLLGLTGAVAASAVSDLSVFLSCSRQ

SEQ ID NO: 224465 - protein, 397 aa, Zea Mays
MRMPRTDPSPCRLPPALPLASPSSGRYISKRERALLASSGAHIESGSSLPLTRVDFESAVGSITYPNLRADILHSLRCQPKPGPSTSFPLRLSVCLKGHTKAINCVDWSPTHGHLLASAGMDHTVHVWNVWDKGNTTARVLKHHTAAVKDVRWSLHRPFLLSGGLDCSLQLVDVVEGKVMEVFKEDQAVEVIKFNPSNPDLFLSGGSKGSLKLWDIRCGLVTKEFQRSLGTILDIDFSADGRQFISSTDTTRSNISENTIIVWDVLRQVPLSNQVYTEAFTCPCVRYHPREASFVAQSNGNYIAIFSARPPFKLNKYTRFEGHGVWGFPVKCSFSLGGRELASGSSDGSIYFYDYRSARLLRKIEAFKEACTDVAYHPVMPNVIAACSWAGEISVFE

SEQ ID NO: 224466 - protein, 150 aa, Zea Mays
MGSEGSSGPVVVPRNFRLLEELERGEKGIGDGTVSYGMDDADDIYMRSWTGTIIGPPNTVHEGRIYQLKLFCDTDYPDKPPTVRFQTRINMTCVNQETGLVEPSLFPMLGKWEREHTMEDILSSLKREMSTPQNRRLYQPHEVDNFFLSP

SEQ ID NO: 224467 - protein, 205 aa, Zea Mays
MVTVGRRRGFVTFAAAAIALMQISYLLFPISAQQSNGSRVVPAEGYCSMYGICAQRSDGKVLNCANATKAVKPDTLFSSRIQSLCPTITGDVCCTVDQFDTLHQQVQQAVPFLVGCPACLRNFLNLFCEMSCSPNQSLFINVTSVKQINSTMTVDGIDYYVTTNYGEELYNSCKDVKFGTLNTRAMDFIGAGAKTYKVDVIKHFS

SEQ ID NO: 224468 - protein, 892 aa, Zea Mays
MSTMLPSSRSRSGPNESPVSRGRPSTPSSNHRPSTPSSNHRPSTPGGTRRSSVGTPSTPRSRSNGAGPFKSEPNSPPSAAAQKPRLSFDRSPRSGDTKPVVERRVPKIGTTPEKHLRREAELQARLESAQEDLKKAKDQLAFILGERDRLVGELNEAKRVADETHEKLQDALMAKRWAEEATEIEKFRADELEQAGIDEAQRREDEWQREIECVRGQHAADLESLVNTTEEVERLRRDLSMANEAKKAALGHADDAMKIAEVNAEKVEILSNEVVRLKGLLDSSAASEESKSREAELLVKNLESEVSSLKGKLEEAKVLEDRLADAEKMIEELKSEIANAQKVEEDIRQQLEEWKQKSVSLEMKLEEVTLSEKFKSDSLVSTTEELYKIQSILQDRESEIEVLKGKTTALEIEVTRLLADVTDSNEHLDASQQEVFGLQTTIDVLKNKLEAAELAASEALDNERTATTKIEVLTEEKTNLISELDDARDREEREKRAIEDLTAALDKVTGEAQEAHDRCQKKEDDYEHALAQIGDLKMALKSMEETYEVMLDESEQDITGLRETVEKLEAEVSKYREECESKELDLITATKQSEQEIAALKEEAEHVCASLRGAEQELEAVNEEKERLEGKLARTESAVAEANDAVQEAKAENERLQEKLTYTESAVAEANKTVQEAKAESSQLKERLLDKENALQSITQENDEFRMREADAMKKIEELSALLAEAMTKKHPEEEEKLVVVDEAHNSGREAIRSVAENEDTEETDHKKPKLEADAVDTNSNGEPKHDEKDDSKVEEEELKTELSLQESDRASSEKEAQSENRRQETEPSNDELDPKKDSSTESANGTAVPEDTAATTTKAATSPTKPQQPQQKKNKPLLKKFGSLLKKKNSK

SEQ ID NO: 224469 - protein, 834 aa, Zea Mays
MAASPDQFRGHARLPHFAAPLRYDLRLRPDLAACTFTGAAAIAVVVSAPTRFLVLNAAELDVDRASIRFQDLAPTDVAQFDEDEIMVISFDRELPFGEGVLTMDFTGTLNDQMRGFYRSKYVYNGESRNMAVTQFEAADARRCFPCWDDPAFKAKFKLTLEVPSDLVALSNMPVAKETVSGLTKTIYYEESPLMSTYLVAIVVGIFDYIESSTSEGTKVRVYTQVGKTNQGKFALDVAVKSLDLYKDYFATPYPLPKLDMIAIPDFSAGAMENYGLVTYRDTALLYDELLSSASNKQQVAITVAHELAHQWFGNLVTMEWWTHLWLNEGFASWVSYLAVESLFPEWNNWTQFLDETTSGLRLDALAESHPIEVEVNHASEIDAIFDSISYDKGASVIRMLQSYLGAECFQKALASYIKKYAYSNAKTEDLWVVLEEESGEPVKDLMTTWTKQQGYPVIYAKINGHDLELEQAQFLSDGSSGPGMWIVPVTACCGSYDAQKKFLLKDKMDKINIKEFSDSQSADGEKNQIIWIKLNIDQTGFYRVKYDDELAAGLVNAIKAKKLSLMDKIGIVEDSYALSVACKQTLTSLLRLLNAYNDESDYTVLSHVTSVCLSISKITVDATPDLNKDIKQLLINLLLPAVIKLGWDPKDGESHLDVMLRSLLLTALVRLGHNETINEGVRRFHIFFEDGKTSLLPPDTRKAAYLAVMRTVSTSSRSGFDALLKIYREASEPQEKSRVLGSLSSSPDQDIVLEALNFMFTDEVRNQDSFYILGGISLEGREIAWTWLKENWDHVLKTWKSSSLISDFIESIVPRLSRLPSSLLAKLSHHSREH

SEQ ID NO: 224470 - protein, 559 aa, Zea Mays
MEWWTHLWLNEGFASWVSYLAVESLFPEWNNWTQFLDETTSGLRLDALAESHPIEVEVNHASEIDAIFDSISYDKGASVIRMLQSYLGAECFQKALASYIKKYAYSNAKTEDLWVVLEEESGEPVKDLMTTWTKQQGYPVIYAKINGHDLELEQAQFLSDGSSGPGMWIVPVTACCGSYDAQKKFLLKDKMDKINIKEFSDSQSADGEKNQIIWIKLNIDQTGFYRVKYDDELAAGLVNAIKAKKLSLMDKIGIVEDSYALSVACKQTLTSLLRLLNAYNDESDYTVLSHVTSVCLSISKITVDATPDLNKDIKQLLINLLLPAVIKLGWDPKDGESHLDVMLRSLLLTALVRLGHNETINEGVRRFHIFFEDGKTSLLPPDTRKAAYLAVMRTVSTSSRSGFDALLKIYREASEPQEKSRVLGSLSSSPDQDIVLEALNFMFTDEVRNQDSFYILGGISLEGREIAWTWLKENWDHVLKTWKSSSLISDFIESIVPRFTSEEKAVEVTEFFAGQVKPSFERALKQSLERVRISARWIESIRSEPKLGQTVQELLQADA

SEQ ID NO: 224471 - protein, 533 aa, Zea Mays
MEWWTHLWLNEGFASWVSYLAVESLFPEWNNWTQFLDETTSGLRLDALAESHPIEVEVNHASEIDAIFDSISYDKGASVIRMLQSYLGAECFQESGEPVKDLMTTWTKQQGYPVIYAKINGHDLELEQAQFLSDGSSGPGMWIVPVTACCGSYDAQKKFLLKDKMDKINIKEFSDSQSADGEKNQIIWIKLNIDQTGFYRVKYDDELAAGLVNAIKAKKLSLMDKIGIVEDSYALSVACKQTLTSLLRLLNAYNDESDYTVLSHVTSVCLSISKITVDATPDLNKDIKQLLINLLLPAVIKLGWDPKDGESHLDVMLRSLLLTALVRLGHNETINEGVRRFHIFFEDGKTSLLPPDTRKAAYLAVMRTVSTSSRSGFDALLKIYREASEPQEKSRVLGSLSSSPDQDIVLEALNFMFTDEVRNQDSFYILGGISLEGREIAWTWLKENWDHVLKTWKSSSLISDFIESIVPRFTSEEKAVEVTEFFAGQVKPSFERALKQSLERVRISARWIESIRSEPKLGQTVQELLQADA

SEQ ID NO: 224472 - protein, 551 aa, Zea Mays
MAEIEVVSEGGRRDEDEERRRQQQQGAGEPDPVVDVYSAAAYGDLERLRGFVEQGGAATALREPDGNGYHALQWAALNNYPHVALYIVEHGGDVNATDHARQTALHWAAVRGSTSVADVLMEHGARVEAADVNGFRAVHVASQYGQTAFLHHIISKYGADFDALDIDGRSALHWAAYKGNADTIRLLLFMDANQVRQDKNGCTPLHWAAIRGNLEVCTVLVHTGTKEELTLKDSGGLTPVQLAAEKGHRHLSNVLSNATKVSFEDKFFPGKSRKIGYAPFLFAYLVICLILFLNSIVFAPNFSRITATAGLWSWAAVSLFFASQVMFYRVSRKNPGYIKANSKRIDPKEPLMEIDLTNSSTWTGNWSQLCPTCKIIRPMRSKHCPTCKHCVEQFDHHCPWISNCVGKRNKWDFFVFLWMGIATSFLGAAVGFHRLQTEPVILSSSESWIHFMVTKHPGAVLFMFLDVFLLTGALILTGAQAVQHGTSQLMRQQIDLVTHIFEGLMGVSEILTVEVARGTALIFLSVDTAMTRRSHGQHFNKQYSEDRCTGS

SEQ ID NO: 224473 - protein, 110 aa, Zea Mays
MEVGRAPRRRVSPAAAAAAVPSLLLFAVLFGAGRRRSATCKAPARRRCTSTRRSSTAMATASSPSRRRTARFGHSGLDSACPASALPSSMAPLVASADLKMQRHRSWIST

SEQ ID NO: 224474 - protein, 116 aa, Zea Mays
MVYYALLVGAELDGLTNLQPSGGCDDPSFPYYLKLKCENCGEVTAKSTYVTLSEQVDLPKGHGTAHLVQKCKLCGRDGTIVMIPGQGTPLTIEQSQKEEKTCLMVFDCRGYEPVHG

SEQ ID NO: 224475 - protein, 643 aa, Zea Mays
MDQQRKSSLRSYGSNASSQSGSFDFNHDQDTERAGQPGGDDRREVVVKIDAEPHSPVSLHAAGGVSGHSSAASTPRAGGAAVRILAPSASGSSASTSSVGGDASGSGESFSFRKRPPQSPAGGDSGEDPPSRLIGSFLRKQAAAGGELSLDPDFEVEEMRRPPRAPTSVNASRELRVSFQDPRKRMSPSTSSASSSSYGAGGDSRNQSTIDVDAAEVLRCTSTSTGSSLLARSRTRSRLMDPPPPSTSSSAPANEGDPRKSFVSKGLPPKSGQLRSGLIGKSGLIGKSGPIGKTGAFDDEDDDPFMDEGMTSDFKRDTMDCLLIMEWVSLVVIVGALICSVTIPSLSVKKLSGLHLWKWELLVFVLICGRLVSGWVIRIAVFFVERNFLLRKKVLYFVYGVRRAVRNVLWLGVALVSWHLLFDKAAKRETHTLVLPYVTKVLCCLLVATVIRLVKTLLLKVLASSFHVSSYFDRIQEALFNQYVIETLSGPPLVDESRMMAEVQRLQSAGASIPSELEATAMPGKSRPLPKSGRLTTVASKRGGGGAAAASKQLHRQKTERHLDDGISIDQLHKLSQKNISAWSMKRLMKIVRYGALTTMDEQLKHATGEDELATEIHSEYEAKVAAKRIFQNVAKPGSKKKL

SEQ ID NO: 224476 - protein, 120 aa, Zea Mays
MEAASNQEPGRCGGDDDEAKRREAELASSRLLDPGFKPSKLSQDRLDKFKELHKKRLQITEKPKYKRKPKVLQEMCIICHQLQEFKGILHQACPRGTKGNYIGGLTLKNDGKERQTCKNI

SEQ ID NO: 224477 - protein, 289 aa, Zea Mays
MAPEERMKTEASHKAIAAGGGKMTVLHSPVGVRSIVTSLVAFFILASSIVFLLDRGQEEQVQVAVEHGRQEVQVKLESGLQEPAIRGTTQEGDASNEECNWSRGRWVYDNVSRPLYSGLKCSFIFPEVACDKYGRKDAMYQHWRWQPHGHGCDLPRFDAIKLLENLRNKRMVFVGDSVNRNQWVSLVCMVEASIPDDRLKIRTFNGSLISFKALEYNATIDFYWSPLLVESNSDNPIIHRVEYRIIRADRIEKHASVWRDADIIVFNSYLWWRKQKDDMRMKVWFIRRW

SEQ ID NO: 224478 - protein, 186 aa, Zea Mays
MFSRRRGAAREPPEKPRRRQRTPSASLRRPPNRSRRRRAEENPEPQPSSPHSNSSTRSLPHPPPRQLQSSSALHHNQAHLPPPHFFSSNRPVGSQRRGMASGGAVRDVGSPAELEAAVAGARAVAVHFWASWCEASKQMDEVFAHLAVDFPHAAFLRVEAEEQPEISEAYGVTAVPYFVFCKDFEP

SEQ ID NO: 224479 - protein, 181 aa, Zea Mays
MHGCGHDAHVAMLLGSAKILQEHRDELKGTVVLVFQPAEEGGGGAKKMIEDRAVENIDAIFGLHIADSVPIGVLASRPGPIMAGSGFFEAVISGKGGHAALPHHTIDPILAASNVIVSLQQLVSREADPLDSQVVTVGKFQGGGAFNVIPDSVTIGGTFRAFLKESFNQLKQRIEECGLSC

SEQ ID NO: 224480 - protein, 241 aa, Zea Mays
MAATAILPGLGTQVLIRTVHPMYPTPACVAPRSPGRLAARGGPGARVDGVGDLLPLRPAEAPTVEVEVARAPGVDERGRLALAPAVLPVRQVRVRRQLPVLRSSSQISPRHDDAAEKARNSKVQHATQLSSREREEARRSGSFHAPRLRPLVSAPMVPSLLAAMSTSPFLASSGSSRRPLGAAHTRRAGLRVAALKYDPAKVAPQNDRVLVRLEQIPEVSPLSIVSPLQYAWIETDTSVAV

SEQ ID NO: 224481 - protein, 390 aa, Zea Mays
MSAATTGPAPSVATPMAPPPSYPASSTASSSISASAEEEEDLYGRLKSLQRHMEFVEIQEEYVKDEQKNLKRELLRAQEEVKRIQSVPLVIGQFMEMVDGNNGIVGSTTGSNYYVRILSTINRELLKPSASVALHRHSNALVDVLPPEADSSISLLGSSEKPNVTYNDIGGCDIQKQEIREAVELPLTHHELYKQIGIDPPRGVLLYGPPGTGKTMLAKAVAHHTTAAFIRVVGSEFVQKYLGEGPRMVRDVFRLAKENAPAIIFIDEVDAIATARFDAQTGADREVQRILMELLNQMDGFDQTVNVKVIMATNRADTLDPALLRPGRLDRKIEFPLPDRRQKRLVFQVCTAKMNLSDEVDLEDYVSRPDKISAADIIEFKCGVKDYRFK

SEQ ID NO: 224482 - protein, 491 aa, Zea Mays
MPLLLRGASLLRLCQCTSGLSSVKFSSRVTVLVNLNAMRDGMRATYSRRAASKNSEVKKDEQPVTEKVSRAASKNSEVKKDEQPLTEKEDAAETDLEVERGRSSSPSQLQSMTVKELRELTRRRGISVKGTKKDLVSALMNSMAVEANGEGGKSSVELVSPLEVPLKRKGGASVVVEQKLESSEIISETPNKKSRTKQKSSKNTTREEISVTNVKLSKTVVQKETVAGLSPDDDSEPWTILVHKKPQASWIPYNPRTMRPPPLSKDTRALKIMSWNVNGLKALLKSRGFSVQQLAQREDFDVLCLQETKMQEKDIEVIKDTLLDGYTNSFWTCSVSKLGYSGTAIISRVKPLSIKYGLGISDHDTEGRVVTVEFDDFYLLTAYVPNSGDGLKRLTYRVTEWDPSLGNYMKELEKSKPVILTGDLNCAHQEIDIHDPAGNRRSAGFTNEERESFGTNFLSKGFVDTFRKQHPNVVAYSYWGYRHNARKTNKA

SEQ ID NO: 224483 - protein, 225 aa, Zea Mays
MSGLLNSNLNSSASNLSDSAGRPFTASFSGQSGSIPGFHHSGLHNTHGSYNLPSMPGSLAQRNAAMSGLPSSGVQQPGGSIPGRFPSNNLPVGMPQIPHAHSGVSGRGMNFGAGPAFSSSMNIGGNIQGLSSGLGSGGNRNSVHGMPVSSSIGNSGQRISSVGNMVSASNIGRNIGTGGLSVPSIASRINLNGSGGSGSLNVQGSSRMMNGLLHQQALRMKQSTS

SEQ ID NO: 224484 - protein, 197 aa, Zea Mays
MSGLLNSNLNSSASNLSDSAGRPFTASFSGQSGSIPGFHHSGLHNTHGSYNLPSMPGSLAQRNAAMSGLPSSGVQQPGGSIPGRFPSNNLPVGMPQIPHAHSGVSGRGMNFGAGPAFSSSMNIGGNIQGLSSGLGSGGNRNSVHGMPVSSSIGNSGQRISSVGNMVSASNIGRNIGTGGLSVPSIASRINLNGSGRW

SEQ ID NO: 224485 - protein, 121 aa, Zea Mays
MPRDLSRSRSPPRRRWRSPSPARYRGRRGRRDRSPSPIRSRRRSPLPSPRRHKSRSPSPRRRKSPSPSQKRYRRKRSPSVTSSPVAASQSSHLGLAENKNVIDTQRLEEEKKRLYRRELLL

SEQ ID NO: 224486 - protein, 72 aa, Zea Mays
MNRSLFWHKSQLENNLLGHVWFDTFQAAHWPGSPKSEAWERCLSEAASVMSQPNSPLIRKWKQVGFSNQFGS

SEQ ID NO: 224487 - protein, 504 aa, Zea Mays
MGAEGEGAVEEATGFEVCIVLPKLSRAAATGPTEDCVARLVRELEGAGLLVERVRGVPAEFIKLAAPMGTLGRAAADMQMKKLTYIGMELQFQWDQVAAFVRQPDGSLFSWRERYCCFRYLIYGIVNKTNSEIAIKFDGKEFHWKQSESLLTMLEAEGVVKRIFPLHDEIKRKQLLRNWALNWLDFTWQPIDEIYSYFGTKIATYFAFLGMYTRWLFFPAVFGLTTQLIDFGSLQWLVLPAFFIFVISWAVFFLQFWKRKNSALLARWGINCSLSEYKNLGIELSSLSDSLTVEEKKFCDVSAEKSKLQRNEWFGVLLRIRNNAIIVLAIICLQLPFELAYAHLYEITETEAMKYLLTAVYLVAIQYYTRIGGKVSVNLIKYENNQGEESSSASLVYKVFGLYFMQSYIGLFYHASLYRDILALRQVLIQRLIVSQVLENLIENSIPYLKYSYKKYIAVHKKKHEKESPVGRSVRLSTRVEKEYLKPSYTASIGAELEDGLFDV

SEQ ID NO: 224488 - protein, 133 aa, Zea Mays
MDHHIKELLLQWKKTVILLCCIRSKKGYLYDILTKATVVKKKVPVLIFCNKTDKVTAHSKEFIKKQLEKELNKLRESRNAVSSADISDEVQLGVPGEAFNFSQCQNKVAVAEGAGLTGDVSAVEQFIREHVKA

SEQ ID NO: 224489 - protein, 509 aa, Zea Mays
MAFRRILSTAVRRRSAVAAAAAGNAREASTAVAAAPGVLAPDATAVRAPVMPYDRIADAVNARLRRLEHPDPRFLRYASPVPSHADHMAILAAPETRVTTLPNGLRIATESSLAARTATVGVWIDAGSRYENEEAVGVAHFVEHMLFKGTGKRSAAQLELEIEDMGGHLNAYTSREQTTYYAKVLDKDVPRAMEVLSDILQNSNLDQARIEREREVILREMGEVEGQSEEVIFDHLHATAFQYTSLGRPILGSAENVKSITKEDLENYIATHYTAPRMVITAAGNVKHEDIVEQAKKLFNKLSTDPTTTNMLVAKQPASFTGSEVRIIDDDMPLAQFAVAFNGASWVDPDSVALMVMQSMLGSWNKSAGGGKHMGSELVQKAAINDIAESADCLDDLAFAIMHEMSKLSYRVTEEDVIRARNQLKSSIQLHLDGSTAVVEDIGRQLLTYGRRIPTPELFARIDAVDASTVKRVANRFIFDQDVAIAAMGPIQGLPDYNWFRRRTYMLRY

SEQ ID NO: 224490 - protein, 398 aa, Zea Mays
MYALLNGGQDGLGTVNTHGTGNKESRFSFARQDNQGNLLDSSLRNCGTGTEQNFSLLPQNSRGNIYQNGLAFQSLENDFSNSNSLGVLDMLTTGTSRSKISAPPGFSAPARVPPPGFSTALPSQEFPSGISSHDGSIALPRFPWAFSSQISAQELSKPPSRLPSPFSSGFSSLDGPNSSSRFPSAFPSGFSSQNGPNPSSGFPFSSGFSSQDGSNQSYGSTNPENLLRNTVLGGSSNHYQSQFGRHSSDMEFDDPAILAVGKGLMPGIGDSGLEMKNTPAFQAQLQPASSDPRFHLHIQPNVQSHQNMGFADHMQDGLNHMNDNRFLGQNHGPLSPYVQIPQQPRNSQVTNGHWDGWSDSRQGNSTPMSDMSRILYPSEVNKLHMLGSNDIYNRAFGM

SEQ ID NO: 224491 - protein, 663 aa, Zea Mays
MAEKHDCLYLHDVGSQEDSFTKDEIISAYTRTRVPQMASSVSQRRTGNMLPPPGDDFSYSAVVSAKHTFKNATLNTTNQPRPSPPNSSSGRSTLPPAASWGQRDVNARTTATGVTSSQSHTKPKSESQSNPFSSSSVISSTKTPSSWNDDTSTAAKMSEGQQVSEKESKTLQLYKPGISMATQATSSLELSLNIDFSTIPSAWNDDEIVVSDGMSKGSDENQVANENGELTHPASKPLVLSKKDITMKSTSTSKSPPNIVSSLAISKSDVNTSDGDHSLTNISLTSNAVVCQSNHVAGAKILEDIRSRDTDMEKLSVHISSVKLGGNDEIQIMAGNQRPDVMPCTSVDAPMNQNFDRDQSHLNLNEPLLPSENKDTVLSCQYSSDKRLDWSSEMQNGSVTPSNNIVDSTMLTGKLHSILLDVSEQPSYARFPSSLDTSLCNDTESNTAATIDTTISHMQTEFSSINNMYALLNGGQDGLGTVNTHGNVSEQHPGMGNHQCRAMGSVRTEAMGSVRTDSIGSFEKTISINKDESRIISDMLSSEFNPWDDSYSTANNFVRMLRESENNDVHFAVPSWKSGTGNKESRFSFARQDNQGNLLDSSLRNCGTGTEQNFSLLPQNSRGNIYQNGLAFQSLENDFSNSNSLGVLDMLTTGSFSCMICEA

SEQ ID NO: 224492 - protein, 292 aa, Zea Mays
MSAAADDRARRAAAFRPAPLPPPAQKQQLSGVAAAVLDAGGRLGRAVGDVFRRLRIDDTFYSGGGGGGGGAPNRSWRDAGNNGGRPAAAGAPAAASREEATGGGASSGRFARAQGSMNLSATYDSRTHDVESSVVARGDLWRAEASHSSSSSAGAGGNGANNNLFLVQLGPVLFVRDTTLLFPVHLSKRHLIWYGFERKNGVHSVCPAYWSAHKRWFFMSMLCLNPFAFSFMDMQFPNGQLRYVAGDGFTARAFLPLRGGVLQAHGKFPGEKRLSFSFKEWRQRRPDGSVAG

SEQ ID NO: 224493 - protein, 252 aa, Zea Mays
MITAAPALPMFLRLCPASPFLLRPSLHVPSSRRPTPSRLSSFRPARPLFPISAVEKTNEAAAAGEGELEGMPPEFYDEEWQARQRERTKEWHAYRQKEEAEEERITNEYREIGMRLKAYPQEEVRKARILVSSFIRAGGDVEEEIEKAAERGELTELVLMVIWNRLDIARRDDERDAIRSLDLLYRRVETEILKSEATPAMRLLNDLLNLHDGGDNEKWLKKCRKRMLEVFPREDPFTVVFPAGFNMENKYI

SEQ ID NO: 224494 - protein, 93 aa, Zea Mays
MAAAGWLRRAAAVSLPRLPSGLPLIPPPPSGPLTEAQSLVVPGLGAAAGPAMELMAVPKKKVSKYKKGLRNGPKALKPVPVIVRCRVILILFN

SEQ ID NO: 224495 - protein, 111 aa, Zea Mays
MSSMESRPGRTNLVEPIGHGAALPSGGQAVQPWWTSSGAVLGAVSPAVVAVAPGSGTGISLSSSPAGGSGGGGAAKGAASDESSEDSRRSGEPKGSFSATWTNSISNAITS

SEQ ID NO: 224496 - protein, 66 aa, Zea Mays
MSSGTSSGSSRWVQSSRSEDDLDLQAQMERRRKRRKESNRESARRSRQRKQEHLDDLTSQVKKQNI

SEQ ID NO: 224497 - protein, 92 aa, Zea Mays
MAAATGYSDAPTDEQLLAYAELPKHGRDMAEVFAVRIPATVGGNLPPRGSIVFYGGHCCSDFIYSWSPLEEEEDTSKQICDSQAGQQVIHFL

SEQ ID NO: 224498 - protein, 183 aa, Zea Mays
MAAATGYSDAPTDEQLLAYAELPKHGRDMAEVFAVRIPATVGGNLPPRGSIVFYGGHCCSDFIYSWSPLEEEEDTSKQICDSQSYMSVQSKVVALGALIFFLVSYGSCTGGWTPSAGCRGPSRCASLTSPARHWWLTRSSRQTGRPTATTAPTSSTRLLALLLDRLLALLLDWSLALLLDCTR

SEQ ID NO: 224499 - protein, 98 aa, Zea Mays
MSVQSKVVALGALIFFLVSYGSCTGGWTPSAGCRGPSRCASLTSPARHWWLTRSSRQTGRPTATTAPTSSTRLLALLLDRLLALLLDWSLALLLDCTR

SEQ ID NO: 224500 - protein, 220 aa, Zea Mays
MVAQHQPMPNGGWWRTGPIYGRSMVAPAGAERSGGGGANAGGAERLIVDAACQLAAHDHDVHVFTSHHDKKRCFEETLSGLFPVTVHGDFLPRHVFYRFHAVCAYLRCIFVALCVLLRWPFFDVILVDQVSVVIPLLKLMASSKIIFYCHFPDLLLAQHTTMLRRLYRKPIDMIEESTTASSLQQLLQGPFLVYMLEESSLVFFIQLSLLSSFTNPMLIS

SEQ ID NO: 224501 - protein, 780 aa, Zea Mays
MASHQRGGGRDQANPNVFQGNRRNGNKSGGRGSGRGGGRGGQGGGRGGYAYGYQGGSDYGRGRGHGGPQTPGPDDVRQAEAGPSLAERNAAAAAAALREKFKTMDIVRDEPMFPARPGLGAVGTPCGVRANHFFVGLVDKGLHQYDVTISPDTTPKGMYREIMSKLVSENRQTELGGRLPAYDGRKLLFSAGELPFETMEFVVTLSGRTERMYKVVIKHTTGISLQQLFMLLAGYPSDIPAQALQVLDIVLRDIILNERNSMEYVAVGRSFFSPRGPRDIGMGVEGWTGFYQSIRPTQNGLSVIIDISSTAFIRPLPLIDYVMLILGKDRRTFTSITPMDLVLLNKALKGLRIEVTHRGAARPKYRIASLKNSPSLQFFQSSAGVEKSVADYFRETYQLEMDYDFLPCLQVGNDQRPNYLPMEVCRIVAGQKNRKKLDAKQVSNLANLTCQSPDTREKKIRQFVERNAYSRAERAIEFGMEVDYCPTSVQARVLPAPTLKYRETERECLCYPTDGLWNMKNKLVVDGARVGNWACVNFCRGLNDSVVDKFCSDLVTWCRTSGVRMDGLTLPIYRAQPEQVEDELTRFYQNMLVRGQKIDLLLAILPEKNGSLYGNFKRICDTQIGVMSQCCLDKNIRNAKLPYFANVAIKINAKFGGRNLEFANPEESLPFFSTEPTIMFGADVTHPAALDDTSPSIASVVASQDWPKVANYNGIIRAQGHRQELIDGLENIVKELLLAFVERSKQRPKQLIFYRDGVSESQFKQVLEQEIHEIEKVETI

SEQ ID NO: 224502 - protein, 260 aa, Zea Mays
MAAQGSLVMWRAVFAALGLLMVATLVYTLATDGSPFRLELFTPWMVATLADFYVNVIAISAWVIYKEANWVSSAVWVVLLFCFGSAVTCAYIVKKLLEVTSAGSSQDPLDLLFIRQGNLSQRKCSYVVIGRVIFSILGIFMAAVVTYTVITDGLPFRKELLTPWMAATLIDFYINVFAISVWVAHKESSWISTTIWIVLLICFGSITTCGYIVIQLFKVSYQDPIYHVLLNSHSNLAGNIKMFLLSICKVPQLRGQEDSN

SEQ ID NO: 224503 - protein, 245 aa, Zea Mays
MARGGGDRSREDDPFSDGGTTGTDSDESSPRGVGARGPGSTSNPILTRLAVSRNPSPLAAATAAPGVCLLRFAWESAAGSLVGAAVGYGFMAHRCEVTCGCGAISMTSGKGLVTMKGIKGSFADAASSAKIFAVLAGVQSLVACSLRKLRGKDDGINAGVAGCCTGLALSFPGAPQTLIQSCLTFGTFSYIIEKLNKQQPALALPPATGVMDPKAGQSVLPPFTLPPLDAMDEFCSVLVVLMILP

SEQ ID NO: 224504 - protein, 417 aa, Zea Mays
MQASWASVLMIHMGLKPLEDFSILQAGELMYFFWKMDPEDSSDFEEEDDEEEDDDLMIFILPALYLASTGIGTLDQTSMVSDGTAIETPSQVSKFNDAERICKVLEDDRGQGYDKLRVEPHVLLELSRYLRSNDLLKNTRGVSVEEKIGMFIYMLSRNASFQKLSDRFKYSTETIHRHIKACFDAVTPMTGEFVRPPSIQAHRKISSDTRYGPYFENCIGAIDGIHVPMTISDSEAAPYRNRQESLSQNVMLACDFDLNFVHVSCSREGSASDAAVLYSAIEYGFEVPRGKFYLVDGGYANTPSFLAPFSEVSYHAEEQDESNFQPIDYRELFNLRHAQLYRHIKRAVGLLKMRFPILNVATSYRKDTQLKIPSAAVVMHNIIQRQGAFNSECDMGNALRDGIALRMWADYESSMYV

SEQ ID NO: 224505 - protein, 356 aa, Zea Mays
MDPEDSSDFEEEDDEEEDDDLMIFILPALYLASTGIGTLDQTSMVSDGTAIETPSQVSKFNDAERICKVLEDDRGQGYDKLRVEPHVLLELSRYLRSNDLLKNTRGVSVEEKIGMFIYMLSRNASFQKLSDRFKYSTETIHRHIKACFDAVTPMTGEFVRPPSIQAHRKISSDTRYGPYFENCIGAIDGIHVPMTISDSEAAPYRNRQESLSQNVMLACDFDLNFVHVSCSREGSASDAAVLYSAIEYGFEVPRGKFYLVDGGYANTPSFLAPFSEVSYHAEEQDESNFQPIDYRELFNLRHAQLYRHIKRAVGLLKMRFPILNVATSYRKDTQLKIPSAAVVMHNIIQRQGGEAY

SEQ ID NO: 224506 - protein, 169 aa, Zea Mays
MAASAGESQGVERLLSYAEDLVAVLCVSTDCDDNAQVGAGVQRLLSACRSESDDLEMQLKEYQEKIHSCKEKIDKAKAETITDDELNALQSKMEEKLQEEKQLRQELRVLHDELDDLESQRLSIKERKDAVKKKKKDTQKAERTLSMCLSVTNIIPNLEDQDKVSGCIL

SEQ ID NO: 224507 - protein, 430 aa, Zea Mays
MEWLDEYEKLVVRMNTPRVVIDNAVCPTATLVDSARKRGLLLEAVQVLADLDLSINKAYISSDGRWFMDVFHVTDRLGRKLTDDSVITYIQQSLGTWNEPARPAALEGLTALELTGPDRTGLLSEVFAVLADLQCGVVDARAWTHRGRLACVAFLRGEGDADRVARILARLGHLVRGDGEAPGAVAAVPAAAVAHVDRRLHQLMAADHNNSATPYPAAAVSVQSWAERGYSVVTVQCRDRPKLLFDVVCALHCLDYVVFHGTVDTAAGDRARQEFYICSADGSPIRSEAERERLAQCLQAAIDRRSLEGVRLELCTPDRPGLLSEVTRTFRENGLLVAHAEVSTKGGLASNVFYVTDADGKAAGQSAIEAVRARVGADCLVVGEEPRPPRVFPEAGPGDRDHGGGGLGLVYLGNLVKRNLYNLGLIKSCS

SEQ ID NO: 224508 - protein, 248 aa, Zea Mays
MLSLLVVAPLLEVPTIIHTSVLEKVLEYTIGGSAVARGISPNLALFFGGQDSLPWILARHQLPWFGIIIDPCAAALVCVVTVLLCMGIKESSFAQGVVTVLNAFVMIFVIVAGSYIGFQIGWVGYKDSDGYFPYGVNGMLAGSATVFFAYIGFDTVASTAEEVRNPQRDLPLGIGVALAICCALYMAVSVVIVGLVPYFAMDPDTPISSAFAKHGMQWAMYVVTTGAVLALCSNLMGSLLPQVYSDKT

SEQ ID NO: 224509 - protein, 202 aa, Zea Mays
MTPQRSPMGTGGGGSSGGGGGGPPALHYLSGPYGDTTFTKVFVGGLAWETRSEGLRAHFEVYGDILEAVVITDRATGRSKGYGFVTFRDPESARMACMDPYPVIDGRRANCNLAILGRPGPAVPFAPTRPVIPYNGGVAVPGGMYVQSPTYQQSPYNYSQAFVYPYGPSAYGPEYLYQQLCRMHTVHMLDNSTCRFTVAQGQ

SEQ ID NO: 224510 - protein, 359 aa, Zea Mays
MRAVAAAASPPLRALLLLSRHPRRAGFTNWPSLPRGQNAGPTAPPAATAPKPAAPSRRQGRGLTASLPRQVARISTPHLRPPATPPRCPDRRHQSHGVRALAGCPRKTVRHLPAPTSHLRFTMNPSSSSSSSGGYHSRAAAFASPQPRGGGGRRRGGGRGQDGSDRIDALGRLLTRVLRHMAAELRLDMRTDGYVRVRDLLKLNLQTFAKVPLKSHTVDEIREAVRRDNKQRFSLLEEDGELLIRANQGHTVTTVTSESLLKPILSPDEVSVCVHGTYRKNLDSILQSGLKRMARLHVHFSSGLPSDGEVISGLLLWWVSWVLDSGCTNHMTGEKDMFHTLQLTQEAQEIVFGDSGKSK

SEQ ID NO: 224511 - protein, 1492 aa, Zea Mays
MVKQNDSSPISRKNGRFSPDSPGYGTKASLGSDGSPQQINGSVTDSGDGSKTQYPVEFGANIWCPPPPEDEGDDIESRLFGFQDEDDEAGDSSGLLVSGSFSANKIAAIDEVTNTAQEECLKTAVLGHFRALVAQLLKAEGIDMGKDDGSKGWLDIVSSLTWQAASYVRPDTKKGGSMDPTDYVKVKCIASGDPRDSNFVRGVVCSKNVKHKRMVSEHRNAKLLILGGALEYHRVPNKLASIGRILEQEKEHMKMIVGKIESRRPNVVLVEKTVSSSAQELFSKDISLVLNVKRTLLDRVSRCTGAQIASSADSIASVRLGQCEAFKVQKVTEFPSAKQTNRRSSKTLMFFEGCPWRLGCTVLLRGSCREELKRIKRAVQLAVFAAYHLSLETSFFADEGATLPKLPSRHVVVDPDTRNCTNSNSAALTNVGMPHGRKSEHDKLSQTAMVNIMFENTPVSPSSLPSNGEGHMFVGACQHKETEYSVDHKNSCEHCVSRATGSCNGYETSLCSSDNDSMTQNQNLQNSAKLTSNAHQYEFPAKECQQVDHWDRQPHDDQSVDQRDLNKFSGEYFPGSDNHQSILVSLSSTCIPKGLVCERSHLFRIKFYGSFDKPLGRYLRDDLFDEAYRCQSCKEPSESHIRRYTHQHGSLTISVRRLQSRKLPGERDGRIWMWHRCLKCKPKDGVPPATRRIIMSDAAWGLSLGKFLELSFSNHASANRVASCGHSLQRDCLRFYGYGNMVAFFRYSPVDILSVNLPPPVLDFNCCSTQEWLKRVAVEIFGKMESLHVEVSEFLHCTEKNIVTEDEPVRECVQRQIIEMKDWLKMQRNEYEMLLLPVMRESNHPMQTSIDILELNRLRRGLLLDAYIWDRRLCHIDSVLNTHGHISKTNPDNLDILLCTRLKEWKADLLCGDTEIEKSLGSPKKSLLSREGHLNDNEYSVADTNLEICLEGHPVDDADDLDKVYNKFSGVKKRPTAEPTDGLEPVERLPSLASIFSDTIDLAWTGSCDLQHDLPQAFTKIDENVSFNLDSPKYSNLVTPVRIHSFSSTLGLRQRERTGLVPASLHLSSFKSAEYFGAMRSILKDPMPNMRRSCSQRSPGTIEKLNVVLARKPTYISSTSNIINDGARLLLPQTGYEHDVVVAVYEDEPTSIISYAMTSEEYVEQVTHRLNSSLSFSHQPNTNGISSHGLEASSPSQGDHLHSKGTHFKLSFDDDSPISPDKTKFSVICYFAKHFAALRKKCCPKDIDYIRSLSRCKRWNAQGGKSNVYFAKTLDERFIIKQVTRTELESFVEFAPQYFKYLMESLASGSPTCLAKIVGLYQVGVKSLKTGKEVRMDLMVMENVFFERKISRVYDLKGSLRSRYTAGDSKVLLDANLIEALHTKPIFLGSKAKRRLERAVWNDTSFLALADVMDYSLLVGIDEEKKELVIGIIDYLRQYTWDKQLETWVKASGILGGPKNESPTVISPMQYKKRFRKAMSKYFLTVPDQWSS

SEQ ID NO: 224512 - protein, 1240 aa, Zea Mays
MKMIVGKIESRRPNVVLVEKTVSSSAQELFSKDISLVLNVKRTLLDRVSRCTGAQIASSADSIASVRLGQCEAFKVQKVTEFPSAKQTNRRSSKTLMFFEGCPWRLGCTVLLRGSCREELKRIKRAVQLAVFAAYHLSLETSFFADEGATLPKLPSRHVVVDPDTRNCTNSNSAALTNVGMPHGRKSEHDKLSQTAMVNIMFENTPVSPSSLPSNGEGHMFVGACQHKETEYSVDHKNSCEHCVSRATGSCNGYETSLCSSDNDSMTQNQNLQNSAKLTSNAHQYEFPAKECQQVDHWDRQPHDDQSVDQRDLNKFSGEYFPGSDNHQSILVSLSSTCIPKGLVCERSHLFRIKFYGSFDKPLGRYLRDDLFDEAYRCQSCKEPSESHIRRYTHQHGSLTISVRRLQSRKLPGERDGRIWMWHRCLKCKPKDGVPPATRRIIMSDAAWGLSLGKFLELSFSNHASANRVASCGHSLQRDCLRFYGYGNMVAFFRYSPVDILSVNLPPPVLDFNCCSTQEWLKRVAVEIFGKMESLHVEVSEFLHCTEKNIVTEDEPVRECVQRQIIEMKDWLKMQRNEYEMLLLPVMRESNHPMQTSIDILELNRLRRGLLLDAYIWDRRLCHIDSVLNTHGHISKTNPDNLDILLCTRLKEWKADLLCGDTEIEKSLGSPKKSLLSREGHLNDNEYSVADTNLEICLEGHPVDDADDLDKVYNKFSGVKKRPTAEPTDGLEPVERLPSLASIFSDTIDLAWTGSCDLQHDLPQAFTKIDENVSFNLDSPKYSNLVTPVRIHSFSSTLGLRQRERTGLVPASLHLSSFKSAEYFGAMRSILKDPMPNMRRSCSQRSPGTIEKLNVVLARKPTYISSTSNIINDGARLLLPQTGYEHDVVVAVYEDEPTSIISYAMTSEEYVEQVTHRLNSSLSFSHQPNTNGISSHGLEASSPSQGDHLHSKGTHFKLSFDDDSPISPDKTKFSVICYFAKHFAALRKKCCPKDIDYIRSLSRCKRWNAQGGKSNVYFAKTLDERFIIKQVTRTELESFVEFAPQYFKYLMESLASGSPTCLAKIVGLYQVGVKSLKTGKEVRMDLMVMENVFFERKISRVYDLKGSLRSRYTAGDSKVLLDANLIEALHTKPIFLGSKAKRRLERAVWNDTSFLALADVMDYSLLVGIDEEKKELVIGIIDYLRQYTWDKQLETWVKASGILGGPKNESPTVISPMQYKKRFRKAMSKYFLTVPDQWSS

SEQ ID NO: 224513 - protein, 1559 aa, Zea Mays
MKTCDWQLSGCGSKRADDEDDDEPGVQFFTHGNDFLHDFSDTESVSVSTPNDINRSLTPSPLESPTWMVKQNDSSPISRKNGRFSPDSPGYGTKASLGSDGSPQQINGSVTDSGDGSKTQYPVEFGANIWCPPPPEDEGDDIESRLFGFQDEDDEAGDSSGLLVSGSFSANKIAAIDEVTNTAQEECLKTAVLGHFRALVAQLLKAEGIDMGKDDGSKGWLDIVSSLTWQAASYVRPDTKKGGSMDPTDYVKVKCIASGDPRDSNFVRGVVCSKNVKHKRMVSEHRNAKLLILGGALEYHRVPNKLASIGRILEQEKEHMKMIVGKIESRRPNVVLVEKTVSSSAQELFSKDISLVLNVKRTLLDRVSRCTGAQIASSADSIASVRLGQCEAFKVQKVTEFPSAKQTNRRSSKTLMFFEGCPWRLGCTVLLRGSCREELKRIKRAVQLAVFAAYHLSLETSFFADEGATLPKLPSRHVVVDPDTRNCTNSNSAALTNVGMPHGRKSEHDKLSQTAMVNIMFENTPVSPSSLPSNGEGHMFVGACQHKETEYSVDHKNSCEHCVSRATGSCNGYETSLCSSDNDSMTQNQNLQNSAKLTSNAHQYEFPAKECQQVDHWDRQPHDDQSVDQRDLNKFSGEYFPGSDNHQSILVSLSSTCIPKGLVCERSHLFRIKFYGSFDKPLGRYLRDDLFDEAYRCQSCKEPSESHIRRYTHQHGSLTISVRRLQSRKLPGERDGRIWMWHRCLKCKPKDGVPPATRRIIMSDAAWGLSLGKFLELSFSNHASANRVASCGHSLQRDCLRFYGYGNMVAFFRYSPVDILSVNLPPPVLDFNCCSTQEWLKRVAVEIFGKMESLHVEVSEFLHCTEKNIVTEDEPVRECVQRQIIEMKDWLKMQRNEYEMLLLPVMRESNHPMQTSIDILELNRLRRGLLLDAYIWDRRLCHIDSVLNTHGHISKTNPDNLDILLCTRLKEWKADLLCGDTEIEKSLGSPKKSLLSREGHLNDNEYSVADTNLEICLEGHPVDDADDLDKVYNKFSGVKKRPTAEPTDGLEPVERLPSLASIFSDTIDLAWTGSCDLQHDLPQAFTKIDENVSFNLDSPKYSNLVTPVRIHSFSSTLGLRQRERTGLVPASLHLSSFKSAEYFGAMRSILKDPMPNMRRSCSQRSPGTIEKLNVVLARKPTYISSTSNIINDGARLLLPQTGYEHDVVVAVYEDEPTSIISYAMTSEEYVEQVTHRLNSSLSFSHQPNTNGISSHGLEASSPSQGDHLHSKGTHFKLSFDDDSPISPDKTKFSVICYFAKHFAALRKKCCPKDIDYIRSLSRCKRWNAQGGKSNVYFAKTLDERFIIKQVTRTELESFVEFAPQYFKYLMESLASGSPTCLAKIVGLYQVGVKSLKTGKEVRMDLMVMENVFFERKISRVYDLKGSLRSRYTAGDSKVLLDANLIEALHTKPIFLGSKAKRRLERAVWNDTSFLALADVMDYSLLVGIDEEKKELVIGIIDYLRQYTWDKQLETWVKASGILGGPKNESPTVISPMQYKKRFRKAMSKYFLTVPDQWSS

SEQ ID NO: 224514 - protein, 1068 aa, Zea Mays
MFFEGCPWRLGCTVLLRGSCREELKRIKRAVQLAVFAAYHLSLETSFFADEGATLPKLPSRHVVVDPDTRNCTNSNSAALTNVGMPHGRKSEHDKLSQTAMVNIMFENTPVSPSSLPSNGEGHMFVGACQHKETEYSVDHKNSCEHCVSRATGSCNGYETSLCSSDNDSMTQNQNLQNSAKLTSNAHQYEFPAKECQQVDHWDRQPHDDQSVDQRDLNKFSGEYFPGSDNHQSILVSLSSTCIPKGLVCERSHLFRIKFYGSFDKPLGRYLRDDLFDEAYRCQSCKEPSESHIRRYTHQHGSLTISVRRLQSRKLPGERDGRIWMWHRCLKCKPKDGVPPATRRIIMSDAAWGLSLGKFLELSFSNHASANRVASCGHSLQRDCLRFYGYGNMVAFFRYSPVDILSVNLPPPVLDFNCCSTQEWLKRVAVEIFGKMESLHVEVSEFLHCTEKNIVTEDEPVRECVQRQIIEMKDWLKMQRNEYEMLLLPVMRESNHPMQTSIDILELNRLRRGLLLDAYIWDRRLCHIDSVLNTHGHISKTNPDNLDILLCTRLKEWKADLLCGDTEIEKSLGSPKKSLLSREGHLNDNEYSVADTNLEICLEGHPVDDADDLDKVYNKFSGVKKRPTAEPTDGLEPVERLPSLASIFSDTIDLAWTGSCDLQHDLPQAFTKIDENVSFNLDSPKYSNLVTPVRIHSFSSTLGLRQRERTGLVPASLHLSSFKSAEYFGAMRSILKDPMPNMRRSCSQRSPGTIEKLNVVLARKPTYISSTSNIINDGARLLLPQTGYEHDVVVAVYEDEPTSIISYAMTSEEYVEQVTHRLNSSLSFSHQPNTNGISSHGLEASSPSQGDHLHSKGTHFKLSFDDDSPISPDKTKFSVICYFAKHFAALRKKCCPKDIDYIRSLSRCKRWNAQGGKSNVYFAKTLDERFIIKQVTRTELESFVEFAPQYFKYLMESLASGSPTCLAKIVGLYQVGVKSLKTGKEVRMDLMVMENVFFERKISRVYDLKGSLRSRYTAGDSKVLLDANLIEALHTKPIFLGSKAKRRLERAVWNDTSFLAICNCYIIV

SEQ ID NO: 224515 - protein, 129 aa, Zea Mays
MRCRGRVSSGAGLLGPQHADVAERAVEEPEHGRRHHAAHGRADHLAHEHGPRRRQRHVPGLEVLRQVRRRRHDADHHAAHAARPAMMPPPPSPSSEAAAQPPTVKMVSLPYVVARDRSVSPYVRVAEGQ

SEQ ID NO: 224516 - protein, 307 aa, Zea Mays
MSRSPHLPPRCPPLGPQITRRDDSMFTQSCRFPSGDTFFSEPPCWLDDLLADSGKAPKLPPLRRACSDSDAILDALSTFESPICRIEEGNQISGGEADDLLDAGEGGESGSVVEASCVYGPNSPRQKSRLTTSESSMVNAVLENVPSNPLQYLSIDASSGMNGNVANGTADTCDAFGHPDQDKSFKRRSGQRSRVRKLQYIAELERTVDSLQNIGADLAVRVSSLFQLHNALSMENKQLRIQISSLQRAKLIKDGFMDPRGYARWGQDRWTGDGENNCSRRRRTCSTSRHRKRSRRVGVDHCNDYIL

SEQ ID NO: 224517 - protein, 953 aa, Zea Mays
MGAQEEAVDEMLRAAAAEVSTSSVKRRLRIFHHTLPPLIAKAIESPSDTVLLVDLIFQTLPIYDDRASRKAVDDLVIQALGEPTFMKPFAAVLVQSMEKNLKVTNPLTSLKLLRWSHYLLKWSQFATLTKGAFTRLANAQAVLCQVLMDGSFRRRRTCKQLFIHLFSEHSGIYKMYIEELRDLRISMRDSPAFLNLILDFTITSPSLSTQYQSVFLDLYVKIILSSKDRPPKAATEAFKPLFLNIGHEDFKNTIIPSCIKMLKRNPEIVLQSIGYLLKTVHLDLSKYSMEFMPVVLHQARHSDEERRINALSIIGTLSEKSSDPDALPSMVNAIKAVLGGSEGKLSLLYQRIGMINALEQLSRSPPKQIGRLAPSVSTFLLTCYKDDGIEEVKLAILSAIGSWALVSAEAVQPDVVSFIAAGLKEKDTLRKGHLKFLRVICKNSESLTKVASLLDHLIQLSKTGFSKATQRLDGIYALFAVSRLAAVDTKADGAILKEKLWTLIAQNEPSLISLQLLPKLADDDCLAVLDLVQSLFVEQFFRVREYFSIHSLLQLLIYLLCHPSWEVRKVAYDVTKKIFSSSSGLAEDILFLFTDWLSLVGERLSILKQGDMDSPSDSQLPFFPSTEVLVKCLFLIAPYAVVHSLRSYSRIILCSHHPCLTSSSSPAGVYKRLQRRLRQEQIFFVDLITPNISVICKELLSQDGLFSSNNQVQSAALCSLSTLMTITPNDTFLEFEKHFIGLQERTLHDSFSESDIKIFYTPEGQLSTEQGVYIAEAVANKNTKLAKGRFRAYDDQMQETARSIVPAKNEKKESSGIGKRETGKSTKRTAPIDKAKTAKEEARELLLKEEASVRMKVGQVQKDLSLMLDALGKLAIANPIFTHGQLPSLVNYVEPLLSSPIVSDAAFCTMLRLARCTAPPLCNWALDIAAAIRVISVGDFEMDPSIFKKDMSS

SEQ ID NO: 224518 - protein, 895 aa, Zea Mays
MGAQEEAVDEMLRAAAAEVSTSSVKRRLRIFHHTLPPLIAKAIESPSDTVLLVDLIFQTLPIYDDRASRKAVDDLVIQALGEPTFMKPFAAVLVQSMEKNLKVTNPLTSLKLLRWSHYLLKWSQFATLTKGAFTRLANAQAVLCQVLMDGSFRRRRTCKQLFIHLFSEHSGIYKMYIEELRDLRISMRDSPAFLNLILDFTITSPSLSTQYQSVFLDLYVKIILSSKDRPPKAATEAFKPLFLNIGHEDFKNTIIPSCIKMLKRNPEIVLQSIGYLLKTVHLDLSKYSMEFMPVVLHQARHSDEERRINALSIIGTLSEKSSDPDALPSMVNAIKAVLGGSEGKLSLLYQRIGMINALEQLSRSPPKQIGRLAPSVSTFLLTCYKDDGIEEVKLAILSAIGSWALVSAEAVQPDVVSFIAAGLKEKDTLRKGHLKFLRVICKNSESLTKVASLLDHLIQLSKTGFSKATQRLDGIYALFAVSRLAAVDTKADGAILKEKLWTLIAQNEPSLISLQLLPKLADDDCLAVLDLVQSLFVEQFFRVREYFSIHSLLQLLIYLLCHPSWEVRKVAYDVTKKIFSSSSGLAEDILFLFTDWLSLVGERLSILKQGDMDSPSDSQLPFFPSTEVLVKCLFLIAPYAVVHSLRSYSRIILCSHHPCLTSSSSPAGVYKRLQRRLRQEQIFFVDLITPNISVICKELLSQDGLFSSNNQVQSAALCSLSTLMTITPNDTFLEFEKHFIGLQERTLHDSFSESDIKIFYTPEGQLSTEQGVYIAEAVANKNTKLAKGRFRAYDDQMQETARSIVPAKNEKKESSGIGKRETGKSTKRTAPIDKAKTAKEEARELLLKEEASVRMKVGQVQKDLSLMLDALGKLAIANPIFTHGQLPSLFGVPIQ

SEQ ID NO: 224519 - protein, 1171 aa, Zea Mays
MGAQEEAVDEMLRAAAAEVSTSSVKRRLRIFHHTLPPLIAKAIESPSDTVLLVDLIFQTLPIYDDRASRKAVDDLVIQALGEPTFMKPFAAVLVQSMEKNLKVTNPLTSLKLLRWSHYLLKWSQFATLTKGAFTRLANAQAVLCQVLMDGSFRRRRTCKQLFIHLFSEHSGIYKMYIEELRDLRISMRDSPAFLNLILDFTITSPSLSTQYQSVFLDLYVKIILSSKDRPPKAATEAFKPLFLNIGHEDFKNTIIPSCIKMLKRNPEIVLQSIGYLLKTVHLDLSKYSMEFMPVVLHQARHSDEERRINALSIIGTLSEKSSDPDALPSMVNAIKAVLGGSEGKLSLLYQRIGMINALEQLSRSPPKQIGRLAPSVSTFLLTCYKDDGIEEVKLAILSAIGSWALVSAEAVQPDVVSFIAAGLKEKDTLRKGHLKFLRVICKNSESLTKVASLLDHLIQLSKTGFSKATQRLDGIYALFAVSRLAAVDTKADGAILKEKLWTLIAQNEPSLISLQLLPKLADDDCLAVLDLVQSLFVEQFFRVREYFSIHSLLQLLIYLLCHPSWEVRKVAYDVTKKIFSSSSGLAEDILFLFTDWLSLVGERLSILKQGDMDSPSDSQLPFFPSTEVLVKCLFLIAPYAVVHSLRSYSRIILCSHHPCLTSSSSPAGVYKRLQRRLRQEQIFFVDLITPNISVICKELLSQDGLFSSNNQVQSAALCSLSTLMTITPNDTFLEFEKHFIGLQERTLHDSFSESDIKIFYTPEGQLSTEQGVYIAEAVANKNTKLAKGRFRAYDDQMQETARSIVPAKNEKKESSGIGKRETGKSTKRTAPIDKAKTAKEEARELLLKEEASVRMKVGQVQKDLSLMLDALGKLAIANPIFTHGQLPSLVNYVEPLLSSPIVSDAAFCTMLRLARCTAPPLCNWALDIAAAIRVISVGDFEMVLDLTPVIMEDDSKKPSSGIFEQIVNGLTIACKAGPLPADSFTFVFPIMERILLSSKKTCLHDDVLHILSMHMDPILPLPRPRMLSVLYHVLSTVPAYQPSVGPMLNELCLGLRGHELAQALVGVYAKELHVRLACLTAIKCVPVHSVQRDLQVSTSLWIAAHDPEKVVAELAEELWDRFGFDAITDYSGIFNALSHKNYNVRAASAEALAAALDENQDKMQTFELDMD

SEQ ID NO: 224520 - protein, 818 aa, Zea Mays
MDSPSDSQLPFFPSTEVLVKCLFLIAPYAVVHSLRSYSRIILCSHHPCLTSSSSPAGVYKRLQRRLRQEQIFFVDLITPNISVICKHFIGLQERTLHDSFSESDIKIFYTPEGQLSTEQGVYIAEAVANKNTKLAKGRFRAYDDQMQETARSIVPAKNEKKESSGIGKRETGKSTKRTAPIDKAKTAKEEARELLLKEEASVRMKVGQVQKDLSLMLDALGKLAIANPIFTHGQLPSLVNYVEPLLSSPIVSDAAFCTMLRLARCTAPPLCNWALDIAAAIRVISVGDFEMVLDLTPVIMEDDSKKPSSGIFEQIVNGLTIACKAGPLPADSFTFVFPIMERILLSSKKTCLHDDVLHILSMHMDPILPLPRPRMLSVLYHVLSTVPAYQPSVGPMLNELCLGLRGHELAQALVGVYAKELHVRLACLTAIKCVPVHSVQRDLQVSTSLWIAAHDPEKVVAELAEELWDRFGFDAITDYSGIFNALSHKNYNVRAASAEALAAALDENQDKMQDALSTLFSLYIRDIGTSVEFGDAHWLGRQGIALALHSIADVLASKDLPVVMTFLISRALADPNVDVRGRMINAGILIIDRHGKENVPLLFPIFESYLNKRASDEKTYDLVREGVVIFTGALAKHLSKDDPKVHSVIEKLLDVLNTPSEAVQRAVSDCLSPLMVSKQEEGQALVSRLLDRMMKCEKYGERRGAAFGLAGVVKGFGISSLKKYGIAVTLQKNLEDRMSAKSREGALLGFECLCEKLGKLFEPYVIQMLPFLLVCFSDQVLAVREAAECAARAMMSQLTGPGVKLVLPSLLKVSIYLI

SEQ ID NO: 224521 - protein, 587 aa, Zea Mays
MKVGQVQKDLSLMLDALGKLAIANPIFTHGQLPSLVNYVEPLLSSPIVSDAAFCTMLRLARCTAPPLCNWALDIAAAIRVISVGDFEMVLDLTPVIMEDDSKKPSSGIFEQIVNGLTIACKAGPLPADSFTFVFPVLYHVLSTVPAYQPSVGPMLNELCLGLRGHELAQALVGVYAKELHVRLACLTAIKCVPVHSVQRDLQVSTSLWIAAHDPEKVVAELAEELWDRFGFDAITDYSGIFNALSHKNYNVRAASAEALAAALDENQDKMQDALSTLFSLYIRDIGTSVEFGDAHWLGRQGIALALHSIADVLASKDLPVVMTFLISRALADPNVDVRGRMINAGILIIDRHGKENVPLLFPIFESYLNKRASTTFLLIIVLASDEKTYDLVREGVVIFTGALAKHLSKDDPKVHSVIEKLLDVLNTPSEAVQRAVSDCLSPLMVSKQEEGQALVSRLLDRMMKCEKYGERRGAAFGLAGVVKGFGISSLKKYGIAVTLQKNLEDRMSAKSREGALLGFECLCEKLGKLFEPYVIQMLPFLLVCFSDQVLAVREAAECAARAMMSQLTGPGVKLVLPSLLKVSIYLI

SEQ ID NO: 224522 - protein, 779 aa, Zea Mays
MDSPSDSQLPFFPSTEVLVKCLFLIAPYAVVHSLRSYSRIILCSHHPCLTSSSSPAGVYKRLQRRLRQEQIFFVDLITPNISVICKHFIGLQERTLHDSFSESDIKIFYTPEGQLSTEQGVYIAEAVANKNTKLAKGRFRAYDDQMQETARSIVPAKNEKKESSGIGKRETGKSTKRTAPIDKAKTAKEEARELLLKEEASVRMKVGQVQKDLSLMLDALGKLAIANPIFTHGQLPSLVNYVEPLLSSPIVSDAAFCTMLRLARCTAPPLCNWALDIAAAIRVISVGDFEMVLDLTPVIMEDDSKKPSSGIFEQIVNGLTIACKAGPLPADSFTFVFPVLYHVLSTVPAYQPSVGPMLNELCLGLRGHELAQALVGVYAKELHVRLACLTAIKCVPVHSVQRDLQVSTSLWIAAHDPEKVVAELAEELWDRFGFDAITDYSGIFNALSHKNYNVRAASAEALAAALDENQDKMQDALSTLFSLYIRDIGTSVEFGDAHWLGRQGIALALHSIADVLASKDLPVVMTFLISRALADPNVDVRGRMINAGILIIDRHGKENVPLLFPIFESYLNKRASDEKTYDLVREGVVIFTGALAKHLSKDDPKVHSVIEKLLDVLNTPSEAVQRAVSDCLSPLMVSKQEEGQALVSRLLDRMMKCEKYGERRGAAFGLAGVVKGFGISSLKKYGIAVTLQKNLEDRMSAKSREGALLGFECLCEKLGKLFEPYVIQMLPFLLVCFSDQVLAVREAAECAARAMMSQLTGPGVKLVLPSLLKVSIYLI

SEQ ID NO: 224523 - protein, 149 aa, Zea Mays
MGASIFPISNYGGSQYDINILVWKDPKEGNWWLQFGNDYVLGYWPSFLFSYLADSASMIEWGGEVVNSEPDGSHTSTQMGSGHFPEEGFGKASYFRNVQVVDSTNNLKPPRGVGTFTEQSSCYDVQDGSNADWGTYFYYGGPGKNSNCP

SEQ ID NO: 224524 - protein, 288 aa, Zea Mays
MVPTTRNLLLHHDVDGKSSRGRPCYHPAGHQYYVGIAAQLEASAASAAWQQDHQSKPSRSPRLLGMADDDEQPDAAAGPSTSSASPGGAGAGNGRGGDWLQLGLAAAAASASSSGDNSTMDPDPPAPTELELSAYDKRNACRMRRPPLFPLPLRSYHPPYGYGRYRPAAAAASRSMPFMPPSRCSSSDAIIRVISPPRRRTEAPRLWLTLQAAPNQSREPVLPQIAKSYLRIKDSNMTVEVVMKYLAEKLGVARSRSRSRSHQPSEGASMQGRPWACAGWATAQGPQS

SEQ ID NO: 224525 - protein, 330 aa, Zea Mays
MQIMTPKARSDVHVNLPALQKLDMMLIEVMDSMIDTEFWYEESGSRADGRGKITGPRKSKKWWLPSPRVPEQGLSQFQRKRLVFQAKLVHQILKAAKSINEQVLSHMPIPAAVMDALPKSGRASLGEDLYQAITTDYIPVEEIFVSLSLKTEHSVLETINRLEGAVFAWNQRILEERSKRSPGRHSWSFMKDSSSEVDKMSACIERVDALVQLLKSRYPNLPPTFIDVLKVQYNDVGHAIVEAYARVLVGVAFSILSRVAEILLEDDLIKKPNTPMTTLKFDLSSDVYLAGITETPPGHIRRSLMDQISMVDGRYDAVVGKKKEVKQLRW

SEQ ID NO: 224526 - protein, 540 aa, Zea Mays
MRMKTLACCRRRPQDFSIDMDQEPDRVVTYNGLETCIINSSTYDDDSGISATTGGDGCITTDSLDDEVSSCSSKDASGSSFTSHSLSKQEEHSLDELGTPMAIHLLPFKGKKTITYTLSASDIENMKEKFAKLLLGDDTSGGARGVCVALALSNGIINLSATVFGELWKLEPLCEDKKIRWRKEMDWLLSPTTYMVELVPTKQSGADGCTFEIMTPKARSDVHVNLPALQKLDMMLIEVMDSMIDTEFWYEESGSRADGRGKITGPRKSKKWWLPSPRVPEQGLSQFQRKRLVFQAKLVHQILKAAKSINEQVLSHMPIPAAVMDALPKSGRASLGEDLYQAITTDYIPVEEIFVSLSLKTEHSVLETINRLEGAVFAWNQRILEERSKRSPGRHSWSFMKDSSSEVDKMSACIERVDALVQLLKSRYPNLPPTFIDVLKVQYNDVGHAIVEAYARVLVGVAFSILSRVAEILLEDDLIKKPNTPMTTLKFDLSSDVYLAGITETPPGHIRRSLMDQISMVDGRYDAVVGKKKEVKQLRW

SEQ ID NO: 224527 - protein, 330 aa, Zea Mays; identical to SEQ ID NO: 224525

SEQ ID NO: 224528 - protein, 132 aa, Zea Mays
MAPSLLLHMVWTPAPSLVAMDSPSPISFPKHKSHGRPTPARPAPAMDAVEPPVSYLPSPSSSGCRPSLDFALSTRRSSLLWRALAVFHLHRTTPSSLFAPVFSMVAPLLSLINTRRSSNMPDLCSPDEQATV

SEQ ID NO: 224529 - protein, 231 aa, Zea Mays
MLIALIWQYDFSPFTVLIIAILNDGTIMTISKDRVKPSPLPDSWKLKEIFVTGIDKFGVRSIRDSEHKMMSALYLQVSIVSQALIFVTRSRSWSFVERPGLLLVTAFLLAQLVATFLAVYANWGFARIKGIGWAGVVWLYSIVFYFPLDLIKFFIRFVLSGRAWDNLLENKTGRLHHQEGLRAGREGGAVGHRAKDAARAPAAGGFLQHAVQRQEQLPRAVRDRRAGQETS

SEQ ID NO: 224530 - protein, 287 aa, Zea Mays
MFIQPHHTDHIHQAYAGDKNLIKFEGDHNSPRPQFYYDSVSIFFYNVLHPPQFPSTCTHKLDKYYNLGAFKGAAGTNESLLYEIINGLRAAGTDAGSSSAATASFTNATKSVVELLTERVNQLSVKNDNDLVSQSLPALPLLLEIFNSTRVQDFLLDENHNLTEMDGNTGECHLEDKSNRQTDECCSYTSSNRESWGRCSSLGGASDGLSSGEQPEIPNHKLKSLTLRALATPLRRVQRKPLAIPKEKNRSLWKRLKKERQQMGENISQRLRLCLQGQARHKRTKSS

SEQ ID NO: 224531 - protein, 51 aa, Zea Mays
MAAKWAQKTVVIPAHRRGCHLITPKILREIEGDLAGFKCGLAHFFQERTGI

SEQ ID NO: 224532 - protein, 645 aa, Zea Mays
MMPSWITQTPETGVTADSFLKSVVFYRIHVGIQSSEGFSSIHGILRRFSDFLKLSSDLKSAFPRKDVPSAPPKHAFLRINSSRLLLEERRHALEEWMQKLLSDIDLSRSAPVAAFLELEAAARSYFQERNGRPSEVGPSAKSSTKSSSHSDGPASGSLAESNEINQGLTRGSSLTGATGNGVLGEAILDQSDEHVSSALNHRKGNLVLEHDGRNGSVASYRGVLSEEDRDSYPGHARKDSAESIGSDLSSLRGSELSVPGASNSLWDGAVVDGHVSQTEHLTGLDMHLLYDMDAQVILPNDKKQKLTRLLITMQRRIGTAKTDMEDLIARLNQEGAVKEYLTTKVKDLEVELEATKQKGRETLQQAILAERERITQMQWDMDELRRKYSEMESNLKTEHNEKTRAESERTTASGENETLLEELEIKQKEVESLKQQLVEAEAKSKADKKVLVKEVKSLRNSQTEMKKVLNQYLEEKTDLERVINRDKQRSARTKLSRVKILHECRLLRERLQDCSAKFLAEEQDNFTIDPSSLPDALDLLATSDNRIRLLVAEAQLLARDDEQGSSDGGDDSDSRSSLTMSSEDAKVTDEDTTKMLSDLLIDNAQLRLRLNAVIRNAVNTSVKPEKEGSGEVLPKKTVLNWLLDR

SEQ ID NO: 224533 - protein, 325 aa, Zea Mays
MACLGNVELDLSAMPTLEQAHAVIRHYGPTLFFHPKEVYLPSSVSWFFKNGAALYRRGGDTAGEEIDGEGSNLPGGGCNDGEFWIDVPSGERGRAVCRGSIDSAELYAHVKPAMGGTCTDVAMWVFCPFNGPARLKLGPISLPLGKTGRHVGDWEHFTFRVSNLTGELMGVYYSQHSGGHWVDASALEYIDGNRPVVYSSRNGHASYAYPGVYLQGSAALGVGIRNDAARSSLFVDSSARYRIVAAGYLGEGAVVEPQWLQFMREWGPTVVYKWRKRMEWVIGRLPPWLRCRAESMLNKMPNELSREEGPTGPKEKNNWEGDERW

SEQ ID NO: 224534 - protein, 382 aa, Zea Mays
MFGRTGVYRSFMFSSPTVLVTTAEGCKQVLMDDDAFVTGWPKATVALVGPRSFVAMPYDEHRRIRKLTAAPINGFDALTGYLPFIDRTVTSSLRAWADHGGSVEFLTELRRMTFKIIVQIFLGGADQATTRALERSYTELNYGMRAMAINLPGFAYRGALRARRRLVAVLQGVLDERRAARAKGVSGGGVDMMDRLIEAQDERGRHLDDDEIIDVLVMYLNAGHESSGHITMWATVFLQENPDMFARAKAEQEAIMRSIPSSQRGLTLRDFRKMEYLSQVIDETLRLVNISFVSFRQATRDVFVNGYLIPKGWKVQLWYRSVHMDPQVYPDPTKFDPSRWEGHSPRAGTFLAFGLGARLCPGNDLAKLEISVFLHHFLLGYK

SEQ ID NO: 224535 - protein, 761 aa, Zea Mays
MAMAAAPHSHHTPVGAAAATSAAVSMPCCSSASCYDDKDGDPSSSWSLSSPRRRQPYRRLLRDEAQRLRRARRSQGPGADTPRWVRRTTDQMARYIEDDRAGHVYGRHVVAAVRAVRATASRPSADMRQAMASFVTRLTFREMCVVLREQRGWRQARDFFAWMKLQLCYEPSVVAYTVLLRLYGRVGKVKLAEETFLEMLQVGCEPDAVACGTLLCAYARWGRHEDMMLFYSAVRGRGLVPPISVYNYMISSLQKQKLHGKVIHVWKQMLEAGAPPNQFTYTVVIGSLVKEDLLEEAVDLFGEMRRRRFVPEEATYSLLISASSRHGKGEQALRLFEEMKGQGIAPSNYTCASLLALHCKNEDYPKALALFSDMESSKVIPDEVIYGILIRIYGKLGLYEEARQTFGEIEKAGLLNDEQTYVAMAQVHLNAGDCDRALEVLESMKTRGVKPSRFSYSALLRCHVAKEDVVAAEDTFRALSQSQHGLPDAFCCNDMLRLYMRLGRLDKARALVSVLLREDGFQLDENLSTTVMEFYCKSEMYARNRPSVVLEERSSSRALGSSAASVALNSLLDMPGGLSSVSLLISRLAREGSTDEARFIYDQLTELGTKPDDSAVATLIVQYGQAKQLERAQELFDSASASFPDGALVCNAMVDAFCKCGRAEDAYHLFMEMADQGSYRNAVTASILVTHLTKHGKFQEVENIMHGCFRDEVQLDTALYNTFIKSMLESVSKQVNCIRPSAYTIAWYPLAFLSPCRRSIQ

SEQ ID NO: 224536 - protein, 372 aa, Zea Mays
MMQRDTIHAASQFASRNQLPEYIRDEMLSHICLRYKTESLKQKETLDSLPKGIRSGIAYHLFFPVIEKVYLFRGVSYTCMLQLVTAMEAEYFPPRELVILQNEAPTDVYILVSGAVEERFVIDGVENVQGVMYAGEIFGEIGALCSVPQPFTICTTKISQLLRVSTTVLKNIIEENKDDEQIVLNNIFQKTAQDQRFSTEVSGKFLGKLNQEFRKPNNYSAFNQVGQENESEAKGRVTSCCRNERCKELNESERCNHVTIHKTAKQDDFNIINSFPAKGESKEKHILTNLMFMESVYRGEADVHRQILPDSSLTRSEEDGSSVVLEIKRVTIHVYPQQNKKYVPCAKVIKLPGSLDELFNIACKYSLTHSHH

SEQ ID NO: 224537 - protein, 327 aa, Zea Mays
MFLGMGRPAWREARATLQKILSADEPVLRDNEALRNKCLIPMSDIEMVLPITVGGYTDFFCSVHHARNCGFIFRGPQTPVNPNWFYLPIGYNGRASSIVVSGTDVIRPRGQGHPTGNSAPYFGPSQKLDFELEMAAIVGPGNELGKPIDINDAEEHIFGLTLMNDWSARDIQAWETIPLGPFLGKSFSTTISPWIVTLDALKPFMCEAPKQVLIKPKDQNVALIVTKTNFKHLYWTVTQQLTHHTINGCNMRPGDIFATGTLSGPEPDSLGCLLELTWNGQKEIPVGNLTRKFLEDGDEVILTGCCKGEGYNIGFGTCTGKVLPALP

SEQ ID NO: 224538 - protein, 257 aa, Zea Mays
MFVQINPDVSSYSETLSTLKFAERVSGVELGASKANKEGKDIREFMEQLSLLKHKMAKKDDEINRLQQLKTQTPRVRTAKRADSPLKHSSSSPGISNLGSKIQHRRTVSSGKAMSIASRAGSDTFSDTSDRHSESGSMQSVDDILPRRGIMGLPKLSIGEMGQNSADPELVCFDYADSEERLSDISDSGLSMGTETDVSVSSIVELTRFQEQENIPSTLKEQESARKIPNDQLENHNTNNICTKDVHDFEEMDISQV

SEQ ID NO: 224539 - protein, 80 aa, Zea Mays
MSGDTAAAVQAGGDAQQAVGRNRIQVSSSKKPLFFYVNLAKRYMQHHDDDVELSALGLAISTAVTVAEILKNNGLAVEKN

SEQ ID NO: 224540 - protein, 234 aa, Zea Mays
MGRKKHTRSGCRPGPTGQTTRSGARDCEAATVGPLVCQRPDIDGALKDIEGLPLPFRHLQCAYTCSFILHQLPHMLPSEKAFLVVVSALGIYNKDEIVVYDGKGLFSDARVWWIPHSDGQPQRKGREWLFTPIGLTKKKRSSKTERKDKDAKKRSKKRRKHKSSSKSSSSSSSESSSSDDEDRGSRKSRSQSRSKRTRKEKKSQSRSKHRGSESEEEGPLLRGSGQVVWLPKTL

SEQ ID NO: 224541 - protein, 486 aa, Zea Mays
MAKPLNLTPAFLSLMATSCRFSSGGHAHRFASSLPCGRTTPTPRTTSSSTRPAAQVSPDRSKQRDDEAASETTIRQQLQQVDVLENTGISRHFAGEIKCILDRTYRCWLERHEEIMQDTTTCAMAFRILRMNGYDVSCDLLYHVVETSGIHDPLRGHLNDTRTLLELHKASTVSISEDESILDSIGLRSSTLLREQMESSGALQNPPLFREVEHALYHPFYATLDRLTHRWNIENFNTTEHQMLDTPYLSSRYTSRDILALGIRDFNSSQLTYQQELQHLKSWVKECRLDQLPFVRQNLAYFLLSAAGCMYSPELSEARTLCAKNGALITVVDDFFDVGGSKEELENLVMLVELWDEHRKIEFYSEHVEIIFSSIYNSVNQYGAKASLLQDRNVTKHLVQIWLDLLKSMMTEVEWRLNKYVPTEEEYMTNASLTFALGPIVLPALYFVGPKIPESIVKDPEYDELFKLMSTCGRLLNDVQSFEVHY

SEQ ID NO: 224542 - protein, 89 aa, Zea Mays
MSPGSGTFASSSCRNISALHGWFCCVLRLSLCSFSSATNRIITAKDHASVQINIGHLDANGLYDGHFTTFALSGFVRAQIVAPSVLPFQ

SEQ ID NO: 224543 - protein, 69 aa, Zea Mays
MRSCNTPSPAWLRRNAWSSRFSSAWLAAHASGRARAPKGGSRHAAAFAREAPRVTASFRANLWVRGYLG

SEQ ID NO: 224544 - protein, 85 aa, Zea Mays
MQPRSRGKLLGLPPPFAPISGFVVISVRVLDQKAQVYNHLRKWRQRWMRVAKLRELSGANWDEDLCMISLEDEHYNGHIKLWLGT

SEQ ID NO: 224545 - protein, 991 aa, Zea Mays
MDLSRFASGVGPSRVAPRAGLQIGAAENGFRACSLRRARHRGGGNGNLTAAASTLRGRGGLFYLAPTRRSHPSLRLFYLLPTRGSHLSLRARWRPRCQGNDSLAYVDGPLETAKGSGEVDDNVPTSSGSDDDRGLADVDGLREMLQRSRNELEVARVNSTMFEEKAQRISESAIAFKDRADGAQRDVCAAVATVQEIISKEADAKEAVQKATMALSMAEARLQLAAEALEANRGSVGPTEVSIEGMEQEALLSAQEEIKDCRAALSRCAEELSRVQDKKMELQKEVDRLTDLAGKAQMDASNAEEDVANIMVLAEQAVALEMEASQRVNDAEMVLLKAEKAIASIDTVVELPSPAEEQRSTEEDSVSEGYEYSSDVTDDVYVRDEVSSIERLMVGDLTVQGFEQLEPSREIYDEESSNKMSVEPQKEAESDSDKSKQGKKQEMERKEHTKEPLSAPKALVKRSSRFFSASFFSSKVDGEFTPTSVFRGLMKSVQKQAPKLVVGILLLGAGAFFLNRAEKSQLFQQQGIATSIGKVTSTTKPIVLEIRRIPQRVKKLIELLPHQEVNEEEASLFDILYLLLASVIFVPLFQKIPGGSPVLGYLAAGVLIGPYGLSIIRNVHETKAIAEFGVVFLLFNIGLELSVERLSSMKKYVFGLGSAQVLATTAAVGVIAHCFAALPGPAAIVVGSGLALSSTAVVLQVLQERGESTSRHGRATFSVLLFQDLAVVVLLILIPLISPNSSKGGVGFQAIAEAMGMAAVKAVAAITAIIAGGRLLLRPIYKQIAENQNAEIFSANTLLVIFGTSLLTARAGLSMALGAFLAGLLLAETEFSLQVESDIAPYRGLLLGLFFMTVGMSIDPKLLLSNFPAISVILSLLIIGKTLLVTFVGRVFGVSAIAAIRVGLLLAPGGEFAFVAFGEAVNQGLLSPQLTSLLFLVVGISMALTPWLAAGGQFLASKFEQHDVRSLLPVESETDDLQDHIIILGFGRVGQ

SEQ ID NO: 224546 - protein, 859 aa, Zea Mays
MDLSRFASGVGPSRVAPRAGLQIGAAENGFRACSLRRARHRGGGNGNLTAAASTLRGRGGLFYLAPTRRSHPSLRLFYLLPTRGSHLSLRARWRPRCQGNDSLAYVDGPLETAKGSGEVDDNVPTSSGSDDDRGLADVDGLREMLQRSRNELEVARVNSTMFEEKAQRISESAIAFKDRADGAQRDVTEEDSVSEGYEYSSDVTDDVYVRDEVSSIERLMVGDLTVQGFEQLEPSREIYDEESSNKMSVEPQKEAESDSDKSKQGKKQEMERKEHTKEPLSAPKALVKRSSRFFSASFFSSKVDGEFTPTSVFRGLMKSVQKQAPKLVVGILLLGAGAFFLNRAEKSQLFQQQGIATSIGKVTSTTKPIVLEIRRIPQRVKKLIELLPHQEVNEEEASLFDILYLLLASVIFVPLFQKIPGGSPVLGYLAAGVLIGPYGLSIIRNVHETKAIAEFGVVFLLFNIGLELSVERLSSMKKYVFGLGSAQVLATTAAVGVIAHCFAALPGPAAIVVGSGLALSSTAVVLQVLQERGESTSRHGRATFSVLLFQDLAVVVLLILIPLISPNSSKGGVGFQAIAEAMGMAAVKAVAAITAIIAGGRLLLRPIYKQIAENQNAEIFSANTLLVIFGTSLLTARAGLSMALGAFLAGLLLAETEFSLQVESDIAPYRGLLLGLFFMTVGMSIDPKLLLSNFPAISVILSLLIIGKTLLVTFVGRVFGVSAIAAIRVGLLLAPGGEFAFVAFGEAVNQGLLSPQLTSLLFLVVGISMALTPWLAAGGQFLASKFEQHDVRSLLPVESETDDLQDHIIILGFGRVGQIIAQLLSERLIPFVALDAGRYGASYNKLNSKETTDSSSSEP

SEQ ID NO: 224547 - protein, 151 aa, Zea Mays
MINDVAVRLDLPTGVRLHDVFHVGLLKKFHGTPPAAPPPLPTIHHGAVVPEPERAVRYRLARGVRLVLIQWKGQSAASATWEDIDTFRAKHLAFQLGDELGLDGGGDVMWGQVYTRRRRAKDVRRAEERAARGTRAQLARADRVDKAEGYY

SEQ ID NO: 224548 - protein, 165 aa, Zea Mays
MDDIAGERGRKGDDSSRAVLTPPRGPGLLSPSSPSRSDPIPSPPSAAVLALPAAATSPSAGLLASSRLTGEMDGGGETLLVRRSKGKKRRQPAAPAERGSGSGDRFRALWRDYHDLLQVSQRPRQRRGGWRARSEEASPCLLKSSSCEGSISPFRRVARSRHITG

SEQ ID NO: 224549 - protein, 142 aa, Zea Mays
MAAEGKRKGVPALGWWLMLVGSLRLASVWFGFFDIWALRVAVFSQTEMTDVHGRTFGVWTLLTCTLCFLCALNLENRPLYLATFLSFIYALGHFLTEYLIYHTMAAANLSTVGFFAGLSFKPFQDLISTLLLHLLRCNAAFI

SEQ ID NO: 224550 - protein, 399 aa, Zea Mays
MRPNIITEAGIPTRLNQWWSSIPFVTSGVILICGVIYLLCLLIGYDSYVEICFLPSAVASHFQVYRFYTSVLFHGSLLHVLFNMLALVPLGTELERIMGSVRLLFLMLLLATTNAILHLTIAFLVAYNPLYHVPNLVNECSIGFSGVIFSMIVIETSLSGVQSRSVFGLFNVPAKWYAWILLVLFQFLASNVSLLGHLCGILSGFAYTYGLFNYLLPGPSFYSKIEGLSALSVCVRRPGFIMCTGGTTYGQLPTYSNTSAAPSALINGNFLRNISSWMPSRHTSTAQEGEDPRFPGRARTLGSVGTEPTAREASAHLHARLLDNTTPSDPLTNTQHTAVNTVRADATVTAEQVDTFDEELKKLVGMGFEKVFQTQAEVALAAADGDPNVAIEILMSQQG

SEQ ID NO: 224551 - protein, 218 aa, Zea Mays
MPLQEQANTVCKKVKKMKELSEGYNIVGLSQGNLIGRAVIEYCDCGPPSGFLCILIDDLIKSEIYSDYVQAHLAPSGYLKIPTDMEDYLKGCKFLPKLNNEIPSARNTTYKERFSSLENLVLIMFEDDAVLIPRETAWFGYYPDGAFSPVLPPQETKLYTEDWIGLKTLDEAGRVKFVSVPGGHLRITRSDMKKYIVPYLTPEASSKKNIHIHRMLSL

SEQ ID NO: 224552 - protein, 183 aa, Zea Mays
MPLQEQANTVCKKVKKMKELSEGYNIVGLSQGNLIGRAVIEYCDCGPPDMEDYLKGCKFLPKLNNEIPSARNTTYKERFSSLENLVLIMFEDDAVLIPRETAWFGYYPDGAFSPVLPPQETKLYTEDWIGLKTLDEAGRVKFVSVPGGHLRITRSDMKKYIVPYLTPEASSKKNIHIHRMLSL

SEQ ID NO: 224553 - protein, 147 aa, Zea Mays
MDPPRAVAFLLILLPVLAPVASGVPFVVLHGIGDECGNDGLSSFTKMLGEWSGSKGYCIEIGRGAWDSWLMPLQEQANTVCKKVKKMKELSEGYNIVGLSQGNLIGRAVIEYCDCGPPVKNFISIGGPHAGTASVPLCGLRTSTRSL

SEQ ID NO: 224554 - protein, 344 aa, Zea Mays
MFTAREMGKVFFTNSGSEANDSQVKLVWYYNNALGRPDKKKFIARSKSYHGSTLIAASLSGLPALHQKFDLPAPFVLHTDCPHYWRFRLPDETEEEFSTRLANNLENLVLKEGPETIAAFIAEPVMGAGGVILPPKTYFEKIQAVLKKYDILLIADEVITAFGRLGTMFGCDMYNIKPDLVSIAKALSSAYMPIGAILVSPEITDVIYSQSNKLGSFAHGFTYSGHPVSCAVAVETLKIYKERNIVEHVNKIAPRFQEGIKAFSGSPIVGEIRGLGLILGTEFVDNKSPNDPFPAEWGVGSIFGAECEKRGMLIRVAGDSIMLSPPLIMTPNEVEEKPDCPLRS

SEQ ID NO: 224555 - protein, 53 aa, Zea Mays
MLLVVTTVRMVMAVSNIQCIFKLYFSKVLGWNLVVGCIATVVPCYGAISNASA

SEQ ID NO: 224556 - protein, 156 aa, Zea Mays
MGVSEEAARVWAELPVRVDWAAAAAQCASLWAHARALLVAPAVRVLVLLSLAMTVMILAEKLFVCAVCLAVRALRLGPDRRYRWEPIGGGVGDEEEESGSGHGAKYPMVLVQIPMYNEREVYKLSIGAACELEWPSERFMIQVLDDSTDPVVKIRF

SEQ ID NO: 224557 - protein, 107 aa, Zea Mays
MESSRSRKRTRQAHDCAAAPPPEREVVARGGASPPWREDDRDGHFVFDLGENLTRRYKILSKMGEGLGFLQSVVSSSAGYLRYYSNEEGYELDFRRYIWACFGMLGP

SEQ ID NO: 224558 - protein, 175 aa, Zea Mays
MYICFDIIFFHMTNLWASLFSYYQYTNDVRQIPPARVLGDYIVFSIVFLDFEVLSMSKLGYDGVVALLVADISLSIGLDQIEALYQYAQFQFECGNYSGAADYLYQYGALCTNSERNVSALWGKLAAEILMQNWDLALEELNRLKEIIDSKVLTSMFCSVFFVLCVHYITNHVPS

SEQ ID NO: 224559 - protein, 173 aa, Zea Mays
MQLSGLASNRPQPLCIPRVCGADEHVDVQIPPARVLGDYIVFSIVFLDFEVLSMSKLGYDGVVALLVADISLSIGLDQIEALYQYAQFQFECGNYSGAADYLYQYGALCTNSERNVSALWGKLAAEILMQNWDLALEELNRLKEIIDSKVLTSMFCSVFFVLCVHYITNHVPS

SEQ ID NO: 224560 - protein, 320 aa, Zea Mays
MSTNKGSAAKGGGGKKKEVKKETKLGMAYKKDDNFGEWYSEVVVNSEMIEYYDISGCYILRPWAMEIWELLKEFFDAEIKKLKLKPYYFPLFVTENVLQKEKDHIEGFAPEVAWVTKSGKSDLEAPIAIRPTSETVMYPYFSKWIRSHRDLPLRCNQWCNVVRWEFSNPTPFIRSREFLWQEGHTAFATKEEADEEVLQILELYRRIYEEFLAVPVSKGRKSEMEKFAGGLYTTSVEAFIPNTGRGIQGATSHCLGQNFAKMFDITFENEKGVREMVWQNSWAYTTRSIGVMVMTHGDDKGLVLPPKVAPIQVGSIPTGK

SEQ ID NO: 224561 - protein, 372 aa, Zea Mays
MYPYFSKWIRSHRDLPLRCNQWCNVVRWEFSNPTPFIRSREFLWQEGHTAFATKEEADEEVLQILELYRRIYEEFLAVPVSKGRKSEMEKFAGGLYTTSVEAFIPNTGRGIQGATSHCLGQNFAKMFDITFENEKGVREMVWQNSWAYTTRSIGVMVMTHGDDKGLVLPPKVAPIQVIVIPVPYKDADTTAIKGACESTVYTLDQSGIRADQDTRENYSPGWKYSHWEMKGVPLRIEIGPKDLANKQVRVVRRDNGAKVDIPVTNLVEEVKVLLDEIQKNLFKTAQEKRDACVHVVNTWDEFTTALNNKKLILAPWCDEEEIEKNVKTRTKGELGAAKTLCTPFEQPELPEGTLCFASGKPAKKWSFWGRSY

SEQ ID NO: 224562 - protein, 285 aa, Zea Mays
MEKFAGGLYTTSVEAFIPNTGRGIQGATSHCLGQNFAKMFDITFENEKGVREMVWQNSWAYTTRSIGVMVMTHGDDKGLVLPPKVAPIQVIVIPVPYKDADTTAIKGACESTVYTLDQSGIRADQDTRENYSPGWKYSHWEMKGVPLRIEIGPKDLANKQVRVVRRDNGAKVDIPVTNLVEEVKVLLDEIQKNLFKTAQEKRDACVHVVNTWDEFTTALNNKKLILAPWCDEEEIEKNVKTRTKGELGAAKTLCTPFEQPELPEGTLCFASGKPAKKWSFWGRSY

SEQ ID NO: 224563 - protein, 127 aa, Zea Mays
MYTDLATIYERAGRIEGRTGSITQIPILTMPNDDITHPTPDLTGYITEGQIYIDRQLHNRQIYPPINVLPSLSRLMKSAIGEGMTRRDHSDVSNQLYANYAIGKDVQAMKAVVGEEALSSEDLVCCE

SEQ ID NO: 224564 - protein, 241 aa, Zea Mays
MAAVASSFSRFSFRCAVCPSPLRVRFSQPHPPARLRVSSTVVALHKRNPKRLKYAAERQFTRGDAGLLRVEVEPSGGDFWKLDPIIDLINRGAVGVIPTDTVYSVVCDLSNNESIERLRRLKGIGDSKPLSILCRSLRDIDTYTTGFPQGTNQGQANIFRVVKRAIPGPYTFILPASKQFPKQCIKHGSSTRYAKRRQVGVRIPDDPICQAILQNLDEPLICTRGLILLLMADLELLTLLP

SEQ ID NO: 224565 - protein, 167 aa, Zea Mays
MAAVASSFSRFSFRCAVCPSPLRVRFSQPHPPARLRVSSTVVALHKRNPKRLKYAAERQFTRGDAGLLRVEVEPSGGDFWKLDPIIDLINRGAVGVIPTDTVYSVVCDLSNNESIERLRRLKGIGDSKDFLKALTKGKLTFFVLSSVQYLGLTHLFYLQASSFLNNV

SEQ ID NO: 224566 - protein, 129 aa, Zea Mays
MSQLSPAGHMAATLLLILLASAAAAAVSADQQVSACQNDIDALWRSCKQFVQKEGPKMPPSEDCCKTIKALDAHASCICDYVGSPDARNKLDLDKVFFVTKQCGVTVPKGCAAREGPACRCQSAHAPRG

SEQ ID NO: 224567 - protein, 119 aa, Zea Mays
MSQLSPAGHMAATLLLILLASAAAAAVSADQQVSACQNDIDALWRSCKQFVQKEGPKMPPSEDCCKTIKALDAHASCICDYVGSPDARNKLDLDKVFFVTKQCGVTVPKGCAATHVKIK

SEQ ID NO: 224568 - protein, 209 aa, Zea Mays
MQYGLNSMSVMTILGFAQRGQKKTQYLFPGSPKTMRKRWLVLLPSLNSLQVFKMDIKGRKKQTASHTSAHISPTQIDMESWPGLPSLNPTLDRNYSDDNIASTYLDFCAATSLQEVTRNSTEQLDGKSEVFGNDQEEKSNSFLDCDWGNIGGFDDFDRLFSHSDSIFGNEIVANDSDFLSASSNLMDTAVLSIPVPFCSSWFSQAHYKS

SEQ ID NO: 224569 - protein, 244 aa, Zea Mays
MAQYCLGNTLGRPTNRIEIRVRHGVPHSRTASVPHSCLLGRRPLLPVLQPPGLQPLGASDSSRSSRQLRCSADLLVRLTGCLVPPAAGCGLLAAWSRRGADPHGRTAAACRCFLLGRTSACLVVCLADCLMLSASSCLLASCFYASSCLIVTCETCEQSIERSKVAHEYLFDYPHLKSYFSQASSGSRLSTRADGVCNEPRIQVGVQENNSEDANGENVNGQVEDFIRHMTFGCKWIVIKMTIK

SEQ ID NO: 224570 - protein, 267 aa, Zea Mays
MRDDNSSKNKLSWSKTLVRKWFNIKTKAKDFHSDYAAEEAGVQWRTSFSDRDACKSKKSRTERLTKRNVERDGRVENGFDGAYITNTQDYRVFVATWNVGGRSPSSHLNLEDWLHTSPAADIYVIGFQEIVPLNAGNVLLTEDNGPAKKWVSLVRKTLNNLDQQGSGVYNYHTPSPAPDPIVELNVDFERSSRRQRNSSFFHRRSFQSLNRSSRIDMMDPHSLVDRRFSVCDRISFGSRPSDVDTSVRCGGSSDDETIDEESPSGIA

SEQ ID NO: 224571 - protein, 594 aa, Zea Mays
MEKKTVHVLAEGNGEIENGTSSSQNPETLEHPVLLSASQTVPNNLGIRKNYKRAANRGSKTTSTEHVQPPGQPAAKRRKRSRASNKNSTDEFSQIRKRVRYILNRMNYEQSLIEAYASEGWKNQSLDKIRPEKELERAKSEILRCKLRIREVFQNIDSLLSKGKIDESLFDSEGEISCEDIFCATCGSKNATLGNDIILCDGACDRGFHQNCLNPPLRTEDIPMGDEGWLCPACDCKLDCIDLINELQGSDISIEDPWEKVFPEAAAMANSSKQDEAFDLPSDDSDDNDFDPNMPEEHVASKEEGSSEEEEDDDGGSDSDDSDFLTCSDDLEPLIDKKNVDDLGLPSEDSEDDDYDPAGPDSDKDVEKKSNSDESDFMSDSDDFCKEIKKSGGHDEVSSPPLPDVKVGDMEKNTAQSNTTSSADDPMETEIDQSVVLPVSRRRQAERLDYKRLYDEAYGEASSDSSDEEEWSGKNTPIKSNEEGEVGSPAGKGSRVAHHNELTTQNTKESLHSLHGSVDEKHGDLTSNGSNIKDRKGHFGPVISQKLHEHFKTQPYPSRSLKESLAEELGLTFHQVGSYHFLTAWFPLLYCHWI

SEQ ID NO: 224572 - protein, 659 aa, Zea Mays
MEKKTVHVPAEGNGEIENGTSSSQNPETLEHPVLLSASQTVPNNLGIRKNYKRAANRGKKGSQGLTGQPAAKRRKRSRASNKNSTDEFSQIRKRVRYILNRMNYEQSLIEAYASEGWKNQSLDKIRPEKELERAKSEILRCKLRIREVFQNIDSLLSKGKIDESLFDSEGEISCEDIFCATCGSKNATLGNDIILCDGACDRGFHQNCLNPPLRTEDIPMGDEGWLCPACDCKLDCIDLINELQGSDISIEDPWEKVFPEAAAMANSSKQDEAFDLPSDDSDDNDFDPNMPEEHVASKEEGSSEEEEDDDGGSDSDDSDFLTCSDDLEPLIDKKNVDDLGLPSEDSEDDDYDPAGPDSDKDVEKKSNSDESDFMSDSDDFCKEIKKSGGHDEVSSPPLPDVKVGDMEKNTAQSNTTSSADDPMETEIDQSVVLPVSRRRQAERLDYKRLYDEAYGEASSDSSDEEEWSGKNTPIKSNEEGEVGSPAGKGSRVAHHNELTTQNTKESLHSLHGSVDEKHGDLTSNGSNIKDRKGHFGPVISQKLHEHFKTQPYPSRSLKESLAEELGLTFHQVNRWFENRRHFARLASSRKGISPDKHSPQNTNSPVTPSMQPKEPEGTVMEESNVCINRDATISKKAVSSKVGSRKNLSKSSPKSRVRS

SEQ ID NO: 224573 - protein, 658 aa, Zea Mays
MKPKSLPFIAFEHKRDAYGFAVRPQHLQRYKEYAGIYKEEEEERSDRWKNFLERQPESSGQDAGDNATGDGSESLHEKTVAGPQKIQIWTPIRSSLSNIEQIMSLRIGKKQSSAGKQQAKDGTHHVKGEESKLSEDSDDEFYDVDKVDLSQEAQSSDTRNADVGSRNQEENYISREELECLVHGGLPMVLRGELWQAFVGTGARRIEGYYDSLAAEGELDNKSSPTSEGVQEKWIGQIDKDLPRTFPGHPALDEDGRNALRRLLIAYAKHNPSVGYCQAMNFFAGLLLLLMPEENAFWTLVGIMEDYFDGYFSEEMIESQVDQLVLEELVREKFPKLANHLDYLGLQVAWVTGPWFLSIFTNVLPWESVLRVWDVLLFDGNRVMLFRTALALLEFYGPALVTTKDAGDAVTLLQSLAGSTFDSSQLVLTARMGYQSVNETILQELSNKHRPSVMSAMEERAKGLGVWTDTNGLASKLYNFKRDPEPLVSLSNSADQLSDVGDGDANQESDPVNMDDEYVGVTVKSEIDSLPDPKDQVAWLKLELCQLLEERRSAVLRADELETALMEMVKQDNRRQLSAKVEQFEQEISEFREALSDKQEQEQAMFQVLMRVEQELKIAEEARISAEQDAAAQRYAANVLQKSTRKLWLHLPKWRTEL

SEQ ID NO: 224574 - protein, 188 aa, Zea Mays
MRELGVSWDVELYGELLRIGGGKERMTAYFNQTGWPAKAPKTDDKRKEFIASLHKRKTELFMALIEKKLLPLRPGVQRLIDEALGKAVKVAVCSTSNEKAVSAIVSYLLGPDRADKITIFAGDVVPHKKPDPAIYILAATTLGVDPQSYTAEEDFETADAVFDCIGDPPEVRFDLDFCAKLLKKQYVS

SEQ ID NO: 224575 - protein, 83 aa, Zea Mays
MRELGVSWDVELYGELLRIGGGKERMTAYFNQTGWPAKAPKTDDKRKEFIASLHKRKTELFMALIEKKLLPLRPGVQSFRKGS

SEQ ID NO: 224576 - protein, 215 aa, Zea Mays
MRELGVSWDVELYGELLRIGGGKERMTAYFNQTGWPAKAPKTDDKRKEFIASLHKRKTELFMALIEKKLLPLRPGVQRLIDEALGKAVKVAVCSTSNEKAVSAIVSYLLGPDRADKITIFAGDVVPHKKPDPAIYILAATTLGVDPQSCVVIEDSTIGLAAAKAAGMKCIVTKSGYTAEEDFETADAVFDCIGDPPEVRFDLDFCAKLLKKQYVS

SEQ ID NO: 224577 - protein, 561 aa, Zea Mays
MAPVAAPIRDLLTSFSPGADFLALSSGDGRIKVWDAVRGRLQTEFADIPAVEAVAVAESKRGHLALDYTCMKWVQLSSKKKRKAGSSLIVLGTGSGDVLALDVAAGHWKWKVSDCHPGGVTAVEYSKHGRNVYTAGADGMVCRIDASNGAVVGKFKSSSKAISALAVSSDGNMLATAAGQLRTFDTSSNKKIKKFSGHPVAVRSMVFSNDSQYVLSSGVGERYIAIWKLGSGKTQSSNCILSMEHPAMFVDCKCSDKGEIHILAISEIGVCYFWSANVVDDLRNKKPTKIILSESSVSTTHQALSIFAAKLQGVDGPNSAHVLLAYGSVVKPSFDKLLVCYGTDISLGISQDGVLLPNTQTTMAKKGQSVKKHETVIALDRANAEDAILPLPKLHTQEKKRKHGVTKPSGDVEPEIHSDLTTTRSIHKRVPVQRIEDDSTCIEDMMRECGIIETRVDESMKGHAGIPFNILSCLFGDGSIKVDANLPSKKIRGHLRSLKPGDACKLLDKLVSAWKTRSGSTELVLRWIYCLLVIHGRFICSEESINNLEKAGTNLTPAQSR

SEQ ID NO: 224578 - protein, 422 aa, Zea Mays
MVCRIDASNGAVVGKFKSSSKAISALAVSSDGNMLATAAGQLRTFDTSSNKKIKKFSGHPVAVRSMVFSNDSQYVLSSGVGERYIAIWKLGSGKTQSSNCILSMEHPAMFVDCKCSDKGEIHILAISEIGVCYFWSANVVDDLRNKKPTKIILSESSVSTTHQALSIFAAKLQGVDGPNSAHVLLAYGSVVKPSFDKLLVCYGTDISLGISQDGVLLPNTQTTMAKKGQSVKKHETVIALDRANAEDAILPLPKLHTQEKKRKHGVTKPSGDVEPEIHSDLTTTRSIHKRVPVQRIEDDSTCIEDMMRECGIIETRVDESMKGHAGIPFNILSCLFGDGSIKVDANLPSKKIRGHLRSLKPGDACKLLDKLVSAWKTRSGSTELVLRWIYCLLVIHGRFICSEESINNLEKAGTNLTPAQSR

SEQ ID NO: 224579 - protein, 334 aa, Zea Mays
MAPVAAPIRDLLTSFSPGADFLALSSGDGRIKVWDAVRGRLQTEFADIPAVEAVAVAESKRGHLALDYTCMKWVQLSSKKKRKAGSSLIVLGTGSGDVLALDVAAGHWKWKVSDCHPGGVTAVEYSKHGRNVYTAGADGMVCRIDASNGAVVGKFKSSSKAISALAVSSDGNMLATAAGQLRTFDTSSNKKIKKFSGHPVAVRSMVFSNDSQYVLSSGVGERYIAIWKLGSGKTQSSNCILSMEHPAMFVDCKCSDKGEIHILAISEIGVCYFWSANVVDDLRNKKPTKIILSESSVSTTHQALSIFAAKLQGVDGPNSAHVLLAYGKRKGNMV

SEQ ID NO: 224580 - protein, 380 aa, Zea Mays
MASSSDEQSKPPEPPAAAAVVTAAAPPQTHAEWVASLQAYYAAAGHPYAWPAQHLMAAAAAGAHFGTPVPFPVYHPGAAAAYYAHASMAAGVPYPTCEAVPAVALPTVPEGKGKGKGGGASPEKGSSGAPSGEDASRSDDSGSDESSETRDDDTDHKDSSAPKKRKSGEPSQATVVRYAAVESPYPAKGRSASKLPVSAPGRAALPSATPNLNIGMDIWNASPALAVPAVQGEVSPGLALARRDGVTQLDEREIKRERRKQSNRESARRSRLRKQQECEELARKVADLTTENSALRAELDNLKKACQDMEAENSRLLGGVADAQVPSVTTTLGMSIEPPKLQLQLQQHHDEEGQLHKKSSNNSNGNCAGGSHKPEANTTR

SEQ ID NO: 224581 - protein, 91 aa, Zea Mays
MPMSHSLLCNWNSMQYPDLKPPSTPTPPSVESEVETKASSTVTEGPAVVNSAPIADAATGSSPATTRPRPQSPYPNYPDFKPPSSPSPSAP

SEQ ID NO: 224582 - protein, 394 aa, Zea Mays
MLAKLVSGMHKPAQQTVVPSSSVQDLLASLPVKKMKQLGGKLGSSLQDDLGVETIGDLLSFTEEKLQEQYGVNTGTWLWKTARGISGEEVEDRLLPKSHGCGKTFPGPRALKYSASVKGWLDQLCEELSERIQSDLNQNKRIAQTLTLHARAFKKNEHDSMKKFPSKSCPLRYGTGKIQEDAMRLFESGLHEFLESQNTGWGITSLSVTASKIFDIPSGTSSILRYIKGPSSAAALTIPDSPSSAAALAIPDSSFVPEDPSLDNDVFVEPIHEEECQPSTSEKEDDNNTHSASAFSAKKCRANEEKRISKKLPGVQVSCSFLLGGYHQTDFLLVILKLLVNEDLIFLLLLFACFRATKQHQCLIFKLEGGITSPKLMLGIAFCIRNDQIEGFYF

SEQ ID NO: 224583 - protein, 172 aa, Zea Mays
MPPSASMPATHTAVYVAAVPLRAPKGPAQLLMSAGYSLGMWDLQHFMVLLRPDPALAQALVFDFQPRDPEDVLAALAVLSRREIPEERCGGSRTGGAGSWGTAATPSVPPQGSASGGRPAWWSGSTTAGTTPTMDDLNCTDYGHISDSINWRPNTQCRNFMETRRRFEREKK

SEQ ID NO: 224584 - protein, 334 aa, Zea Mays
MLLQCLDLDKMDKKPSKILWDVPWEEVLSLELAKAGYQRPSHVIIHLKNFRRSENFVRLIKCNIDNEREPQALSLCCSIRKMWRSHQAAMKVIPLKVPSGQRHVYFVSDDDKKESHSLSRPLLSSGGTSTDVEQQFINNTVHFQKMWSSEPEIQSRCKLVAKQIADDGRVFSIWRPLCPNGYVSIGDIAHVGIHPPHFAAVYKNINGNFALPLGYDLVWRNCAEDYKSPVSIWLPRPPGGYVALGCVAVPSFKEPTLDCAFCVDERLAEDAAYEEQIIWASSDAYPWGCYIYQVQSASMQFMALRVPKEQSELRPKKILESFLQQASETQTSRA

SEQ ID NO: 224585 - protein, 356 aa, Zea Mays
MAGECSSSFLQAPPPLAEQLPQDARVGEQPPPGSEAGGDEQARVPDLGEDLVFEVLMRAEARTLAAAACVSRGWRLLARDERLWEAACVREWAYTGFSEQMLRSVVLSLGGFRRLHEMYIRPVQQRAAGAPPGQQRRQLPVRMGRDQVQVSLSLLSTSFFLKMPNAPPPPPKDKDRDRDKNGGGQSFNSKISLEIRVDSEKYEELIEFMEKVAKTVDSEEHYVLSIAYKIVMEPNVLHGASYPPLSRGKKAVSTWTVSLSLRTTITRLKLNSARSVMESSSSLIPTVSASLTAAESKVFYLKMKGDYYGIFLVEFMCIRYLAEFETGSRRKDAARIPWILLWRNWPPPILLGFGWC

SEQ ID NO: 224586 - protein, 127 aa, Zea Mays
MEKVAKTVDSEEHYVLSIAYKIVMEPNVLHGASYPPLSRGKKAVSTWTVSLSLRTTITRLKLNSARSVMESSSSLIPTVSASLTAAESKVFYLKMKGDYYGYLAEFETGSRRKDAARIPWWHTNLLR

SEQ ID NO: 224587 - protein, 269 aa, Zea Mays
MNKDAVLEAAKKAKEAGSTRFCMGAAWRETIGRKTNFNQILEYVKEIRGMGMEVCCTLGMIEKQQAEELKKAGLTAYNHNLDTSREYYPNIITTRSYDDRLQTLQHVREAGISICSGGIIGLGEAEEDRVGLLHTLATLPTHPESVPINALVAVKGTPLEDQKPVEIWEMIRMIATARIVMPRAMVRLSAGRVRFSMPEQALCFLAGANSIFAGEKLLTTANNDFDADQAMFNILGLIPKAPSFGEEEAAAAAVAAPVCTERSEQAASM

SEQ ID NO: 224588 - protein, 149 aa, Zea Mays
MVFSSNKIIIWMDGWMVFKRLACPVLPFVPSSPRASACSHFPLLRFDFEPGIIFTCCFVPLLCASVLPQIPLGRFASARRWERAEYGLAGLFSLRCILPAILVFVLIRYRPRLLSVWVAGLGPIGVVRVRHDGVWRGDTGRSVFCQIRR

SEQ ID NO: 224589 - protein, 113 aa, Zea Mays
MSAKIRVVMKSFMSQSNQVSGLMPFTKKIGLPESRALYTVLRSPHIDKKSREQFSMHVKKQFVEQTAKPHELHRKFFWLKRLRIPGAQYEIQISFKTRLDMASLRQILGHSPY

SEQ ID NO: 224590 - protein, 775 aa, Zea Mays
MVVRTFREKDIPCDVVWMDIDYMDGFRCFTFDSIRFPDPISMVDDLHSIGCKAIWMLDPGIKKEEGYFVYDSGSKSDVWIQKADGSPFVGEVWPGDCVFPDYTSEKTRAWWASLVKDFISIGVDGIWNDMNEPAVFKTTTKTMPESNIHRGDADIGGVQNHSYYHNVYGMLMARSTYKGMEMGNAAKRPFVLTRAGFIGSQRYAATWTGDNLSNWEHLHMSLPMVLQLGLSGQPLSGPDIGGFAGNATPKLFGRWMGVGALFPFSRGHTETGSIDHEPWSFGKECEEVCRLALLRRYRLLPHIYTLFYHSHTKGIPVATPVFFADTQDPELRKVETSFLLGPLLVCASTLPNKGAHEYAHKLPKGIWLSFDFADSHPDLPVLYLQGGAILPVGLPIKHVSEASLEDDLSLIIALNENGKAEGVLFEDAGDGYAFTQGDYLLTYYIAELHSSVVTVKILKSEGSWKRPKRNLKINILLGGGAMISTDGVDGEVIHLTMPSESVVSSLVATSEFEHKKRMEMIQPIPDIEEPSGQEGAELSKIPVDLKSGDWFLKIVPWIGGRIISMAHIPSDSQWLHSRIEINGYEEYSGAEYRSAGCTEEYKVIRRHLEQSGEEESICMEGDIGGGLVLQRQISILKDNPKIVQIDSSIQARSVGAGSGGFSRLVCLRVHPTFTLLHPTEVVVAFTAINGSKQEISPEAGEITFEGDLKPNGEWMLVDKCVGLSLVNRFNPREVSKCFVHWGTGDVNMELWSEERPVSNETPLRICHQYEVQQTT

SEQ ID NO: 224591 - protein, 599 aa, Zea Mays
MGWSPRPPPITRSTASLRLVPHFSHFRFSFHRAQESRGGGGSRRRTLRCCGGTAPAAAAGAAEGRMAAATAADMVWVRVLEDGVFRFDASEAARAAAGPSLSFADPRRREAPHDGADMPAVVPVCEVAAGGSQKVVIKLPPGTSFYGTGEASGPLERTGKRVFTWNTDAWGFGPGTTSLYQSHPWVLAVLPDGKALGVLADTTRRCEIDLRQESTIKFSALSAYPVITFGPFNTPADVMTSLSHAIGTVSMPPKWSLGYHQCRWSYDSSEKVLKVVRTFREKDIPCDVVWMDIDYMDGFRCFTFDSIRFPDPISMVDDLHSIGCKAIWMLDPGIKKEEGYFVYDSGSKSDVWIQKADGSPFVGEVWPGDCVFPDYTSEKTRAWWASLVKDFISIGVDGIWNDMNEPAVFKTTTKTMPESNIHRGDADIGGVQNHSYYHNVYGMLMARSTYKGMEMGNAAKRPFVLTRAGFIGSQRYAATWTGDNLSNWEHLHMSLPMVLQLGLSGQPLSGPDIGGFAGNATPKLFGRWMGVGALFPFSRGHTETGSIDHEPWSFGKECEEVCRLALLRRYRLLPHIYTLFYHSHTKGIPVATPVFFAGN

SEQ ID NO: 224592 - protein, 750 aa, Zea Mays
MGSACQAGTDGPSRKDVLGIGNAALENGHHQAEADADEWREKEEDLANNGHSAPPPGMQQVDEHKEEQRQSIHWERFLPVKTLRVLLVENDDSTRQVVSALLRKCCYEVIPAENGLHAWRYLEDLQNNIDLVLTEVFMPCLSGIGLLSKITSHKICKDIPVIMMSTNDSMSMVFKCLSKGAVDFLVKPLRKNELKNLWQHVWRRCHSSSGSESGIQTQKCAKLNTGDEYENGSDSNHDDEENDDGDDDDFSVGLNARDGSDNGSGTQSSWTKRAVEIDSPQPISPDQLVDPPDSTCAQVIHPRSEICSNKWLPTANKRNVKKQKENKDESMGRYLGIGAPRNSSAEYQSSLNDVSVNPIEKGHENHMSKCKSKKETMAEDDCTNMPSATNAETADLISSIARNTEGQQAVQAVDAPDGPSKMANGNDKNHDSHIEVTPHELGLKRSRTNGATAEIHDERNILKRSDQSAFTRYHTSVASNQGGARYGESSSPQDNSSEAMKTDSTCKMKSNSDAAPIKQGSNGSSNNDVGSSTKNVAARPSGDRERVASPLAIKSTQHASAFHTIQNQTSPANLIGEDKADEGISNTVKMSHPTEVPQGCVQHHHHVHYYLHVMTQKQPSTDRGSSDVHCGSSNVFDPPVEGHAANYSVNGGVSVGHNGCNGQNGSSAVPNIARPNIESINGTMSQNIAGGGIVSGSGSGNDMYQNRFLQREAALNKFRLKRKDRNFGKKVACFQLHACCSYDLKSVIVI

SEQ ID NO: 224593 - protein, 750 aa, Zea Mays; identical to SEQ ID NO: 224592

SEQ ID NO: 224594 - protein, 744 aa, Zea Mays
MGSACQAGTDGPSRKDVLGIGNAALENGHHQAEADADEWREKEEDLANNGHSAPPPGMQQVDEHKEEQRQSIHWERFLPVKTLRVLLVENDDSTRQVVSALLLIPAENGLHAWRYLEDLQNNIDLVLTEVFMPCLSGIGLLSKITSHKICKDIPVIMMSTNDSMSMVFKCLSKGAVDFLVKPLRKNELKNLWQHVWRRCHSSSGSESGIQTQKCAKLNTGDEYENGSDSNHDDEENDDGDDDDFSVGLNARDGSDNGSGTQSSWTKRAVEIDSPQPISPDQLVDPPDSTCAQVIHPRSEICSNKWLPTANKRNVKKQKENKDESMGRYLGIGAPRNSSAEYQSSLNDVSVNPIEKGHENHMSKCKSKKETMAEDDCTNMPSATNAETADLISSIARNTEGQQAVQAVDAPDGPSKMANGNDKNHDSHIEVTPHELGLKRSRTNGATAEIHDERNILKRSDQSAFTRYHTSVASNQGGARYGESSSPQDNSSEAMKTDSTCKMKSNSDAAPIKQGSNGSSNNDVGSSTKNVAARPSGDRERVASPLAIKSTQHASAFHTIQNQTSPANLIGEDKADEGISNTVKMSHPTEVPQGCVQHHHHVHYYLHVMTQKQPSTDRGSSDVHCGSSNVFDPPVEGHAANYSVNGGVSVGHNGCNGQNGSSAVPNIARPNIESINGTMSQNIAGGGIVSGSGSGNDMYQNRFLQREAALNKFRLKRKDRNFGKKVACFQLHACCSYDLKSVIVI

SEQ ID NO: 224595 - protein, 557 aa, Zea Mays
MSLRTFGSMFGGDATVGSESGIQTQKCAKLNTGDEYENGSDSNHDDEENDDGDDDDFSVGLNARDGSDNGSGTQSSWTKRAVEIDSPQPISPDQLVDPPDSTCAQVIHPRSEICSNKWLPTANKRNVKKQKENKDESMGRYLGIGAPRNSSAEYQSSLNDVSVNPIEKGHENHMSKCKSKKETMAEDDCTNMPSATNAETADLISSIARNTEGQQAVQAVDAPDGPSKMANGNDKNHDSHIEVTPHELGLKRSRTNGATAEIHDERNILKRSDQSAFTRYHTSVASNQGGARYGESSSPQDNSSEAMKTDSTCKMKSNSDAAPIKQGSNGSSNNDVGSSTKNVAARPSGDRERVASPLAIKSTQHASAFHTIQNQTSPANLIGEDKADEGISNTVKMSHPTEVPQGCVQHHHHVHYYLHVMTQKQPSTDRGSSDVHCGSSNVFDPPVEGHAANYSVNGGVSVGHNGCNGQNGSSAVPNIARPNIESINGTMSQNIAGGGIVSGSGSGNDMYQNRFLQREAALNKFRLKRKDRNFGKKVACFQLHACCSYDLKSVIVI

SEQ ID NO: 224596 - protein, 280 aa, Zea Mays
MGVLNLTPDSFSDGGKFLEVGAAISQAKSLISEGADIIDIGAQSTRPFAKRLSPNEELERLVPVLDEITKIPEMEGKLLSVDTFYAEVASEAVKRGAHMINDVSSGQLDPRILKVAAELGVPYVAMHMRGDPSTMQSEQNVHYDNVCKEVALELYTQVREAELSGIPLWRLVLDPGIGFSKKSGHNLEVIMGLESIRREMGKMSIGASHVPILLGPSRKSFLGEICNRANPVERDVATVAAVTAGILNGANIVRIHNAGYGVDAAKVCDALRKRKGSCRN

SEQ ID NO: 224597 - protein, 670 aa, Zea Mays
MVKFTAEELRAIMDKKNNIRNMSVIAHVDHGKSTLTDSLVAAAGIIAQEVAGDVRMTDTRADEAERGITIKSTGISLYYEMTDESLKNYKGVCVQTETVLRQALGERIRPVLTVNKMDRCFLELQVEGEEAYQTFSRVIENANVIMATYEDKLLGDVQVYPEKGTVAFSAGLHGWAFTLTNFAKMYASKFGVDETKMMERLWGENFFDPATKKWTTKNTGSPTCKRGFVQFCYEPIKQIIKTCMNDQKEKLWPMLQKLNVTMKADEKELIGKALMKRVMQTWLPASTALLEMMIFHLPSPAKAQKYRVENLYEGPLDDVYATAIRNCDPEGPLMLYVSKMIPASDKGRFFAFGRVFSGKVATGMKVRIMGPNYVPGQKKDLYVKSVQRTVIWMGKKQESVEDVPCGNTVAMVGLDQFITKNATLTNEKETDACPIRAMKFSVSPVVRVAVQCKVASDLPKLVEGLKRLAKSDPMVLCTMEESGEHIIAGAGELHLEICLKDLQEDFMGGAEIIVSPPVVSFRETVLEKSCRTVMSKSPNKHNRLYMEARPLEEGLAEAIDDGRIGPRDDPKICARECSISMKSRILLWLVSSGHQRRVHWLRRTCVEFALRYVMSFFMLMLSTGVVVRSFPLPGGSSMPLSSRPSQGCWSQSTWWRSRPQKMHLVVSTVF

SEQ ID NO: 224598 - protein, 865 aa, Zea Mays
MDSESPRDAYGFTVRPQHLQRFREYAKIYKEEEEERAHRWRDFLDRLAESANVPTTPSVSPYAATDDGASGAGQTQGNNGIGIHCDDEEVGSENAEDNNKFESPKEADASGESREPNGKPGDLKDVTKLDKVQEETGSSSTQAIKDLEGLMEASGDFEELRDLNGIPEELEEENNGNLEKLVELFLDKGLLDELKPIKVESQWRVRAALSIIDKMMSSRVVKGGNGANDIHRKDGPQLTSIEEEGMTAEVSHDGYPAEVEESCVAEKVELGQETTDDSTGTALDRDNDGSYFLWREELESLVRGGVPMALRGEIWQAFAGVSARRITGYYNNLLDDRTAILDEKDPVDPVVNEQRSAPRKATQPEKWKGQIEKDLPRTFPGHPALDEDGRNALRRLLTAYARHNPSVGYCQAMNFFAGLFLLFMPEENAFWALVGVIDDYFDGYYTEEMIESQVDQLVLEEVVRERFPKLAKHMDFLEVQVGWVTGPWFLSIFVNMLPWESVLRVWDVILFEGNRRMLFRTTLALLDLYGPALVTTKDAGDAITLLQSLAGSTFDSSQLVLTACMGFQSVGEMGLQELRKKHRPEILTAMEERSKDRGSWKDKKGLATKLYSFKHDPSFVCSPVKSKEGLDGSKVNGETGPANLKTYLSTSSILDTDLDQGVDLQDQVSWLKIELCKLLEEKRSADLRGEELETALMEMVKHDNRRMLSAKVEKLEAEVYELRKVFSYKQEQEQITLQILLRMEQEQKVAEDARIVAERDAAEQTCAAHLLQEKYEATMAALSQMEKRAVMAETMLEATKQYQAGQVKANQSFTSSSPRAEHVLGKINQEPNQDMSNRRIGLLSRGLGWLDKSKGRQNSTETSGG

SEQ ID NO: 224599 - protein, 254 aa, Zea Mays
METRPAPCDLEAAVPAGSGAATAAAAQQEAPAAKKVAEEEDPRLRWAFVRKVYAILSLQFALTAAVAATACLVRPIPRFFASGPPAAVLEWTTDRGFVCAVMFPMLKYREKHPRNLVLLAVFTLCCSLSIAVSASTTLVVLQATILTAAAVLGLTLFTFWGVKRGYDFTFTFPFLFACLVVLLVYIIIQVCFPLGRVAMTIYGVLATVVFSGFIVYDTNKLLKRHAYNQYVVAAISLYLDVINLFMAQMAISFQ

SEQ ID NO: 224600 - protein, 1791 aa, Zea Mays
MSSGAIGASDPGGGETKPVAGGDVTTSEAAGEVPAFAADVKVEGKATLATDVDREGGDTAVSDPLYANESAGMVGAEGHGDEPAEGLEAVNGEEEMLEAGARDLLTETEKNPVLVVHVPAAAAGGGSAIPEHAEAESNKVEDHVNVEPGTKNNESDNGIAHFDKEIQNNVPDDIEESSKEHEGDGAPVVDQTNNASEMLPQTGEQFPDVENSTDSNLEAASLGSVDQGARYCLPPHDKGGFQVADLVWGKVKSHPWWPGEIFDPSDASELALKHQKKGSHLVAYFGDNTFAWCDESQLKPFVTNYSQMEKQSSSDAFVGSVNNALEELSRRILSGMSCSCLPEELADNGMSYTVDNAGLKDGVTCSAVNRPEILNCFSPENLLHYIKELALFPGQGGDLLELVIACSQLTSFYRSKGCPELASFQTGDAWVEDGLDCTDTLSTQNVMVEEPVINEVHPTQDKPKRGRGRPRKQKPGGDQVVMEKRSISNQVNDTSYNEKQVGMDFDNYGNLQNKNKRNFESFEDSEKSSAPTGGSSFKIGECIRRAASQLTGSPSIMKAQNAAEGENGEFDIFSDDAGDELTVEKRAKRRSLHRNHTADPKELLSQLCLVATEPMNGYNFSVMIISYFSDYRNYIVSTTTEANIVDKGTSRRGRKRKEVLPSPDVETTDHMQDSYWSGLSLHNHPIHDLRKESPTTRPRRRRRSSSHAYVPLSELGEPVPKKQIQVMERSIIHVDEKMIDELKPTALVLSFARSASIPSELDLVKMFSRFGPLKEREAEVHRETNTVKVVFKKRADAERAFSAAGKYGTFGPSLRSYRLVSMPFSLETQSANNPVKHPENHGMEIPGSNQSEAPKDSMEVDLVQKTDEVEVAGEPSSEEVETVRQISQVQAADSTFVSQDRFDEAGNIDAELIDHVNQIGKAAQAASVSEESRDVEQVYTQKEVSANDLPTETEILNSDAITKELPQNAPDNVETDIVEDPKQSHNSRDNAVFEAVIEDPKQSHNSGDNAVFEAVTEAPSTAQDHTEDDTGNEVPEEHMVSLELQSQTPGDLPTETETLHSDAIVKELPHNAPDNMQTDIAEDPKQSHNPGGNAVFDAVTEARSTTQDHTEDDTGNEVPEEDMVSLELQSQTPGDLPTETETLYSDAIVKELPHNAPDNLQTDIARDPKQSHNLGDNAVFEAVTEAPSTAQDHTEDDTGNEVPEEHMVSPELQSQTPGDLPTETETLHSDAMIKELPQNAPNSMQTDIAEDPKQSHNPGDNAVFEAVTEAPSTAQDHTEDDTGNKVPEEHMVSLELQSQTPGDPPTETETLHSDAIVKELPHNAPDNMQTDIAEDPKQSHNPGDAVFEAVTEAPSTAQDHTEDDTGNEVPEEHMVSPELQSQTPGDLPTETETLHSDAIMKELPQIAPDNMQVDIAEHPNQSHNSGDNAVFEAVAEAPSTAHDHTEDDTGNEVPEEDMVSSELQGQTPGEKLVGQSATEQMVGSEDPKPQAENFVAEPVVLGAVGQVEIELESKTTVEVSGEQGYSIEQTVQVEALIEASGGQLEVGRQIPEDESIACATTEHSMVVDETVEAKVVLLDESIENNAAVIGVVEETAEGETKEEASDEKGKIENNEDADKLAPAGKGKIENNEIIIDAPDEKTENKADADTPAGETKEGEITVEETDEKIESKVTAEPVIGETTEGQTAAGEPVEEARTAEDMVEDVKVLDDKSTAAEKPVENATVVAHENSTTVENTLKDAIVAPPDANTTNAEKTAIGATIETQNEDAPAERTIEDTSVEAPDVQAGASE

SEQ ID NO: 224601 - protein, 242 aa, Zea Mays
MQLGPLGFALFFQTRIGPPSLCSAGNGVHRRQAHRQVPPLPLPPHRPVSSPLYPGLTLCLHLALHPPPSPSAAVASTPPDIAVNFTDGMFKGIYHGKQCHAADIPAVLARAWAAGVDRIIVTGGSLKESREALQIAETDGRLFCTVGVHPTRCGEFEESGDPEGHFQALLALAKEGLDKGKVVAVGECGLDYDRLQFCPADMQKKYFEKQFELAEAVKLPMFLHMRAAGEDFCEIMTRNLHR

SEQ ID NO: 224602 - protein, 752 aa, Zea Mays
MDDLEHVILLASDSPAAAAASPSIRAEALAFCARARDESPPSSLLRLCLSGIASSPHAQVHFWCLQSLHDALLRRRLVLPDDLALLRSSLLSLAVSSHAGSPPFLRNKLAQLVALLIRLEYPHVYPSYFIDLLPPAPPQPGPTDMFARVLISLDDDLLSQEYPRNSGEAADAMRVKDSMRAQCVSQIASHWHAAAVTLRTADPAAAAVALDAARRCISWIDVGLVANDVFVPLFFDIAMSPGSASPLAAAAVGCLSGVASKRMDSRAKVGLLRSLLAAQQGLGSPDNGLKMAPLVIAYAAEALECHSRLGPSDADGAAALEMLEEVLPAVFAAAESGNDEDVDSGSVLEFLSGYVSTMKAPSEKQLGHLGRILEVVRVQMSFDPVYRGHLDVLDKIGKEEEDLMAEQRKDLIVLFRSICRVAPAAAQLFISGLIVTALSSAEASVEDVEVALTLFFRLGEAVGEEEIRTGAGLIGQLVPMLLTARFSCHTHRLVALVYLETVTRYMKFMQEHVQYVPHLLGVFLDNRGIHHQNAHVSRRAGYLFMRAVKSLKAKLVPYLDTILQSLQDVLSQFTSMNWPNKDTKFPSSEDGSQIFEAVGLLIGIEEVSPEKQAQFLTALLNPLCHQVESLVMDAKARGLEESSPMAISLQQIIVALNMVSKGFNERLVMVNRPAIGIMFKKTLDVVLQVLVSFPSVRPLRSKVISFLHRMIEILGLSVLPCIPIALRLLLLDNEVFQLYFNDKPLFSWFFCV

SEQ ID NO: 224603 - protein, 645 aa, Zea Mays
MVYFYCLPTISGPNYHFTSRQLLLLGEMLEFSDTMNRKIASSFLHELLVRPLEHEVDDDGNQIAIGDGVSLGGDKDWAKAVAELAKKVHSSVGEFEMVVSTVVEELARPCRERTADFMQWMHCLAVTGLLLQNTSTLRNLQATAIEPSELLHSLLLPAKQNHVDVQRAALRCLCLLGLLENRPNAELVKQLRLSFINGPDLVSAIACKALIDLVTWHGPQEIDRAIGIESPDPSYEKSQFTQVDLSDMNDDDLNIGVLDILFSGFHKDHWEFDLEGDNHDNVPTILGEGFAKILLLSGNFASIPADLHTVILAKLIKLYFSEETKELERLKQCMSVFFQHYPALSDKHKSCICNAFVPVMKAMWPGLYGNAGGSTHVISKRRKLAVQASRFMVQMVQTQLFSTESMDQASKSSESASGLADASNNFDISEEGLAIRIALEVASCPDKKTAAGKAYALALCKVVVLLRFRQSEQKAIKCMRGLVNHLAASVASDKELGKELAQMAARLRSLDACPDEELAQDDADAIFKKLGFDDGFKLDTNQAVPPTPAPRSVRPPAPARRRARQAPSSSDDSDEEAGEADVPATSASRVPATPSMTAAARSQRASKTAALSKMSAKPATASDDSELDGQSDVTSEEDASDEESL

SEQ ID NO: 224604 - protein, 533 aa, Zea Mays
MDESACRSTAPVGFLRRGSGISLRNQSNEDRSNQYNKQPGKSSNPNPVKLRFTENKEKPRYFQGTFHSSGSRASSVSSSKAPARKYCDERQKQPFLAETDIAESSNRRTEVRRLQSGKKASVFGDGHPYTQKSISEASSSSTITGGLPEEHDLGALYVSGSSGSSAHPVNPRNAALNASAHMQKDKEEMSSGCSSSDSARDRRIEVTKKRTSGAGSSSRSRISEQSNFSQPRASYPGSTGPRARAAEQSASQQTARTNSRNIPDHTDSIRTRRPFTLRARERMMPGEREDSVFALHETVASIHPECGHFHMDGTPPERLGRPFYAELPHAIYSSNRQGSSSQTARRRSTSRTEESPQRMFHGMFWERDGYRGINMEGIAQALLALDRIEHDVELTYEQLLLLETNLLLSGLDLHDQHEDMRLDIDNMSYEELLALEEHIGSVTTALTEEQFTKCVNQSVYEARNSYRDVSKIAADDVKCSVCQEEYVDGEEIGTMQCEHQYHVRCIHEWLKQKNWCPICKASAIPSEMTKGDA

SEQ ID NO: 224605 - protein, 249 aa, Zea Mays
MEVAERPMASSHLAALVSLLIPCLLALLLLRLAAVLDPDPDAAVPRIKAAAPLPLRFRHDGAFKILQVADMHFGNGATTRCRDVGPEGGGARCSDLNTTRFLRRVIEAEKPDLIAFTGDNIFGGSATDAAESLLRAISPAIEYRVPWAAILGNHDQESTMTREELMTFMSLMDYSVSQVNPPGFLVHGFGNYHVGIHGPFGSELVNTSLLNLYFLDSGDREMVNGVKTYGWIRESQLAWLRSTSLELQH

SEQ ID NO: 224606 - protein, 263 aa, Zea Mays
MTKPYSLMFGLRQDIDLREKDGVPDLRLGARSKYASVASPEIKDPVKSMLKDEREFDDALLAVVIRNLKLVKGDSKVIVMDSNGARSKAIARLLKKLGVQRPYLVKGGFQAWSKNLRVKELKPETALTSINEDVEEILEQIKPTPTLVFGSLLGLSALSYALLEWEMTLQYIAVLSVGLTIYLRFSTYEDSEDLEKDLKLLLSPVRVGADALSWAAKKIEPNKVGLPTSPSTTAVKDRVLQAAAKHESQPSDADESSVQTAEA

SEQ ID NO: 224607 - protein, 111 aa, Zea Mays
MLKDEREFDDALLAVVIRNLKLVKGDSKVIVMDSNGARSKAIARLLKKLGVQRPYLVKGGFQAWSKNLRVKELKPETALTSINEDVEEILEQIKPTPTLVFGSLLCCPSFL

SEQ ID NO: 224608 - protein, 187 aa, Zea Mays
MLKDEREFDDALLAVVIRNLKLVKRPYLVKGGFQAWSKNLRVKELKPETALTSINEDVEEILEQIKPTPTLVFGSLLGLSALSYALLEWEMTLQYIAVLSVGLTIYLRFSTYEDSEDLEKDLKLLLSPVRVGADALSWAAKKIEPNKVGLPTSPSTTAVKDRVLQAAAKHESQPSDADESSVQTAEA

SEQ ID NO: 224609 - protein, 75 aa, Zea Mays
MMGYCGIGLIGWSWKVTIPLRTSSWPPRAKLSTKAPPVSRRSWCSTVMPPCSADWLLHNTFAGQEQVPQDEALGG

SEQ ID NO: 224610 - protein, 124 aa, Zea Mays
MSGGNNPVQNEKELFNHRHSSLRVTVERAFGSLKRRFKILDDAIPFFPFPTQVEIVVASCIIHNWVIEDGGDEFIVPEAEDELPSINHQRSSHGQAMEHAFMVNFRQQIANAMWEDRQQYQNTT

SEQ ID NO: 224611 - protein, 530 aa, Zea Mays
MNFFAGLLLLLMPEENAFWALTGIMDDYFDGYFSEEMIESQVDQLVLEELVRGRFPKLVNHLDYLGVQVAWVTGPWFLSIFMNMLPWESVLRVWDVLLFEGNRVMLFRTALALMELYGPALVTTKDAGDAVTLLQSLAGSTFDSSQLVLTACMGYQAVGEARLQELRNKHRPSVISSMEQRAKGLRVWRDTNRLASRLYNFKRDTEPLVSLSEEQSNDLTDGDKNQEANCSNVDDMYHGLTVNSEIDSLPDPKDQVVWLKGELCQLLEERRSAVLRADELETALMEMVKQDNRRELSAKVEQLEQELSELRQALSDKQEQEQAMLQVLMRVEQEQKVTEDARIFAEQDAAAQKYAAHILQEKYEGAMASLAQMENRAVMAETMLEATIQYQSSQQKAQLPSPSPSPRTPTRDASPGQGNQDSSQEFQPRRISLLAPFSSLGWRDKNKNGSDESTNGKLNNSTDQGVETPKKDDEKKADSPKESEQIVRTPERDNELRLGTPKMDSEVPSVEMAANSTNGLEDQLEEIKLD

SEQ ID NO: 224612 - protein, 357 aa, Zea Mays
MAGVLGGAQTANVQNGLPVQYGLGNDPLTHYLARMSRHQLHEVMAELKFLTTQNKEHSKTLLQGIPQLPKALFQAQIMLGMVTPQMMQMAKSQQPLGSLAQSSSHLNEPYPQPEPDAMVPVVSRPSSLPTNVLPNPVILQEQTAAIHSFPQHQHASQPQVKMFPHGQPSGITAQSPMLHQPLGGSSSVPIQSLVTSVGLTSQVQPPFVPEHPGPPVMPTSVQQLPLTHPHLALVAAAPETLPNEIRVADQASHLTEFTHPSKLRKLEDGTSVPGMVNSSHAIYTAPLQAVGPSGPSGSYSAGAGSLQQPGNEGQITPDVESALLQQVLQLTPEQLSSLPPEQQQQVIELQKMLSAGK

SEQ ID NO: 224613 - protein, 86 aa, Zea Mays
MYILPRRAGTRFQTAGNKCQEKDVVTEHENQAHRPGNNHRTHSDHYPLCLSWFQMPLSTDQNTDTFNCTYYTAAWSKKKYDLLLFR

SEQ ID NO: 224614 - protein, 292 aa, Zea Mays
MQVNNEAPLGCLKPNISQYNSPEQIGGVEGFPENNEKRNDIVAAEKIWEATPNQGLSRPIYRQEFYAWPYIYSDYQIVRQPLPYGFDNQFYQINRDHGFPIENRVQYLPFKMLPQGHPHDAQLQEFQYFVVIDFEATCDKVNNPFPQEIIEFPSVLVNSATGKLEECFQTYVRPTYHQFLTDFCKELTGIQQIQVDRGVPLGEALLMHDKWLEDKGIKNTNFAIVTWSNWDCRIMLESECRFKRIRKPPYFNRTDARVTWLVLALAVMILNIFGSLTGLIFLPPRLSVLLDP

SEQ ID NO: 224615 - protein, 301 aa, Zea Mays
MIDRERAEEMQVNNEAPLGCLKPNISQYNSPEQIGGVEGFPENNEKRNDIVAAEKIWEATPNQGLSRPIYRQEFYAWPYIYSDYQIVRQPLPYGFDNQFYQINRDHGFPIENRVQYLPFKMLPQGHPHDAQLQEFQYFVVIDFEATCDKVNNPFPQEIIEFPSVLVNSATGKLEECFQTYVRPTYHQFLTDFCKELTGIQQIQVDRGVPLGEALLMHDKWLEDKGIKNTNFAIVTWSNWDCRIMLESECRFKRIRKPPYFNRTDARVTWLVLALAVMILNIFGSLTGLIFLPPRLSVLLDP

SEQ ID NO: 224616 - protein, 180 aa, Zea Mays
MDEDFEMPPAGADEMMGDDEMGDFGGDEGPVMKVGEEKEVGKEGLKKKLLKEGEGWETPEVGDEVEVHYTGTLLDGTKFDSSRDRGEPFKFKLGQGQVIKGWDQGIKTMKKGENAIFTIPPELAYGASGSPPTIPPNATLQFDVELLSWTSVKDICKDGGIFKKILKEGEKWENPKDPDE

SEQ ID NO: 224617 - protein, 941 aa, Zea Mays
MESAHKSGGGSAPGAGAGGEGVLCHACGYQYPNGHPSAKQRRAHRKHCGKPASAAAAAEGSGEHEASELLLDPSGNGAGHRVVGDTSAEDCLISGSSVLSEITSESSRTDDGTLTTVATQYSEKGSSTEDGDPSDPAVGSEQIQDVPTSVVPAEPEDRAKFSSEISESEIQNPSIVRPESDAAGGGTSELTDDVARQQDEVAVTGEDAVFDAIDGSKSSERNSVQGDELNLSCQDILQTETGGGHSSTVVEEDSGSKDPTASDGQEILIEETEPNQQSKHALTGSFEKVPDIESVGSSAEKSVGTDHPAISKGADNFEGQHYHTTDESIGAIPSTFEPAVGAKVVSVDVTADLTEDVCSSDITIDDGMQENVTSGTIVPSQVDILDSSPSATAHEVNIVGSINDDDEKSQDGKSSADLASYEVKEMVVKDNFEEKQQTKEVIVDPTPHEANNFPSTDNHEENEQNKEIVADTTSHKISAVQSMGSTEEKEHIEDFIAKLASEEIIFTSNRDIVEQQDETDMKTNYEIDRARNLEATEEIAAGGESNTGTITDVVEDKFPNEEITLGTISLNMADSSVKEEKMHDEEVNEDLDSRDDIMVHGPDNVKEKMCEETMSGPTLDKFSLPTSTDSPEEGNKDESTRADPMSHETNVAQTSDGADEEKKIRELAVDPTSSIGTMGNIGNAEDKKPSEETTTDPRPVENTTTQGTEDATDPKPVENTTPQGTEDADSSKQNENTASVGGVEGKKQGEETTADPRSVENTTVEGKKQGEETTADPRSVENTTAQGTEDAESSKQNENTNVMEEERVTVEDTTSREISAIESTDDLKGKATNENEEIADKEMVTDSDKNHVSLKVLLADKNVEAKEKEKKATSAKDRVLSFRRRVSKDNVSPPVKPGSPTKDKDGSGQQDWNSPARLPVEKKPKGRKQQWVPFICCSSVQ

SEQ ID NO: 224618 - protein, 115 aa, Zea Mays
MLDVALERETEGDLLLADMGQGLGLRPGVIDGAISISAIQWLCNADKSSHDPRLRLKAFFGSLYRCLARGARAVLQFYADNVKQSEMIVTFAMRAGFAGGVVVDWPHSYYITSKG

SEQ ID NO: 224619 - protein, 1214 aa, Zea Mays
MYLYSLTLQRATGAVCAVIGSFSGRDSKKSAASGSGSTQEIAVARGSTLDLLRPDPETGRLRTLLSVDVFGAIRSLAQFRLTGANKDYLVVGSDSGRLVILEYSPDRNRLDKVHQETFGKSGCRRIVPGQLLAVDPKGRALCIAALEKQKLVYVLNRDAAARLTISSPLEAHKSNTLTFALAALDCGFDNPVFAAIELEYAESDRDPTGQAANQAQKLLTFYELDLGLNHVSRKVSEPIDNGANLLVTVPGGGDGPSGVLVCCDNFVLYRNQGHPEIRAVIPRRADLPAERGVLIVAAATHKQKSMFFFLLQTEYGDIFKVDLDHNGDAVSELRIKYFDTIPVTSAVCVLRSGFLFAASEFGNHALYQFRDIGREADVESSSATLMETEEGFQPVFFQPRALKNLMRIDEIESLMPVMDMRVANLFDEETPQLFTACGRGPRSTLRILRPGLAISEMARSMLPAEPIAVWTVKKNINDMFDAYIVVSFTNVTLVLSIGETIEEVSDSQFLDTTHSLAVTLLGEDSLMQVHPNGIRHIREDGRVNEWRTPGKKTITKVGSNRLQVVIALSGGELIYFEMDMTGQLMEVEKQDMSGDVACLAIAPVPEGRQRSRFLAVGSYDNTIRILSLDPDDCLQPLSVQSVSSAPESLLFLEVQASVGGEDGADYPANLFLNAGLQNGVLFRTNVDMVTGQLSDTRSRFLGLRPPKLFPCIVSHRQAMLCLSSRPWLGYIHQGHFLLTPLSCDTLESAASFSSDQCSEGVVAVAGDALRIFTIERLGETFNETAIPLRYTPRKFVILPKKKYIAVIESDKGAFSAEEREAAKKECLDASGAAENGNANNGDPMENGDGQDGAEEGNTFPDEQYGYPKAESERWVSCIRILDPRSRDTTCLLELQDNEAAVSICTVNFHDKEHGTLLAIGTAKGLQFWPRRTLAGGFIHVYKFVDEGRSLELLHKTQVEEVPLALCQFQGRLLAGVGSVLRLYDLGKRKLLRKCENKLFPRTLVSIHTYRDRIYVGDMQESFHYCKYRRDENQLYIFADDSVPRWLTTAQHIDFDTMAGADKFGNIYFARLPQDISDEIEEDPTGGKIKWEQGKLNGAPNKVEEIVQFHVGDVVTCLQKASLIPGGGECLIYGTVMGSVGALLAFTSREDVDFFSHLEMHLRQEHPPLCGRDHMAYRSAYFPVKMVISASSIPPSQLICRGRLLMSWTELRVKS

SEQ ID NO: 224620 - protein, 107 aa, Zea Mays
MQPYLKPQSNPRPKNSPRQPNRSGGGGGTTLSSNRHGHAGGVRGEAPQRERGTGPSPPSCTTPLPWLVPVPALCSVLCTGLTQGSLLSRSMSRGRSGCSCSLGCHHC

SEQ ID NO: 224621 - protein, 127 aa, Zea Mays
MGTREVYEEKLRSGAHLHRDPTINPGLGSPRCPRCLSLLNPTAGKRDWAITSVLHDATAVAGSGAGALLSAVHGFNTGIPFVQKHVKGPKWLQLLVGVPPLLIFSVCCFTYHTADRKSSFSRISPGI

SEQ ID NO: 224622 - protein, 230 aa, Zea Mays
MGRGRVELKRIENKINRQVTFAKRRNGLLKKAYELSVLCDAEVALIVFSNRGKLYEFCSGPSITRTLERYEKNSYAGPDTAVQNKENELVQNSRNEYLKLKAKVDNLQRTQRNLLGEDLGSLGVKELDQLEKQIDSSLSHIRSTRTQHMLDQLTDLQRRLEETSNQVHGQVWEHGANLLLGYERHSSPQQAPSHVGNGLFFHPLEAAAEPTLQIGFAPEHMNNFMPAWLP

SEQ ID NO: 224623 - protein, 202 aa, Zea Mays
MKNINSKNVKATTTVKDLQVYCPASVQIRMPFRLLQATGEFWRLRRGASVTLDESQSKCSRKDALMRRLLLLVAGSTLASRLRASSKCATSSPPELKGAPVPTPTPFVPTTAAATAVDLPLGGLDLPTNTRAPITQHEPAAVLSAQGRTVRGQGPDGPRPGARLGFLPDGRRSTRAQGRRKIAGSAWISLPGGTPSGRRDPR

SEQ ID NO: 224624 - protein, 279 aa, Zea Mays
MTFNFSMQAIDHIINSAAKSNYMSAGQISVPIVFRGPNGAAAGVGAQHSQCYAAWFAHVPGLKVLTPYSSEDARGLLKAAIRDPDPVIFLENELLYGESFPVSAEVLDSSFCLPIGKAKIEREGKDVTITAFSKMVGYALQAAEILSKEGISAEVINLRSIRPLDRAAINASVRKTNRLVTVEEGFPQHGIGAEIWFSLALTLSHICVVSIILTHVCCSMSVVEESFAYLDAPVERIAGADVPMPYAANLERMAVPQVDDIVRAAKRACYRAVPMAAAA

SEQ ID NO: 224625 - protein, 970 aa, Zea Mays
MFVKQGEATPYDIYSRNHFSNLFGLHSLRSESSNLTSEKHPGNWQESSETLTKDFGPSVFHQQQSAFVSKLLDHSGAEDTGPYPPRQDLNQYPFGSTYDKYMTQLSSCSTDTRPHIFSTQYVNSPEMANTTVPLMNDTIGESSFSFSHYMNPCRINLDYFDSVWNEQKGLGYQTTDKQHGKWSNPDDKATVGNYSLNSLGESHLNPEHLGNGRPMQGSSEMKHELGSFSSKVSSSESGFVQPRECSSEFPEVNNTSVDSPCWKGTPAQYQPSFGIIENNGAPPVVIGTVGYINSHQNQKLPELSFEYPWRFCEHQVSGSENDPFKAVKLPERCKISKDHKVLPIDVRVLNDMTTHASYLPDKQHPTTQKCNDSGEDSKNVITSSQQESSCSGRKPILLGEHGGSLTGSISELMSKSVMNPIAITPRVHTDHLTTGIPHGNIFSAAVEKEESTHKRGEDPSQCYPGVEGNMLNMSSESSSSNQEDEEELLQSVIQNLTAASSKRSKVEQKNDDGLSNSSQMKFKDINYVRKHFWRSMHEDSEQENADSEFKATVSQVLTNHQEDKVLDNTEVPQASIYRNLWIEAEASACKLKYELQHALLKLETAKGLNDTIKAPDSLEDSKGSNSYIFSNKPQNHGKGTVSCAAAFQGHGGDSRDKQSPVVSRSIFNGVDADVFARFEVLQSRIDNINSLSEIDCGEQKEASKRPYAVEDTVMARLKVLKSRPDNITSLSQGSTKHQLDGSTNSADNVDDTVIARLGILESHPNNEALLGQESSKRQLDARTNREDGIDAAVMARLRILKSRPDNETSMGDANKEQQDACGEQLNGDDLGIVSNGAISNTLSEKCSKFTHSDDHLGEKNSVGVPDTFGDGNSAREKKEVGGSADVATPMRCKGTSDGVSVGSAVHGEDNLGENHVWLQTAGDSHVCTEGSQEAHPISSPVDQYGGSPTEWEHVLKENFFHPGKLANSDP

SEQ ID NO: 224626 - protein, 1021 aa, Zea Mays
MLPYSGDHQRSPPPQPPPRAAFSSSLSPSAAPFPAADPVGPGPGPGRDLPTAPSVYTAGGDWGALSWMEPPASYMAPAATPPGYKGEATPYDIYSRNHFSNLFGLHSLRSESSNLTSEKHPGNWQESSETLTKDFGPSVFHQQQSAFVSKLLDHSGAEDTGPYPPRQDLNQYPFGSTYDKYMTQLSSCSTDTRPHIFSTQYVNSPEMANTTVPLMNDTIGESSFSFSHYMNPCRINLDYFDSVWNEQKGLGYQTTDKQHGKWSNPDDKATVGNYSLNSLGESHLNPEHLGNGRPMQGSSEMKHELGSFSSKVSSSESGFVQPRECSSEFPEVNNTSVDSPCWKGTPAQYQPSFGIIENNGAPPVVIGTVGYINSHQNQKLPELSFEYPWRFCEHQVSGSENDPFKAVKLPERCKISKDHKVLPIDVRVLNDMTTHASYLPDKQHPTTQKCNDSGEDSKNVITSSQQESSCSGRKPILLGEHGGSLTGSISELMSKTVEKEESTHKRGEDPSQCYPGVEGNMLNMSSESSSSNQEDEEELLQSVIQNLTAASSKRSKVEQKNDDGLSNSSQMKFKDINYVRKHFWRSMHEDSEQENADSEFKATVSQVLTNHQEDKVLDNTEVPQASIYRNLWIEAEASACKLKYELQHALLKLETAKGLNDTIKAPDSLEDSKGSNSYIFSNKPQNHGKGTVSCAAAFQGHGGDSRDKQSPVVSRSIFNGVDADVFARFEVLQSRIDNINSLSEIDCGEQKEASKRPYAVEDTVMARLKVLKSRPDNITSLSQGSTKHQLDGSTNSADNVDDTVIARLGILESHPNNEALLGQESSKRQLDARTNREDGIDAAVMARLRILKSRPDNETSMGDANKEQQDACGEQLNGDDLGIVSNGAISNTLSEKCSKFTHSDDHLGEKNSVGVPDTFGDGNSAREKKEVGGSADVATPMRCKGTSDGVSVGSAVHGEDNLGENHVWLQTAGDSHVCTEGSQEAHPISSPVDQYGGSPTEWEHVLKENFFHPGKLANSDP

SEQ ID NO: 224627 - protein, 611 aa, Zea Mays
MLPYSGDHQRSPPPQPPPRAAFSSSLSPSAAPFPAADPVGPGPGPGRDLPTAPSVYTAGGDWGALSWMEPPASYMAPAATPPGYKAVEKEESTHKRGEDPSQCYPGVEGNMLNMSSESSSSNQEDEEELLQSVIQNLTAASSKRSKVEQKNDDGLSNSSQMKFKDINYVRKHFWRSMHEDSEQENADSEFKATVSQVLTNHQEDKVLDNTEVPQASIYRNLWIEAEASACKLKYELQHALLKLETAKGLNDTIKAPDSLEDSKGSNSYIFSNKPQNHGKGTVSCAAAFQGHGGDSRDKQSPVVSRSIFNGVDADVFARFEVLQSRIDNINSLSEIDCGEQKEASKRPYAVEDTVMARLKVLKSRPDNITSLSQGSTKHQLDGSTNSADNVDDTVIARLGILESHPNNEALLGQESSKRQLDARTNREDGIDAAVMARLRILKSRPDNETSMGDANKEQQDACGEQLNGDDLGIVSNGAISNTLSEKCSKFTHSDDHLGEKNSVGVPDTFGDGNSAREKKEVGGSADVATPMRCKGTSDGVSVGSAVHGEDNLGENHVWLQTAGDSHVCTEGSQEAHPISSPVDQYGGSPTEWEHVLKENFFHPGKLANSDP

SEQ ID NO: 224628 - protein, 578 aa, Zea Mays
MAASVDAAAALAVTPPAVEEAGGAVEQARTLIGALNLLSRNLPLPPDVLRAVSSIYHDGGAGDDEEEEGGEREAEKEGNMEMTAAEEGYPVDVATKGSSLIEELEDAIYKNKKTPISYSELAALKEGRFNASIQHRLAELEGLPSTRGEDLQMKCLLEMYGLKLLDLQKKVRSDISAEYWLQKKCAYPERQLFDWGLMRIRYPLSMYGIGDILSMDADDVHRKKRFTERMSRLEEEEKNQADIRKRKFFAEILNASREHQVQLGTTFKQRKQRNDGVQAWHVRARQRISRQEKNRLNLLKIGDQVAYMKMVEESKNERLKMLLDKTNELLEGIGKAVQRQKDAEHVSQHEGSEVPKGSESEDCSQISGVKSESPGESPSDDDADFAGSADESKFNAGRRLDFTVHSIEEKVTEQPSALEGGELRPYQLEGLQWMLSLFNNNLNGILADEMGLGKTIQTIALIAYLLENKEVAGPHLIIAPKAVLPNWSNEFKTWAPSIGTILYDGRPEERKLLREKNFDGLQFNVLLTHYDLILKDKKFLKKVHWHYLIVDEGHRLKNHECALARTLVSDIRSAADYF

SEQ ID NO: 224629 - protein, 728 aa, Zea Mays
MDIPHALFEEKLEAMKKAKGLKNDTDLTATDLKELVSQYKNVYVEAKGEPFPSDPKRQLELAVLAVFDSWESPRAKKYRSINQITGLRGTAVNVQCMVFGNMGNTSGTGVLFTRNPNTGEKKLYGEFLVNAQGEDVVAGIRTPEDLDAMKDVMPQAYKELVENCRILESHYKEMQDIEFTVQESRLWMLQCRTGKRTGKSAVKIAVDMVNEGLVERRAAIKMVEPGHLDQLLHPQFENPSAYKDQVIATGLPASPGAAVGQVVFTAEDAETWHSQGKSVILVRAETSPEDVGGMHAAAGILTERGGMTSHAAVVARGWGKCCVSGCSGIRVNDAEKVVKIGGNVLREGEWLSLNGSTGEVILGKQPLSPPALSGDLGTFMSWVDDVRKLKVLANADTPEDALAARNNGAEGIGLCRTEHMFFASDERIKAVRQMIMAPTVELRQQALDRLLPYQRSDFEGIFRAMDGLSVTIRLLDPPLHEFLPEGNVEEIVRELCSETGANQEDALARIEKLSEVNPMLGFRGCRLGISYPELTEMQARAIFEAAIAMTNQGVQVFPEIMVPLVGTPQELGHQVALIRQVANKVFTSMGKTIGYKIGTMIEIPRAALVADEIAEQAEFFSFGTNDLTQMTFGYSRDDVGKFIPIYLAQGILQHDPFEVLDQRGVGELVKLATERGRKARPNLKVGICGEHGGEPSSVAFFAKTGLDYVSCSPFRVPIARLAAAQVLV

SEQ ID NO: 224630 - protein, 626 aa, Zea Mays
MERSEPSLKPEWLLRPTVPATTYKPATLPHTDDHGRGASSRNRSSGRDRDRSSQHSSSRRGSSSSGPRRNDRDGIGKSRGYGNFGKHNKERIQEKDLDFRDRESRLVQSDDPLRDGFESFSSCRSEKDRLNRTRSKVAISNRAVGVSLDNGNVSKKDNGVISFEREFPHLDSEDKNGKQDIGRVPSPGISTPIQNIPLVVSDGWNSVLAMLGDPNINSVSSSSTHAGSSKQTEVSNSGSALSMAETVMQSPLKISTTPQLSIDAQKIEERTMRQCILRPLTPSSNKIPASSSLDKLLKSKGARAGESNGPIKVAPQLSTQPSSNSVRTPVKTELVKQSQSGSLQVLSREQNGAVNTAAKDSTSNPVSPVLGRSSSMEPMRKSIVSPKLKVGTNGRSLHPLQGSFADRKASAKDKYKFFEMLRSKSVNGSSAAIESPSSLTDDQQNSNLDLPFKFIENGSSSCEEANSCEGSQRHLSDNETIPPSESHDVLDEGSLGIQVEDKDVSSSQVLGGTQDLSSKKPQEDNVNIVPIVPVYVNDGLMMPNSVDDEASLPLEETNPAEVLQHIGAGEENPCPAQEFESIGAGGEEELNLLRSMGWDENEDVQPLQQEEIADCCLSFGRHLFFF

SEQ ID NO: 224631 - protein, 256 aa, Zea Mays
MEPMRKSIVSPKLKVGTNGRSLHPLQGSFADRKASAKDKYKFFEMLRSKSVNGSSAAIESPSSLTDDQQNSNLDLPFKFIENGSSSCEEANSCEGSQRHLSDNETIPPSESHDVLDEGSLGIQVEDKDVSSSQVLGGTQDLSSKKPQEDNVNIVPIVPVYVNDGLMMPNSVDDEASLPLEETNPAEVLQHIGAGEENPCPAQEFESIGAGGEEELNLLRSMGWDENEDVQPLQQEEIADCLKQNVRLQQKLQECKG

SEQ ID NO: 224632 - protein, 629 aa, Zea Mays
MGGLCSKVSAVDKSPSDTALGRNQVADHEPGASLELEKPPVSRESAAPAKRLDEQLQSFSFLESVVPGVAFHAGANTGGEAGSRTSPQLTRSLSQRAGVGKAKAGAAKVSEVSSILGRASTAGLEKAVEVLDTLGSSMTSLNSSSGFVSSSAAKGNKISMLAFEVANTIVKGSNLMRSLSEPSIKHLKEVVLHSEGVENLISKDFDELLKMASADKREELEVFTREVVRFGNRCKDPQWHNLDRYFEKLASERTPQSYLKEKAESVMQKLVTCVQNTVKEQDGLSSRGDNLDILKQELKVQSKHVKSLKKKSLWSKNLEEVMVKLVDIVHFLYLEIYNAFGRPDSEEPQEPAKHHNRLGPAGLALHYANIINQIDNLVSRSCAMPPNARDTLYHSLPPTIKSAFRSKLQSFEVKEELTASRIKAEMEKTLRWLVPFASNTNRAHHGFGWVGEWANTGSELNCKISGQMDMSRMETLYHADKEKTEALILELVVWLHHLISKSGNASGGVRSPIKSPVSSPTQKGAAITLLSGKTNNLPPILTQEDQDMLRGVKYRKFVPGISKSQEFDTKSSHSKHSRLSKSNSHSPASGSRKDLLPVRRSSMLPVIDFEIDRTKALDLIDRLDNLKVQ

SEQ ID NO: 224633 - protein, 55 aa, Zea Mays
MLLEEFAVEEAAKEHNTFVAGNWWELVAENMTKQNVMVGIGILLLIHLMLSKAMN

SEQ ID NO: 224634 - protein, 55 aa, Zea Mays; identical to SEQ ID NO: 224633

SEQ ID NO: 224635 - protein, 230 aa, Zea Mays
MAQPEIPAFEDWETTGNTPYTQKFEDVRKNKKTGIPAQTNDPRRNPEHPRKSPLHPTAYKTDPQDQGPRNPPHRPRPETDQQRHSDRPTHREPAPRRHANPHREQGSNAVAPRSPYRTAAGSASPMQSNNQSKPNHRSTATQAPERRHSSEGHSQHTPGRSRMKPGSYEPEEVAVPPFGEWDDANAASGEKYTGIFNRVRDDRLSPTSSARQPSTARREENKVQQGYHID

SEQ ID NO: 224636 - protein, 184 aa, Zea Mays
MAGKSRPPKRILESYTIKGSDRVIKPGDCVLMRASDASKPPYVARVEAIEAAGSRGTNVRVRVRWYYRPEESIGGRRPFHGSKEVFLSDHYDVQSADTIEGKCNVHSFRSYTKLDSVNAEDFFCRFEYKSATGSFVPDRIAVFCKCEMPYNPDDLMIQCEECSDWVPFKILNLFTIHVHISERV

SEQ ID NO: 224637 - protein, 188 aa, Zea Mays
MRASDASKPPYVARVEAIEAAGSRGTNVRVRVRWYYRPEESIGGRRPFHGSKEVFLSDHYDVQSADTIEGKCNVHSFRSYTKLDSVNAEDFFCRFEYKSATGSFVPDRIAVFCKCEMPYNPDDLMIQCEECSDWFHPACIGMTIKEAKKLEHFFCQTCTAENGKMVENSHEATAQSEEKPVESKRRRR

SEQ ID NO: 224638 - protein, 188 aa, Zea Mays; identical to SEQ ID NO: 224637

SEQ ID NO: 224639 - protein, 466 aa, Zea Mays
MSASYGSEDYRGGGGGGGYGGRGGGGGRGRGGGGGYGGGGGGGGYGGGGSGGYGGGGGGGGGGRGGGREGDWVCPDASCGNVNFARRAECNKCGAPCPSGGGGGGGGGYNRSGGGGGGYNRGSGDYGSGGGGFDRDGGDYNSGGRGGGSGGGGGYNRSGGSDRGFDDHRGGRGGSYGGRDQENQRGSEGGYSAGGYGQAPPQAPPSYGGPAGDYAAPPSSYGGNNAYGSDSAVPPPNSYSGGPGSYPPSYGAPPPHQYGGAPGGQGGLPPTYDGGYGGRSMPGGGGSGGAPPPYHGGGSGYTGSADPEPAGKVKQCDENCDETDNARIYISNLPPDVTVEELQELFGGIGQVGRIKQKRGYKDQWPWNIKIYADDSGKAKGDACLAYEDPSAAHSAGGFYNNYDMRGYKISVVMAEKSAPRAAPSYGHGGGRGGGRGGGGRRDNYRDGGGHGPNRNQGGGSRSRPY

SEQ ID NO: 224640 - protein, 374 aa, Zea Mays
MSASYGSEDYRGGGGGGGYGGRGGGGYNRGSGDYGSGGGGFDRDGGDYNSGGRGGGSGGGGGYNRSGGSDRGFDDHRGGRGGSYGGRDQENQRGSEGGYSAGGYGQAPPQAPPSYGGPAGDYAAPPSSYGGNNAYGSDSAVPPPNSYSGGPGSYPPSYGAPPPHQYGGAPGGQGGLPPTYDGGYGGRSMPGGGGSGGAPPPYHGGGSGYTGSADPEPAGKVKQCDENCDETDNARIYISNLPPDVTVEELQELFGGIGQVGRIKQKRGYKDQWPWNIKIYADDSGKAKGDACLAYEDPSAAHSAGGFYNNYDMRGYKISVVMAEKSAPRAAPSYGHGGGRGGGRGGGGRRDNYRDGGGHGPNRNQGGGSRSRPY

SEQ ID NO: 224641 - protein, 245 aa, Zea Mays
MTFRHMLYPAYKSNRTPTPDTVVQGMQYLKASIKAMSIKVIEVPGVEADDVIGTLAINSVSAGYKVRIVSPDKDFFQILSPSLRLLRIAPRGSGMVSFGVEDFVKRYGPLKPSQFVDVVALSGDKADNIPGVEGIGDINAVKLISKFGSLDNLLKSVDEVEDERIKQALISHSEQAILCKNLATLRSDLPHYMVPFKTADLVFKKPQDDGEKFIKLLRALEAYAEGSSVNPIIRRAAYLWNKLKS

SEQ ID NO: 224642 - protein, 352 aa, Zea Mays
MVGACRLDVAYEHFKEKPHMFQFVPNEKQVQAANKLLKSLPQRGRRKKLDGVPVFSAQNLNIAVATNDGIRWYTPYFFDKNLLDNILEASMDQHFHSIMQNRHTRRRRDIVDDSLTSEIIEESAESLLEPPEVQELMNEIGPAGIPLNVVTKAAEIQFLDVVDKVLLGNKWLRKASGIQPKFPYVVDSFEERTAVSIANIATTSSLTASNDDSSCQNNQETQSSEPSGDNSSYRNHNNEDHNHFPFSNLLPNIWPGHDRKFKSQESDNKFSRYDADVKSKLQANPLLPKITMVGISMGDGAQMSKANLKKTMEDLTKELEQTSEENMFGDEKDPLFVANVGDYSRITKISSA

SEQ ID NO: 224643 - protein, 285 aa, Zea Mays
MNISRYTPYFFDKNLLDNILEASMDQHFHSIMQNRHTRRRRDIVDDSLTSEIIEESAESLLEPPEVQELMNEIGPAGIPLNVVTKAAEIQFLDVVDKVLLGNKWLRKASGIQPKFPYVVDSFEERTAVSIANIATTSSLTASNDDSSCQNNQETQSSEPSGDNSSYRNHNNEDHNHFPFSNLLPNIWPGHDRKFKSQESDNKFSRYDADVKSKLQANPLLPKITMVGISMGDGAQMSKANLKKTMEDLTKELEQTSEENMFGDEKDPLFVANVGDYSRITKISSA

SEQ ID NO: 224644 - protein, 397 aa, Zea Mays
MKRTPMWFKRMLSPSKKTENSPVFRFFMDLNDAVSYVKRLNVPSGMVGACRLDVAYEHFKEKPHMFQFVPNEKQVQAANKLLKSLPQRGRRKKLDGVPVFSAQNLNIAVATNDGIRWYTPYFFDKNLLDNILEASMDQHFHSIMQNRHTRRRRDIVDDSLTSEIIEESAESLLEPPEVQELMNEIGPAGIPLNVVTKAAEIQFLDVVDKVLLGNKWLRKASGIQPKFPYVVDSFEERTAVSIANIATTSSLTASNDDSSCQNNQETQSSEPSGDNSSYRNHNNEDHNHFPFSNLLPNIWPGHDRKFKSQESDNKFSRYDADVKSKLQANPLLPKITMVGISMGDGAQMSKANLKKTMEDLTKELEQTSEENMFGDEKDPLFVANVGDYSRITKISSA

SEQ ID NO: 224645 - protein, 946 aa, Zea Mays
MDYEVYGLDINPRAVKIAWINLYLNALDDDGLPIYDGEGKTLLDRVEFYESDLLSYCRDNKIELDRIVGCIPQILNPNPEAMSKIVTENSSEEFLYALSNYCALQGFVEDQFGLGLIARAVEEGISVIKPSGIMVFNMGGRPGQGVCERLFRRRGFRITKLWQTKIMQAADTDISALVEIEKNSRHRFEFFMDLVGDQPICARTAWAYMKSGGHISHALSVYSCQLRQPNQVKKIFEFLKDGFHEVSSSLDLSFDDDSVAEEKIPFLAYLASFLKENKSNPCEPPAGCLNFRKLVAGFMKSYHHIPLTPDNVVVFPSRSVAIENALQLFSPALAIVDEHLTRHLPKQWLTSLAIEGRADCNHADGTVTVIEAPRQSDLLIELIRKLQPQVVVTGMAQFEAITSAAFENLLNVTKDVGSRLFLDISEHLELSSLPSSNGVLKYLAGKTLPSHAAILCGLVKNQVYSDLEVAFAISEDAAVYKALSQTIELLEGHTSLISQHYYGCLFHELLAFQIADRHPQQERQPAEVIPQQMIGFSDPAVSTLKATEFFVPGSAESSIIHMDLDRSFLPVPSAVNASVFESFVRQNITDSETDVRSSIQQLVKDSYGLSAAGCAEIIYGNTSVALFNKLVLCCMQEQGTLLFPLGTNGHYVSAAKFVNASTVTIPTNPSSGFRIEPKVLADTLKNVSRPWVYVCGPTINPTGFLYSDSDIRELLSVCAEYGARVVIDTSFSGLEYETDGWRQWNLAGCLSSLKRSEPSFSVVLLGELSFALTAGGHDFGFVILGDSSLAETFHSFSSLSRPHTTLKYTFKKLLGLKNQKDQHFSDLIVEQKEELKNRANQLIQTLESCGWEAAIGCGGISMLAKPTAYMGKAFKAAGFDGELDASNIREAILRATGLCINSSSWTGIPGYCRFSFALERGEFERAMGCIARFKELVLGGAQMNGA

SEQ ID NO: 224646 - protein, 203 aa, Zea Mays
MEEAKEKFQEIQGAYSVLSDANKRLLYDVGVYDDEDDEESMQGMGDFIGEMAQMMSQAQPTRQESFEELQQLFVDMFQSDIDSGFCNRTAKAHQFQGPAKSRTCSTSPSSSPSPPPTTAKDAEVPSCNGFNKRGSSALDSGKPPKPVEGGAGQNQAGFCFGVSDTKETPKLPGQNASRRRNGRKQKLSSKHDVSSEDETAAGS

SEQ ID NO: 224647 - protein, 217 aa, Zea Mays
MAPGQMLVLQQREAHGGSQGEVPRDPGRLFRKRNRSSLLVNSLRGALVLPSHCSCAVLSDANKRLLYDVGVYDDEDDEESMQGMGDFIGEMAQMMSQAQPTRTAKAHQFQGPAKSRTCSTSPSSSPSPPPTTAKDAEVPSCNGFNKRGSSALDSGKPPKPVEGGAGQNQAGFCFGVSDTKETPKLPGQNASRRRNGRKQKLSSKHDVSSEDETAAGS

SEQ ID NO: 224648 - protein, 349 aa, Zea Mays
MVLGSVFIVLGSGVAGSLLTGDTKLPKLGDVFSGAAKFVKKHEGGAAKSGSGSSDNQNTSQQLLSQINYIREELHTLQASTPTTVVTSAVKSGSGPYAITAVVVAGAIGYAYIKWKGWNLSDMMFVTRRGLSEACSAVGSHLDKVSDSVVVTRKHLAGRIARVDISLDETQQIIEGTRDEVGIIHGDLSAFQEDLQSVNLVVRTLESKMGRLECSQDQMVDGINHLCEFTRKLEYSQTKANISSPSVPAVMDSSYSERIVEKATSCLPRLALEAPNSPVVPRPEETSLLQVAEQPKALKEQEKENEEGPARIGNAVPPDSSKNDQNYLDRVKVICIGSELRFALPSYLS

SEQ ID NO: 224649 - protein, 72 aa, Zea Mays
MDLAQDKPREKTVKSFYTPRLSSRTHSEVATTFWLSVTPTRHRGNPFQLTNATGLRKFSVTQRSLNKCHGLA

SEQ ID NO: 224650 - protein, 155 aa, Zea Mays
MQRRVGMADGEARCRTLGAVIKEKDEEFALFLEMRRREKERGAAAAAADQLLLSGDVAAENGMLLLDPPPPAEPKPAAYKVAGGGFRRAPGGVDDFLNADASDKNDYDWLLTPPGTPLFSSLKVEPKRSLVSQAGTPKARPTALKSRRHMVTYSH

SEQ ID NO: 224651 - protein, 228 aa, Zea Mays
MQRRVGMADGEARCRTLGAVIKEKDEEFALFLEMRRREKERGAAAAAADQLLLSGDVAAENGMLLLDPPPPAGGSFISASSSEPKPAAYKVAGGGFRRAPGGVDDFLNADASDKNDYDWLLTPPGTPLFSSLKVEPKRSLVSQAGTPKARPTALKSRQLDVVMEEGQGEELEVMLSESDDSEFDHDDEFPPSTDGDELSKTEKTKRGGKRSRAGIQLSPSKCKANRVK

SEQ ID NO: 224652 - protein, 270 aa, Zea Mays
MNSGKLDLLLSQGKEYVFIANSDNLGAIVDMKILNHLIHKQNEYCMEVTPKTLADVKGGTLISYEGRVQLLEIAQVPDAHVNEFKSIEKFKIFNTNNLWVNLKAIKRLVEADALKMEIIPNPKEVDGVKVLQLETAAGAAIRFFDHAIGINVPRSRFLPVKATSDLQLVQSDLYTLVDGFVTRNSARTNPSNPSIELGPEFKKVGSFLGRFKSIPSIVELDSLKVSGDVWFGSGIVLKGKVTITAKPGVKLEIPDGAVIGNKDISGPEDL

SEQ ID NO: 224653 - protein, 408 aa, Zea Mays
MADEKLAKLREATAGLTQISENEKSGFLSLVGRYLSGDEEHIEWAKIHTPTDEVVVPYDTLESPPEGTEATKKLLDKLAVLKLNGGLGTTMGCTGPKSVIEVRNGFTFLDLIVIQIESLNKKYGSNVPLLLMNSFNTHDDTLKIVEKYTNSSIEIHTFNQSQYPRVVADEFLPWPSKGKTDKDGWYPPGHGDIFPSLMNSGKLDLLLSQGKEYVFIANSDNLGAIVDMKILNHLIHKQNEYCMEVTPKTLADVKGGTLISYEGRVQLLEIAQVPDAHVNEFKSIEKFKIFNTNNLWVNLKAIKRLVEADALKMEIIPNPKEVDGVKVLQLETAAGAAIRFFDHAIGINVPRSRFLPVKATSDLQLVQSDLYTLVDGFVTRNSARTNPSNPSIELGPEFKKDDRVSSHI

SEQ ID NO: 224654 - protein, 69 aa, Zea Mays
MDRSAGCCKKLTCRGRGGSWCPLTSQTSGPTGSGGCRRCTRSSPATASGPERRLRLPVRTGEKLAVTRY

SEQ ID NO: 224655 - protein, 853 aa, Zea Mays
MQLLQKLLLRVKVSKAYTISVLVTKSTMKSSVDTELREMVAYIANTLIFILSGVVIADGVLQNNGHFERHGSSWGFLLLLYVFVQISRVIVVGVLYPMLRHFGYGLDLKEAMILVWSGLRGAVALSLSLSVKRTSDSVQPYLKPEVGTMFVFFTGGIVFLTLIFNGSTTQFLLHILGMDKLLPTKLRILKYTRYEMLKKALEAFGELRDDEELGPADWVTVKKYITCLNDLDYEPEHPHDVGDEDDCMHIMNLTDIRVRLLNGVQAAYWGMLEEGRITQVTANILMRSVDEAMDLVSGQTLCDWKGLKSNVQFPNYYRFLQRSRLPRKLVTYFTVERLESGCYICAAFLRAHRIARRQLHDFLGDSEVARTVIDESNAEGEEARKFLEDVRVTFPQVLRVLKTRQVTYSVLTHLSEYIQNLQKTGLLEEKEMVHLDDALQTDLKKLQRNPPIVKMPRVSDLLNTHPLVGALPAAVRDTLLSNTKETLRGQGTTLYREGSRPTGIWLVSIGVVKWTSQRLSRRHSLDPILSHGSTLGLYEVLIGKPYICDMTTDSMVQCFFIETEKIEELLHSDPSIEIFLWQESALVLARLLVPHRFEKMGMHEMRVLVAERSTMNIYIKGEDLEVEQNCIGILLEGFLKIENLTLITPPALLLPWNADLSLFGLESSDYCHTARRYQVEARARIIFFDEAEAAHLHVQTSASLPQGEPARSMSKEHSGLLSWPESFRRSRGSLGLAAEMLPGGLSSRALQLSMYGGSVVSLSSGQQGHRRQRPRHRVQSEGSNMKRVAALPEVAATAPAPAGAAQGQRRAMNLQEEYNSSEDSAGEEVIVRVDSPSMLSFRESTAVPPPQEQ

SEQ ID NO: 224656 - protein, 71 aa, Zea Mays
MKGITSRGTVHANITQVCIELTKRTRSFCCVHFSDWKMDGLHLSLYAFKTIFLGSESTTGSALILCFIFRT

SEQ ID NO: 224657 - protein, 1252 aa, Zea Mays
MDLVTGPLAILPSKLQELLQIQDEYRLQKEVRGRVEMICRELQSMHAALRKVADVPRDQIDLQTKVWRRDVREASYDIEDAIDTFLMRIRDRAPSDPNRFRLAMKKMTKLSRKVKAIHEIGAAIGDIVRKIQELVDRRVRYKLDVAADRSISMVSVDPRLAALYKEATQLIGIDQSMSEIISMLLSDESGQQHIKKISIVGAGGLGKTTLAKETYERLRSEYEFATFVSVGQNPDLVRVFKNILVKLDIYQQVDTINRTDTRALIDEIRQRLSYVRYLIVIDDVWDLESWHTLELAFVENNNGSGIIITTRNFAVATIAGRVYKLRPLSYHHSKELFYRSLFGEGVCLDDQIINKASDKFLKKCDGIPLALITMASLFMGKPTQMWSELANNAFGHKGRNSHLEETTMRILSLSYSDLPLNLRTCFVYLSRYPDDYVINKSSLIWKWIAEGFIQEEQGKQLFELGEEFFNELVSRSIIQVVQSKFDNTVQGFRIHSMVLGLIRLLSSEENFVSVLDEEGQISISGKLRRLAIHNRKEEHNLGDNMDLLPWLRSFTAIECPIYMIPPVFIFKLLRVLDLESCGSMEGYDLKQLGNLHNLRFIGLCNTYVRTLPQELGHLKFLQTLELKGSGVEELPSSMGELAGLMCLNADWTTRVPKWIGMLTSLQQLVMYPCGGYSARWFVKGLGHLRELRMLRLLIKADDEKQLAQLLESVLKLPKIEALHLDYYGGVQLNRLVKLEPSDFACSGRLRSLELQLLEFSRLPVWLNAYYLPQIRDLSLLMFDVDKQDLKNLGDFKELRHLHLLIVNTERRDAITCASGGFRNLRFFSITKPFKFQQGDLPRLEILDFHFNVPLQSGANSGLDFDFGLENIPSLQQVIVQINCLDAFPLPEEVETALRHAIGVHPNRPIVDISLPRRKLDKADNDGAEGRSKLAHYSKSLSSAHDKPMDELIKRLYVVDNEAYDKKMKIVPIVRSEGLGKTTLAQKVFDKLSPHFDCAAFVLVGQNPDMRKVFTDILIGLDNQKYQDFPMTILDIIELIGLVRKSLINKRFFVVVDDVWDLKAWDIIKSALIENTNGSAVLTTTSRQIWEHENWRPSGDDKSDSDAEQLEPHLDVTTPADVLPASSPSKSKVVAHVELRHDDPDSSAFGIPQVAGDTQPELRLFPEADADLKGFFYENLFGSEDKCPDDLKDICKDLIQISAGVLSDAYETVEELRGITYDTGKLAACVSEKKIRALLSQTTWPSKGLLKIF

SEQ ID NO: 224658 - protein, 262 aa, Zea Mays
MDAAKLVTPVAVSHILAHPSAGSDGAVTDLVVQVLDLKSVGTGSRFSFTATDGKDKIKAMLPTNFGSEVRSGNLKNLGLIRIIDYTCNVVKGKDDKVLVVIKCELVCQALDAEINGEAKKEEPPIVLKPKDECVGVTPPLAMKPKQEVKSASQIVNEQRGNTAPVKPLSMTKRVHPLITLNPYQGNWVIKVRVTSKGNLRTYRNARGEGCVFNVELTDEDGTQIQATMFNDAAKKFYPIFELGKRGRLAFRKCNTTLSRLIS

SEQ ID NO: 224659 - protein, 50 aa, Zea Mays
MLLFLQAKAMRKYCGPESCTVVIRYDFGLTQSATDQQVQIVKNIRSFQAC

SEQ ID NO: 224660 - protein, 539 aa, Zea Mays
MSNKEEKECQMTKEEKRRKKREKHKDMGQSGDYEGKAVMSNKEEKDCQVTEEEKKRKKGKKHKDKGQGSNSDSSCARNHSIEMEQADVSAKMAEDSCLEHAEAVTSKSSAKKHRKKKRKDKEVETIGQKQILDADENVGSEDTKRNSREREHDRKSKKHKRKHQDDETASNGSSGNQIVLGEDKRTEKEYLVTLDLEEDNKSDMSKIGKKTDSKKKRRKERNDGVDLRQNTLVGEGKNGKNNKEKKMCEDENGGGEREKENMGKQKDKCRRVSFTDHVEVFNIGGSDDVEGDGSGETELVHGRRFSPEEDAKLMEAILKYAELKQLGEKGLQMIGESNKHPETRGCWAEIGKALPHRPKKAKYARGKVLLQRSAERKWTAEEYEIIRRFVEKNGRNWKVLAKELGKSEIHVKDTWRRIKFKNLKRGTWSQDEYQNLFDLVNLDMRVKAHQNINTGHRHIRDNISWEAISEKLTTRRAEECCTKWYGQLASPLVKQGIWADTDDYMLVEALQNVDAVCAEDVDWENLLEHSGHSNRVFPL

SEQ ID NO: 224661 - protein, 185 aa, Zea Mays
MMDGAQINVDVTAPGAILALALIFLKAESEEIAARLNIPNTYFDLQYVRPDFVMLRIIARNLILWSRIQPTKGWVDSQIPETVRCGISNMSEGTIDSDELDAEALFQAYVNIVTGACIALGLKYAGSRNGDAQELLYAYTVYFLNEIKHIPVRTSNILPKGLLQYVDRGTLELCLHLIVLSLSLV

SEQ ID NO: 224662 - protein, 175 aa, Zea Mays
MDQWGSETRPDNLFRSSYGYDPPAVRCHTAAELVTTQSVELVVRLFRSWSVVLFRVLGKMDAEAARRKQVAPPQEKRKRGRLELRRIQDRTSRQVRFSKRRSGLFKKAHELSVLCDAEVAMVVFSPAGRLYHYASLGTRVPSRGGGAFGRNGRGGRGRVGRSQPARGNNRPPARP

SEQ ID NO: 224663 - protein, 179 aa, Zea Mays
MDQWGSETRPDNLFRSSYGYDPPAVRCHTAAELVTTQSVELVVRLFRSWSVVLFRVLGKMDAEAARRKQVAPPQEKRKRGRLELRRIQDRTSRQVRFSKRRSGLFKKAHELSVLCDAEVAMVVFSPAGRLYHYASLGTSIEKTFCRYWDLANTDIDLNIEARDSRDNYNTQEEETMDHL

SEQ ID NO: 224664 - protein, 172 aa, Zea Mays
MDQWGSETRPDNLFRSSYGYDPPAVRCHTAAELVTTQSVELVVRLFRSWSVVLFRVLGKMDAEAARRKQVAPPQEKRKRGRLELRRIQDRTSRQVRFSKRRSGLFKKAHELSVLCDAEVAMVVFSPAGRLYHYASLGTSIEKTFCRYWDLANTDIDLNIEARDSRDNYNTQG

SEQ ID NO: 224665 - protein, 385 aa, Zea Mays
MVAASKTKIYMVLELVNGGELLDRIAASEGKLPEQEARRLFQQLVDGVSYCHEKGVCHRDLKLENVLVDRKGNIKISDFGLSALPQHLGNDGLLHTTCGSPNYIAPEVLQNRGYDGSLSDIWSCGVILYVMLVGHLPFDDRNIVVLYQKIFKGDAQIPEWLSPGARNLLRRILEPDPAERIAMAEIKAHPWFQEHYVPVLPPYDDDDDHDSVKQIGAGSKTTHHINAFQLIGMASSLDLSGFFEEEDVSQRKIRFTSAQPPEDLFAEIERSATDMGFHVHRGHSKLRLTRNCDRSKNQKNPMSSSSSSFLVCTEVFELSPSLYVVELNKSHGDPALYRQLCQRICGDLGVLEMDQIFGTRPPVADDLAGLALALERRSATPLVAL

SEQ ID NO: 224666 - protein, 368 aa, Zea Mays
MVLELVNGGELLDRIAASEGKLPEQEARRLFQQLVDGVSYCHEKGVCHRDLKLENVLVDRKGNIKISDFGLSALPQHLGNDGLLHTTCGSPNYIAPEVLQNRGYDGSLSDIWSCGVILYVMLVGHLPFDDRNIVVLYQKIPEWLSPGARNLLRRILEPDPAERIAMAEIKAHPWFQEHYVPVLPPYDDDDDHDSVKQIGAGSKTTHHINAFQLIGMASSLDLSGFFEEEDVSQRKIRFTSAQPPEDLFAEIERSATDMGFHVHRGHSKLRLTRNCDRSKNQKNPMSSSSSSFLVCTEVFELSPSLYVVELNKSHGDPALYRQLCQRICGDLGVLEMDQIFGTRPPVADDLAGLALALERRSATPLVAL

SEQ ID NO: 224667 - protein, 203 aa, Zea Mays
MRQRLQERTDRLGDLKTRAKKLSEDVVVRREQLCVKIRTLSGASKALEAARSNLKEANELLSGENGCGRLKDLEQQLRMRQQYMVAQVAQIYPVRPLDEQSSDHKPGFTSNITKTSNVESVLPNSPQNRPLVILGLQLSKLSVKKTGYFSDKTEVQKSSTVLGYAAHSPSLHPISMFLFGILCALEVHGHMFSTLRLQLSHHL

SEQ ID NO: 224668 - protein, 484 aa, Zea Mays
MASSSSLFSPCALTAKLGIGHASYGSGRRANLRRRGRLSVVAVQTGPQKPSPSSSQAAAAEDEADALQKLLKREYKYGFVSDFESFSIPKGLSEATVRRISELKAEPAWMLDFRLAAYRRFLTMVEPTWSDNEYAPVDLQSICYYSAPKTKPKLNSLDEVDPELLKTFDRLGIPLTEQKRLSNVAVDAVIDSTSIATTHREALMAKGVIFCSISEAIREYPDLIRRYLGSVVPPGDNYYAALNSAVFSDGSFCFVPKDTVCPMEISTYFRINDKETGQFERTLIVADERSTVSYLEGCTAPAYDSNQLHAAVVELVCEEGAEIKYSTVQNWYSGDEEGKGGIYNFVTKRGRCKGHGSKISWTQVETGSAITWKYPSVELIGDDSVGEFYSVALTKDCQQADTGTKMIHKGKNSRSRIISKGISAGKSRNCYRGLVLMNPSAENAYNSSQCDSLLIGDNAAANTYPTIQGIFIRVGLVKWLELSH

SEQ ID NO: 224669 - protein, 217 aa, Zea Mays
MARGGRGRGDQPAGHRAGQQPHPVAAPGPGPAHPRRRRRPRQRRRWGVRGAGQEGGGGVQDRRVADRRGGQGQQPVQARGGRHQRLGGRPGGEGRRLAQQVREEARGEARQGDGEGAERGGQGAAQGGGEARVGGGQAGHQGRAGAGARQLHEGRGEGALRQALLLLNPPPPPTGPLLLHQFLCPALLVVAARRLCSSVASFTASLHGIRQSDQCRA

SEQ ID NO: 224670 - protein, 435 aa, Zea Mays
MEVDGEAQHFRLFSKRAKPKLKPEVQPQPEPEPPSRDPAAAEAYLDPAPTIVTETGQADDAADAAGTAPATFADLGLSQWLVDACEALGMRRPTAVQRRCIPRALAGADVLGIAETGSGKTAAFALPILHRLGEDPYGVAALALAPTRELAAQLAEQFRALGAPLGLRCLAAIGGFDSLAQAKGLSRRPHVVVATPGRIATLVKNDPDLAKVFSRTKFLVLDEADRILDVNFEEELRVIFGCLPKKRQTFLFSATMSDNLRSLLELSGNKSYFFEAYEGFKTVETLKQQYIHVPPQGKELHLWHLLSVMKGKTEDPIRSAIVFVSTCKDCQYLDLLLEELRYPAVALNSHKSQAQRLSALNRFKSGQVPVLLATDVGSRGLDIQTVDLVINYDMPMSPRDYIHRVGRTARASRGGLAISFVTQLSVSQGGTAVVG

SEQ ID NO: 224671 - protein, 335 aa, Zea Mays
MAASGSGGNEPSGRPWTATSTWTPGPAGGAVADAVSFETSDDDAEASPAGVVLCHPSADSDRDMTPCPCEVTVSFRGKYEIHRVYVRSTARIYELYHSPDAKGTSKDYLCTVRCGLAVKETQCCGEESMSQWTGSALNSDKREHEAKSVSSASDEDSWVDVKIPESPAGNKTPESQERSVIRTCRENTLPHYEATAEMTDVNPCVSLTVRLLSLQSKTSVHIEEIYIFADPVEPTDDVSVRGPVNMGGSSLLAMLVPGLMQMSKSRNLKIDDSYFSDGSRNQESSKCESFTQEAGPCSTNDSKHTSAGIENGMNSTVGVSASDDKSSQVLSIAGE

SEQ ID NO: 224672 - protein, 2125 aa, Zea Mays
MKTKLINGPSYRKWHLSLPIMATLYRLAGQLLSDLIDRNYFYLFDMESFFTAKALNMCIPGGPKFEPLYRDMEKGDEDWNEFNDINKLIIRQPLRTEYRIAFPHLYNNRPRKVKLGIYHTPMIMYIKTEDPDLPAFYYDPLINPITSTNKVDRRERKAAEEEDDEDFCLPEDVEPLLKQTELYTDTTAAGISLLFAPKPFNMRSGRTRRAEDIPLVSEWFKEHCPPAYPVKVRVSYQKLLKCYVLNELHHRPPKAQKKKHLFRSLQATKFFQTTELDWAEAGLQVCKQGYNMLNLLIHRKNLNYLHLDYNFNLKPVKTLTTKERKKSRFGNAFHLCREILRLTKLVVDANIQFRLGNVDAFQLADGLQYIFSHVGQLTGMYRYKYRLMRQIRMCKDLKHLIYYRFNTGPVGKGPGCGFWAPMWRVWLFFLRGIVPLLERWLGNLLARQFEGRHSKGVAKTVTKQRVESHFDLELRAAVMHDVLDAMPEGIKQNKARTILQHLSEAWRCWKANIPWKVPGLPVPIENMILRYVKSKADWWTNVAHYNRERIRRGATVDKTVCRKNLGRLTRLWLKAEQERQHNYLKDGPYVTPEEAVAIYTTTVHWLESRKFSPIPFPPLSYKHDTKLLILALERLKESYSVAVRLNQLQREELGLIEQAYDNPHEALSRIKRHLLTQRAFKEVGIEFMDLYSYLIPVYEIEPLEKITDAYLDQYLWYEGDKRHLFPNWVKPADSEPPPLLVYKWCQGINNLLDIWDTSDGQCVVMLQTKFEKFFEKIDLTLLNRLLRLVLDHNIADYVTAKNNVVLSYKDMSHTNSYGLIRGLQFASFVVQYYGLVLDLLILGLTRASEIAGPPQMPNEFLTYADTKVETRHPIRLYSRYIDKVHILFRFTHEEARDLIQRYLTEHPDPNNENMVGYNNKKCWPRDARMRLMKHDVNLGRSVFWDMKNRLPRSITTLEWENSFVSVYSKDNPNLLFSMSGFEVRILPKIRMTQEAFSNTKDGVWNLQNEQTKERTAIAFLRVDDEHMKVFENRVRQILMSSGSTTFTKIVNKWNTALIGLMTYFREATVHTQELLDLLVKCENKIQTRIKIGLNSKMPSRFPPVIFYTPKEIGGLGMLSMGHILIPQSDLRYSKQTDVGVTHFRSGMSHEEDQLIPNLYRYIQPWESEFIDSQRVWAEYALKRQEAQSQNRRLTLEDLEDSWDRGIPRINTLFQKDRHTLAYDKGWRVRTDFKQYQVLKQNPFWWTHQRHDGKLWNLNNYRTDVIQALGGVEGILEHTLFKGTYFPTWEGLFWEKASGFEESMKYKKLTNAQRSGLNQIPNRRFTLWWSPTINRANVYVGFQVQLDLTGIFMHGKIPTLKISLIQIFRAHLWQKIHESVVMDLCQVLDQELDALEIETVQKETIHPRKSYKMNSSCADILLFAAHRWQMSKPSLVSESKDVFDQKASNKYWIDVQLRWGDYDSHDIERYTRAKFMDYTTDNMSIYPSPTGVMIGIDLAYNLHSAFGNWFPGSKPLLQQAMNKIMKSNPALYVLRERIRKGLQLYSSEPTEPYLSSQNYGEIFSNQIIWFVDDTNVYRVTIHKTFEGNLTTKPINGAIFIFNPRTGQLFLKVIHTSVWAGQKRLGQLAKWKTAEEVAALVRSLPVEEQPKQIIVTRKGMLDPLEVHLLDFPNIVIKGSELQLPFQACLKIEKFGDLILKATEPQMVLYNIYDDWLKSISSYTAFSRIVLILRALHVNNEKAKMLLKPDKTIVTEPHHIWPSLNDEQWLKVECALRDLILSDYAKKNNVNTSALTQSEMRDIILGAEIAPPSQQRQQIAEIEKQSRETTQLTAVTTRTTNVHGDELIITTTSPYEQQAFASKTDWRVRAISATNLYLRVNHIYVNSDDIKETGYTYIMPKNILKKFICVADLRTQIAGFLYGLSPQDNPQVKEIRCIAIPPQHGTHQMVTLPSNLPEHEFLNDLEPLGWMHTQPNEAPQLSPQDLTSHAKILENNKQWDGEKCIILTCSFTPGSCSLTAYKLTPSGYEWGRSNKDNGSNPHGYLPTHYEKVQMLLSDRFLGFYMIPDNTPWNFNFMGVKHDPQMKYNMKLGMPRDFYHEDHRPTHFLEFSNIEEGEVAEGDREDTFT

SEQ ID NO: 224673 - protein, 1252 aa, Zea Mays
MWNGAPPPPPPQMAAAPPPPGTTVPGAGQPPPPPPPAGAPLGGKPLTPAELEAQLVEKARKWHQLNSKRYGDKRKFGFVEAQKEDMPPEHVRKIIRDHGDMSSKKYRHDKRVYLGALKFVPHAVYKLLENMPMPWEQVRHVKILYHITGAITFINEIPWVVEPIYLAQWGTMWIMMRREKRDRRHFKRMRFPPFDDEEPPLDYADNLLDVEPLEAIQLELDEEEDAAVYEWFYDHKPLMKTKLINGPSYRKWHLSLPIMATLYRLAGQLLSDLIDRNYFYLFDMESFFTAKALNMCIPGGPKFEPLYRDMEKGDEDWNEFNDINKLIIRQPLRTEYRIAFPHLYNNRPRKVKLGIYHTPMIMYIKTEDPDLPAFYYDPLINPITSTNKVDRRERKAAEEEDDEDFCLPEDVEPLLKQTELYTDTTAAGISLLFAPKPFNMRSGRTRRAEDIPLVSEWFKEHCPPAYPVKVRVSYQKLLKCYVLNELHHRPPKAQKKKHLFRSLQATKFFQTTELDWAEAGLQVCKQGYNMLNLLIHRKNLNYLHLDYNFNLKPVKTLTTKERKKSRFGNAFHLCREILRLTKLVVDANIQFRLGNVDAFQLADGLQYIFSHVGQLTGVMIGIDLAYNLHSAFGNWFPGSKPLLQQAMNKIMKSNPALYVLRERIRKGLQLYSSEPTEPYLSSQNYGEIFSNQIIWFVDDTNVYRVTIHKTFEGNLTTKPINGAIFIFNPRTGQLFLKVIHTSVWAGQKRLGQLAKWKTAEEVAALVRSLPVEEQPKQIIVTRKGMLDPLEVHLLDFPNIVIKGSELQLPFQACLKIEKFGDLILKATEPQMVLYNIYDDWLKSISSYTAFSRIVLILRALHVNNEKAKMLLKPDKTIVTEPHHIWPSLNDEQWLKVECALRDLILSDYAKKNNVNTSALTQSEMRDIILGAEIAPPSQQRQQIAEIEKQSRETTQLTAVTTRTTNVHGDELIITTTSPYEQQAFASKTDWRVRAISATNLYLRVNHIYVNSDDIKETGYTYIMPKNILKKFICVADLRTQIAGFLYGLSPQDNPQVKEIRCIAIPPQHGTHQMVTLPSNLPEHEFLNDLEPLGWMHTQPNEAPQLSPQDLTSHAKILENNKQWDGEKCIILTCSFTPGSCSLTAYKLTPSGYEWGRSNKDNGSNPHGYLPTHYEKVQMLLSDRFLGFYMIPDNTPWNFNFMGVKHDPQMKYNMKLGMPRDFYHEDHRPTHFLEFSNIEEGEVAEGDREDTFT

SEQ ID NO: 224674 - protein, 238 aa, Zea Mays
MRWTTLSAVWDPLLAFPFPDREHEQNHHQRFWHWIVTEINKFVGFIILGAPRGYICRASPFISYHHREKSYTRPEPVVRGTERGGSEAARVLRLIHRSLSHKDRTVGIVLVHRMHVRQLHAPWMAGDYTIARRTSSAATVPCRAAARLCRQPKAPLKDDQAKPSLLLRRQVINFSSSSLLRCSMTSIVWLSTARPRWTCLAHFVLWIGCFSFFPFSPCEGLSGVWFLCQGNVHFSRWE

SEQ ID NO: 224675 - protein, 179 aa, Zea Mays
MRWTTLSAVWDPLLAFPFPDREHEQNHHQRFWHWIVTEINKFVGFIILGAPRGYICRASPFISYHHREKSYTRPEPVVRGTERGGSEAARVLRLIHRSLSHKDRTVGIVLVHRMHVRQLHAPWMAGDYTIARRTSSAATVPCRAAARLCRQPKAPFLLLWLDRRVDAQAVFDDVVTGSY

SEQ ID NO: 224676 - protein, 256 aa, Zea Mays
MWRRALAMVLFMAGAALLAGAAGAGAQQGVWSIITRPMFQSMLSHRGDSGCQGAFYTYDAFIEAASKFPGFGTTGDEQTRRRELAAFFGQTSHETTGGWATAPDGPFAWGYCRVKEQKQTDPPYYGRGPIQLTHKYNYRLAGQALNLNLVGDPDLVARDPVVAFKTAIWFWMTPQSPKPSCHAVMTGDWRPSATDRAAGRLPGYGLTTNIINGGLECGEDRSTDGAKAAKDRVGYYKSSQAESSRASSFSLLSGRS

SEQ ID NO: 224677 - protein, 203 aa, Zea Mays
MPTSSPRENSVRGIPSLSRQHNQHPRSVSCQASSLASFSYPELTSKPRWWWRTLACVPYLLPLHNMWSYADVIYQLHTYLQGFSLLYTFIDTMTLCPGWLFLVIFMTVYFFVVRRKWSPHFLRFHVILAILLDTGSQAVATMCTWMPSIVYQGKPMQYLWMSIAFIQIFTVLECLRCALCGMYPNVPFISHTAFIHSDLNLFR

SEQ ID NO: 224678 - protein, 943 aa, Zea Mays
MNVVGRVGSVISQGVYSVATPFHPFGGAVDIIAVEQPDGSYRTTPWYVRFGKFQGVLKGAEKVVTIRVNGVEANFHMQLDNSGQAYFMRELVPGGEDSGTGSDDETVNEPEPPARSKSDGELYIGPSDRLGSQELNVEHQEKQTRDEFESYDGYGRLEESEDLSTQADGGNSEVVLVSVDGHVLTAPISSTEEGMEDVQLCDPQFHLGPGQSSSGEFTRSGEVWDADILDGLYISQEKVKINSGHQSEVLTENGEVPVEKDGSHHISVDKDEVHVSINDDEAHAVSTNEVEVQDVSRSGNGDVVYQTMTSEGESHSILGDIDVGHQTLTREDDSPGVSGENVVGYQPLTNEHKAHDILENNDEDQPPLNNEDESCDVPVLEKDKDCNSPANKDEVCDLNNEDTEDTSASFGKNDAFQSCLDLTSQIDDGDSGNELFSPGSDSQRDAEHNLGNCSVAETDLEEGESKTAYCGQYGPLQEGVNVSLFTLEVDKTQNKESSPAGGSHDRDKEIASEIEAAASDGLQSSMATSGKDKLGSIPEHSEVEDEQNKEEHSQSQNGLGVEISLCGNMLRPGMGRESAEEVFQQNLVHEEDFKSSGSTMIKNANLIVKVDNNYFPWNKVSHVILGKAVYGSKFPLEPTDAVPVEQQETPKSREDSLRMSPSSRRWRLWLNPFRITRSLQRSNSDSSEDIFLDSESVLSPMDDQTLENNKNQSPRKQFVRTLIPTSEQVDAHIYLWKWNAKIVISDVDGTITRSDVLGQVMPLVGRDWSHSGVARLFSAIKENGYQLLFLSARAIVQAYLTKNFLFNLKQDGKALPNGPVVISPDGLFPSLYREVIRRAPHEFKIACLEDIKALFPSDYNPFYAGFGNRDTDELSYKKMGIPKGKIFIINPKGEVAVNSSVDVKSYTSLHTLVNDMFPPTTLVEQEDYNNWNYWKVPLPDVDL

SEQ ID NO: 224679 - protein, 444 aa, Zea Mays
MMLVPLRVLIAIEEGPRRKSSHASTQHSTSETGRGLDDTPIRRAEAASAADGHLPAPVAAMSKKKAVTTMTLKDFHGGSIPSELPLPSAPGVTPRPADRTVASASPVAAAVARPRVPVASPAAAAAAAAMPSFLTNPSRIGRHFDEDERTPFEPTTPRRPAPSPTSFAPAPVVAPTRSGPGNAWGPKKEASSAPSPVGHAPASAGDQIWSATRIAQASAVEKVISGRWHPPKPTSPPAPVSVPVLETPVAPPEIERPRSVGVRELDSGVERGAAPVRPASHEGRIGEGRAGEVPERPKLKLLPRSKPIEDPEQRPTYVEAKQVHQVQVTAGLMKAEDNHDLHQNARATETGVLGADAESRVAERPRLNLKPRSYVTGQSDEIAVKERPSLFGGARPREQVLKERGVDVLASDLEKTSPVGRLLYVVMHHVNIDRCISVVAGHKF

SEQ ID NO: 224680 - protein, 245 aa, Zea Mays
MALALRCPPAATSSRSPFLPSTSPAPAGKVPRRPPASWRCLAYYGDGGFRKNYDHIPKQFREENLKDGLMDNYKHVPQFLYGLSDAQMEMFMNDDNPYNRQSQKVTEESVSAARSYDEFGMYTLSGMHEGPASYSMGMGMGGSMSMSMGRGGRGYRRMRSSAPDLPSLLLDSRIIFLGMPIVPAVTELIAAQFLWLDYDDRTKPIYLYINSTGTMDENNELVASETDAYAIADFINVSHFQELCW

SEQ ID NO: 224681 - protein, 508 aa, Zea Mays
MGSLGEVGDGKEIFHGHGHSDPVVDELNRLQNLLREKERELGHAYSEIKGLKVTEALKDKAIAELSKELKRQDERMRSMEKQLEQKNLEVKRLNNERKEALSAQFAAEATLRRIHSSQKDEESVPFDAIIAPLESDIRKYRHEIAVLQDDKKALERHLKLKEVALVEAGNILHTALERALIVEDVQNQNIELKKHMEIYHEENKLLEKANRQKVLEVEKLTQTINELEESILATGEVANVVHFYQNQATKLNRTLERELARAKVYVNRVASTAANEWKDDSDKLMPVKRWLEERRLLQGEIQRLRDRITVAEKSAKIEAQLNDKLKRRLKSLEEDMRNKTSNSSTKEINKQATPKRSLSQPKQPKTMRVLPQLYSPEVVDKRRPISQPRASMVGKVLKQPNSEIEPTKKSTVVKRFDSPGRRTISSKEECPMKNQLWASKTKTDVIVGKENKVQKPNSKARLNASHSQGHVDTKVFDGNDEYGLQNSEHHEAMANERNGNSSSDESSP

SEQ ID NO: 224682 - protein, 498 aa, Zea Mays
MPSLKLRPILFPFQMEPRREELLHELGDMWDEIGEAEEDRRGALSALEEECLSLYRAKVEQVRQHRAQLKREISDSVAEVAAICATIGEPPSTVHTACSSLQESRTKKVAELVAQLHSSSLVLGMDPTEANSVVHVGADGAQVQPGDISDGAIAGLAAGIERLREIKRSRMEKLQDLLGSMLELWNLMDTPAEEQRQFQGVACNIAASEDEITEPGALSMAFISNVEAEVVRLENLKECRMKDLVVKKHEELKEIRRRARLPEDDDATVVMVFDAMDSDADRAAILEWLEVQISEAKDLEFNRKDVLEKMDRWQAALEEESWLEEYSRNENRYNVGKGTHLVLKRAEKARALVSKMPVMAEALMAKVVAWEKERGAKFEYDGEVLLDVLDDYGNARKEKEQERKRQRDQRRLLQQVQGAAAAADRDVSSPVAHPPPKNIKNVTRTLSMGGNNTSGGGSARKAAPAAARPGTPSFLKSPLSARRGGSDEGHMMASESFE

SEQ ID NO: 224683 - protein, 470 aa, Zea Mays
MPSLKLRPILFPFQMEPRREELLHELGDMWDEIGEAEEDRRGALSALEEECLSLYRAKVEQVRQHRAQLKREISDSVAEVAAICATIGEPPSTVHTACSSLQGTGSLKEELGMIAPELAEMRRRRDERRREFADVTQRVARIQEELDLQLGGGQGQSEAHAAAVIVDVDGSDLTTTKLDELRAYLQHLQLEKSHQEGGGARGSAALVILGSRHGSHRGEQCRPCWRRRRAGAARRHQRRRHRGAGCGHREAEGDQTEPDGEAARPAGQHAGAVEPDGHAGGGAAAVPGRGLQHRRVRGRDHGARRPLHGLHKQRRGGGGEAGEPQGVPDERPRREEARGAQGDPPPRAPARGRRRYRRHGVRRHGQRCRPGCDPGVAGGADLGGQGPGVQPEGRAGEDGQVAGGAGGGVLARGVQQKREQIQRWQRDASRAKARRESPRPGQQNAGDGGSSDGEGSRVGEGERRQVRVRR

SEQ ID NO: 224684 - protein, 442 aa, Zea Mays
MPSLKLRPILFPFQMEPRREELLHELGDMWDEIGEAEEDRRGALSALEEECLSLYRAKVEQVRQHRAQLKREISDSVAEVAAICATIGEPPSTVHTACSSLQGTGSLKEELGMIAPELAEMRRRRDERRREFADVTQRVARIQEELDLQLGGGQGQSEAHAAAVIVDVDGSDLTTTKLDELRAYLQHLQLEKESRTKKVAELVAQLHSSSLVLGMDPTEANSVVHVGADGAQVQPGDISDGAIAGLAAGIERLREIKRSRMEKLQDLLGSMLELWNLMDTPAEEQRQFQGVACNIAASEDEITEPGALSMAFISNVEAEVVRLENLKECRMKDLVVKKHEELKEIRRRARLPEDDDATVVMVFDAMDSDADRAAILEWLEVQISEAKDLEFNRKDVLEKMDRWQAALEEESWLEEYSRNENRYNVGKGTHLVLKRAEKARAL

SEQ ID NO: 224685 - protein, 100 aa, Zea Mays
MGVVRRLLLRYQWRLTAMEDLSIEAKEAAVRIPHPPCGGLPPSTHPPHPLSSPSIASSSYYRKYKEDMLMVSMMEGPRRTEKPTGVIFRKVKANEMNHHL

SEQ ID NO: 224686 - protein, 75 aa, Zea Mays
MCQTFVCHAFFSYSFFFQLYWDFLIDRLLVILLICDPSKTILSPKNDQFIQQCFVCLFLVMVHLLELLPTFTFYI

SEQ ID NO: 224687 - protein, 725 aa, Zea Mays
MWRLKIGEGRGPWMQTVSDFHGRQVWEYDPDAGTEEERSKVEQLRREFTENRFRRRESQDLLMRMQLTGQKHLHADDMGAATKIEDGDEVTEERLRESLRRALGWMSALQAEDGHWPGDFSGIMYIMPFWIFALHITGSIDVVLSKEHRREICRHIYNHQNEDGGWGFNILDESAMFSTCLNYTALRLLGEVQQEENDGLAKGRAWILSHGTATAAPQWAKILLSVIGVYDWRGNNPVVPELWLVPRFLPIHPGRFWCFTRITYMSIAFLYGKKFIGPITPTILELREELYSLPYVQIDWSKARNSCAKEDIRNKPSEIFKFISTCLNMFVEPVLNYWPLNKLRERALNHILEHIHYEDETTQYIGISPVTKALNMICCWVENPNSDALKRHIPRIHDYLWIAEDGMNTKIYDGTHNWELALIIQAMLSADAANEYGPTIQRAMEYLKRAQVTTNPPGNPSYWFRHRSKGSWPLSTIDNGWGSSDTSAEATKNKDGSVSTFECQRTYSWLEILNPLESFRNIVADYPTVECTSSVLQALVLFEEFNSEYRSKEIKENVKKAAIYIENNQNKDGSWYGTWGICFVYGTLYAIKGLVAAGRNYENSICIRKACNFLLSIQLKTGGWAESYHSCERQVYVEGHSTHVVQTAWAMLALIYTGQMERDPTPLHRAAKVLINMQLETGDYAQQEHVGSTNCSVYFNYPNYRILFPVWALGEYHRKVCTKSN

SEQ ID NO: 224688 - protein, 190 aa, Zea Mays
MWRLKIGEGRGPWMQTVSDFHGRQVWEYDPDAGTEEERSKVEQLRREFTENRFRRRESQDLLMRMQLTGQKHLHADDMGAATKIEDGDEVTEERLRESLRRALGWMSALQAEDGHWPGDFSGIMYIMPFWIFALHITGSIDVVLSKEHRREICRHIYNHQVIGVYDWRGNNPVVPELWLVPRFLPIHPGH

SEQ ID NO: 224689 - protein, 307 aa, Zea Mays
MSITDYLLNLENLLCGCGGFYLQDWSLAWYDSMFVYPLCRKYLMLHVFSMALVSQILSTIGSILVKIHGGSSGIGTFAIQIAKYLGIKVFVTAGSEEKLAACKVLGADVCINYRTKDFVERIKQETNGKGVDVIRDNIGGSYLQRNLNNLGVDGRLFIIGFQGGIAAEVNLQAVLARRLTIQATGLRNRSLAKKAEIVSEVEKNVWPAVAAGKVKPMIYKTFPLCEAAEAHRLMEASTHIGKILLLPLHLWRLRSYSRRSQFKNICNFCDSLHGCCTGVACLFYISCSTRLDLLPREIILSIGSLKC

SEQ ID NO: 224690 - protein, 77 aa, Zea Mays
MDEGATTSDSSAAETFDPDLIHAIFKLVWRRRAGKGAGGGGSIEDIDAERAPETSRRNRSTTGKRVFFPSLLLELAA

SEQ ID NO: 224691 - protein, 627 aa, Zea Mays
MALMRLLMIASLPLPLPSLSYKTSRCCCHRSRRLVRSAMPGACQDLSTITPTPRRQSMAQLQRGSVLVGGRELLVRAPPNVNLRPAGAGVADGGAASGAAFLGARAPAASSRHVFSVGNLASGWRWLSLFRFKIWWMIPATGVGAAAVPAETQMLLLEYRSEAGPAAATERGSLYALVLPVLDGGFRASLQGSPEDELQFCFESGDPDVQTMEAVDAVFVNSGDNPFKLLKESIKMLSKIKGTFSHIEDKEIPSNLNWFGWCTWDAFYKAVNPSGIEEGLQSLREGGVPPRFLIIDDGWQETVDEIKEVDEALREQTVFAQRLADLKENHKFRGETCKNLEDLVKTIKEKHGVKCNVQNYRCVYMWHALLGYWGGTLAASKVMKKYNPKLVYPVQSRGNVANLRDIAMDSLEKFGVGIVDPDKIYEFYNDQHSYLSSVGVDGVKVDVQNVLETLGRGFGGRVAVTRKYQQALEESIAQNFKTNNLICCMSHNSDSIFSALKSAVARASEDFMPREPTLQTLHIASVAFNSLLLGEIFIPDWDMFHSKHESAEFHGAARALSGGGVYVSDKPGVHDFSVLKKLVLPDGSILRARYAGRPTRDCLFTDPVMDGKRYEHEYRFTFSFATK

SEQ ID NO: 224692 - protein, 150 aa, Zea Mays
MTMRQSRFKRICVFCGSSQGKKRSYHDAAIELGNELVARSVDLVYGGGSIGLMGLVSQAVYDGGRHVIGVIPKTLMTPEVGLLNVDGYYNSLLTFIDKAVEEGFINPSARRIIVLAPTAQELMDKLEEYEPYHDMVASTLNWEMGNLQGY

SEQ ID NO: 224693 - protein, 155 aa, Zea Mays
MGLVSQAVYDGGRHVIGVIPKTLMTPEISGETVGEVRAVADMHQRKAEMARQSDAFIALPGGYGTLEELLEVITWAQLGIHHKPVGLLNVDGYYNSLLTFIDKAVEEGFINPSARRIIVLAPTAQELMDKLEEYEPYHDMVASTLNWEMGNLQGY

SEQ ID NO: 224694 - protein, 720 aa, Zea Mays
MALTTRGGAGGGDPAKAPSASDPSLGFLTKRDTEVKLPRATRVKNKTPAPIQITAEQILREARERQEPEIRPPKQKITDPHELSDYRLRKRKEFEDVIRRVRWSVSAWVKYARWEEQQRDFARARSVYERALDVAHRDHTLWLKYAEFEMRNRFVNHARNVWDRAVSLLPRVDQLWYKYIHMEELLGAVANARQVFERWMSWRPDTAGWNSYIKFELRYGEVERARAIYERFVAEHPRPDTFIRYAKFEMKLGEVERARRVYERAADLLADDEDAEVLFVAFAEFEERCREVERARAIYKYALDRVPKGRAEELYRKFLAFEKQFGDREGIEDAIVGKRRFQYEDEVRKNPLNYDSWFDYIRLEESVGNKDRIREVYERAIANVPPAEEKRYWQRYIYLWINYALYEELDAQDRERTREVYKECLRLIPHKKFTFAKMWLMAAQFEIRQRNLKAARQILGNAIGMAPKGKIFKKYIEIELYLGNFDRCRTLYEKYIEWSPANCYAWRKYAELEKNLSETDRARSIYELAIAQPALDTPEVLWKEYLQFEIDENEFERTRQLYERLLDRTKHLKVWISYAEFEASAGLGGEDGEDKEKKNEVSYQEQQMERVQKCRAVFERAFDYFRTSAPELKEERAMLLEEWLNKEVNFGDLGDVSLVQKKAPRKVKRKRPIPTEDGSTIAYEEYIDYIFPDEVALAPNLKILEAAYKWKKQKTGDGDE

SEQ ID NO: 224695 - protein, 551 aa, Zea Mays
MALTTRGGAGGGDPAKAPSASDPSLGFLTKRDTEVKLPRATRVKNKTPAPIQITAEQILREARERQEPEIRPPKQKITDPHELSDYRLRKRKEFEDVIRRVRWSVSAWVKYARWEEQQRDFARARSVYERALDVAHRDHTLWLKYAEFEMRNRFVNHARNVWDRAVSLLPRVDQLWYKYIHMEELLGAVANARQVFERWMSWRPDTAGWNSYIKFELRYGEVERARAIYERFVAEHPRPDTFIRYAKFEMKLGEVERARRVYERAADLLADDEDAEVLFVAFAEFEERCREVERARAIYKYALDRVPKGRAEELYRKFLAFEKQFGDREGIEDAIVGKRRFQYEDEVRKNPLNYDSWFDYIRLEESVGNKDRIREVYERAIANVPPAEEKRYWQRYIYLWINYALYEELDAQDRERTREVYKECLRLIPHKKFTFAKMWLMAAQFEIRQRNLKAARQILGNAIGMAPKGKIFKKYIEIELYLGNFDRCRTLYEKYIEWSPANCYAWRKYAELEKNLSETDRARSIYELAIAQPALDTPEVLWKVSFRTSAN

SEQ ID NO: 224696 - protein, 165 aa, Zea Mays
MLAEEEKKRIHIAQGLPWTTDEPECLIKPAVKERTEPIDLVLHSDVRALERAEFDQHVLDRNKFAEQQRLEWERQQELDEEERIRQLRRTELIPKAQPMPYFDRPFIPKRSTKPPTVPMEPKFYLRPEKLSCYYRQQCMELGKLNPQHQCQHPLWQSRNAEHRHT

SEQ ID NO: 224697 - protein, 1086 aa, Zea Mays
MPPKKRAAAAASSKKPQPSQPSQPAKFGILHFFERQTQASQNAKRQKPDPPAPPPPPPPPPEKEPSEVSPEVTKTLAPKRVRFSPGMLIKQSQDDGVAEVVTWKISPVNHRLGTTKSKQFLGMAPHPYSSEKNSSLDAMKKWHSSPLGLSRCTTLGSNSGVLGSAIVGCDGVGDTQSPFRTPPSLSYGCNEVTFLFLEQQVSSGVTSEGGAEPSGAGQHKKALLDLLDQVEDAIMEEELPADPGNKGGQTTNEDITNNSRSPVADTDLTIPSKKTIHVPPFNSFLVLEVSEKHKADDSSCDRYPVKVLRLLNEHSGTECAVHLCDEWFDSIVGPGDTVNVIGEFSNHGKCIVDHDNNLVIVHPEQLISGTRAASSFQCLRRSVLDERLKSNEYSTSALTGTLLHQVFQAGLLNDAPSWQFLEQQAKEVLLKNIETLYACGVNESNMYSTLIEAIPKMLNWFKCFLKGSKCSDVDFGHNEVRKTVGVTEVMDIEEMAWAPRYGMKGVIDASVRSRVESHNGGSYDRIMPLEFKTGKATSGQAAMEHSAQVMLYTLLMTERYLNEDIDLGLLYYLHTDQTLGIKVKRTDLIGLIMRRNELATEILKASMSQSFPPMLQSPSTCNRCRHLISCTIYHKAHGGSGTTSGLGDLFDNLVNHLTVTHHNFLKHWDRLIDLEARASQVKKNILQPHNSNYGSGSSAVPYFVLDIKNGHSIDSSGKSKRYIYNFVQQKMQPETADQLDAQFDSIDFSLKVGDFVVLSTQSGRIAVANGCIREIISHSHITVSLPRRLRIPDSNSLSEQEDLTREIWRIDKDEFSSSFGIMRLNIVQLFAQNPQNSHLRKLIVDLEAPRFDSGGLFSQDPALSYIRSLPNLNNDQQRSLHKILGAKDYALILGMPGTGKTYTMVHAVKSLLIRGESILLTSYTNSAIDTLLMKLKTEGVDFIRIGRPEAVHPDVRAHCLSTTEAQSVDAIKARMEQVQVVGVTCLGMYHPLLAHKKFDTCIMDEAGQITLPVSLGPLMLATKFVLVGDHYQLPPLVQSSEARENGMGISLFWRLSEAHSQAISALRCQVVLWFIGNCKCQTQVFW

SEQ ID NO: 224698 - protein, 221 aa, Zea Mays
MHGRPRRPAKPEDDEAASAKAAKLRDLQAQVLHNHHARTYTKESIGLSFKLLETNPEAYTAWNYRKLALQHNVKELSDPQAIKSAIDDELRVAEVALRQNPKSYGAWYHRKWLLNQKLAPVDFKYELGLLDKLLKVDARNFHGWNYRRFLARFMGLPDDEELKYTMDKISDNFSNYSAWHNRRAKVLSQSRRFFPRSLNLLLKLFLQIQVTKVDGSITSGF

SEQ ID NO: 224699 - protein, 568 aa, Zea Mays
MATAATAMVVPEQPRRRKPAPGRGGVALPAGLSEEEARVRAIAEIVSAMGELSRRGEDVDLNALKSAACRRYGLARAPKLVEMIAAVPEADRAALLPRLRAKPVRTASGIAVVAVMSKPHRCPHIATTGNICVYCPGGPDSDFEYSTQSYTGYEPTSMRAIRARYNPYVQARSRIDQLKRLGHSVDKVEFILMGGTFMSLPADYRDYFIRNLHDALSGHTSANVEEAICYSEHSAVKCIGMTIETRPDYCLGPHLRQMLSYGCTRLEIGVQSTYEDVARDTNRGHTVAAVADCFCLAKDAGFKVVAHMMPDLPNVGVERDLESFREFFESPAFRADGLKIYPTLVIRGTGLYELWKTGRNYPPELLVDIVARILSMVPPWTRVYRVQRDIPMPLVTSGVEKGNLRELALARMDDLGLKCRDVRTREAGIQDIHHKIRPDEVELVRRDYAANEGWETFLSYEDTRQDILIGLLRLRKCGRNVTCPELVGRCSIVRELHVYGTAVPVHGRDVDKLQHQGYGTLLMEEAERIAQKEHRSEKLAVISGVGTRHYYRKLGYELEGPYMVKCLA

SEQ ID NO: 224700 - protein, 135 aa, Zea Mays
MADGGNVALHEIDGLVVVLKLQGACGSCPSSTMTLKMGIETRLRDKIPDILEVEQIVDTETGLDLTADNVDKVLDEIRPYLSGTGGGSLELLQIDGYVVKIRIGGPAAGVMTVRVAVTQKLREKIPSILAVQLTE

SEQ ID NO: 224701 - protein, 222 aa, Zea Mays
MLGGQSETVKYRVFAGTWNVGGLAPPDDLDLEDWLDTKNDSYDIYVLGFQEIVPLNARNVLGPKQRRAAMKWQLLIGDALNSTRHGAAGMHGQGQGGAFRCLMSKQMVGIFVSVWTRSSLCRHVRHPGVCSVGAGVLGRLGNKGAVSVRFLLHGTSFCFVCCHLASGGEKGDALRRNADAAGILSRTSFLGFGGVAAAPAAWCCSATSTTGSPWTMTKHGSW

SEQ ID NO: 224702 - protein, 235 aa, Zea Mays
MPRPGLQANGNEKQKGNNSNMKASSKVKKEVSSDDDFVMPTAQKKSAGAAGSNAKTSKVKKIKDEDLEDLKEDKKRKKRVGVKEEAKLALAIVKGEKVKKERKVYGLPGQKHDPPEERDPLRIFYESLYEQVPTSDMAATWLMEWGLLPVDVARKCFEKKQGQKVKSPVKAIVAKRIPSSPAKTLPSSAKKLVMPSNSAGKLKSQKKRKASDDTDDDDDDDDFVASKAKTKRHKA

SEQ ID NO: 224703 - protein, 647 aa, Zea Mays
MDVDIKINLDVDLERQITAAIDPKLLQHLVNALFRGTLSINDSDLSEPSDAEVDAVGCICAFLHVTFNTFPLERIMTVLAYRTEIVPALWNFIKRCHANRRWPFFSKFASSLPADAPGWLLPMSVFCPIYKHMLKIIDNGEFYEQEKPLSLKDLKSLVLILKQALWQLLWIIPSSSTQKVSSNPSGLKKLSVENVKIRARVGLSELLTQLQDWNNRLPFTSASDFYSQEATSENFVSQAILGNTRASEIIKLAPFLAPFTSRVKIFTSQLTSSRQSISHSALTRQRFKIRRNRLLEDAFDQLSLLSEEDLKGPIRVSFINEHGEEEAGIDGGGIFKDFMENITRAAFDVQYGLFKETADHLLYPNPGSGLVHELHLQYFNFLGSLLGKAMYEGILVDLPFATFFLSKVKQKYNFLNDLPSLDPELYRHLLFLKHYNGDISELELYFVIVNNEYGEQCEEELLPGGRDMRVTNDNVITFIHLVANHRLNYQIRAQSTHFLRGFQQLIPKDWIDMFNEHEIQVLISGSLESLDIDDLRSNTNYSAGYHPDHELVEMFWEVLKSLSSDNQKKFLKFVTGCSRGPLLGFQYLEPKFCIQRAGVPGLEEHADRLPTSATCMNLLKLPPYKSKEQMQTKLLYAINSEAGFDLS

SEQ ID NO: 224704 - protein, 309 aa, Zea Mays
MENITRAAFDVQYGLFKETADHLLYPNPGSGLVHELHLQYFNFLGSLLGKAMYEGILVDLPFATFFLSKVKQKYNFLNDLPSLDPELYRHLLFLKHYNGDISELELYFVIVNNEYGEQCEEELLPGGRDMRVTNDNVITFIHLVANHRLNYQIRAQSTHFLRGFQQLIPKDWIDMFNEHEIQVLISGSLESLDIDDLRSNTNYSAGYHPDHELVEMFWEVLKSLSSDNQKKFLKFVTGCSRGPLLGFQYLEPKFCIQRAGVPGLEEHADRLPTSATCMNLLKLPPYKSKEQMQTKLLYAINSEAGFDLS

SEQ ID NO: 224705 - protein, 443 aa, Zea Mays
MCDLFVSKYFPCIFFPNQAADIIAVSTSLLDTLPAVTTPTERADDDDETPMDVDIKINLDVDLERQITAAIDPKLLQHLVNALFRGTLSINDSDLSEPSDAEVDAVGCICAFLHVTFNTFPLERIMTVLAYRTEIVPALWNFIKRCHANRRWPFFSKFASSLPADAPGWLLPMSVFCPIYKHMLKIIDNGEFYEQEKPLSLKDLKSLVLILKQALWQLLWIIPSSSTQKVSSNPSGLKKLSVENVKIRARVGLSELLTQLQDWNNRLPFTSASDFYSQEATSENFVSQAILGNTRASEIIKLAPFLAPFTSRVKIFTSQLTSSRQSISHSALTRQRFKIRRNRLLEDAFDQLSLLSEEDLKGPIRVSFINEHGEEEAGIDGGGIFKDFMENITRAAFDVQYGLFKDQDWFMNYICNISIFLEVYLGRQCMKAYLLTCHLQRSS

SEQ ID NO: 224706 - protein, 309 aa, Zea Mays; identical to SEQ ID NO: 224704

SEQ ID NO: 224707 - protein, 414 aa, Zea Mays
MAPEKPRKEQEEELMLEDGGIEESPRRSFEDCGDSEEDRGEGDDEEERDSDRDGVGSTRSFLPQKWPQSYRETTDTYTIAASPSFGYLGSSTSKYSLLDLGRSILGSDLKSPLISAKADSVRNLPKTLGSMRDGRVSFQLQHTGEIYISQGCNVTQTVFNGINVLAGVGLLSTPFTIHEAGWTGLAVLACFAIVCCYTGILLKHCFESKDGISSYPDIGEAAFGRIGRVLISSYCVEFIILEGDNLTSIFPKAGFDWLGIHVDGKHFFGVLTAILVLPTVWLRDLRVLSYLSVGVTDGIGFHSTGKAVNWSGMPFAIGIYGFCYSGHSVFPNIYQSMSDRSKFPKALFICFAICTAIYGSFAVIGFLMFGKNTLSQITLNLPKHSFASEVALWTTVINPFTKYPFHQNLGISVF

SEQ ID NO: 224708 - protein, 225 aa, Zea Mays
MAVRGSSAFKLRFYPNLEVQNIAQEWVKESRRLFYLRTANNVTNNIYKGNTPLWTGMVQNELSEDCRGLNYTYLNNLRERVSSKSIVNRHGNNRELIGHSTINQHVKSVPAPVRVVNDSVKCFSMPRASKVEIPWPAYSPAEDPLLDKSNTEVILELEDKVHDGDDKKKKTVVKKVVSPFPTKAAFSEESLKAREALASIYDKVLVVDDIESARNIVKLLTTKYK

SEQ ID NO: 224709 - protein, 225 aa, Zea Mays; identical to SEQ ID NO: 224708

SEQ ID NO: 224710 - protein, 435 aa, Zea Mays
MGRVDGFSSQQNRDDNKFTWTDVSERIIKPSTPFDRSVYKDAEEDTLPSTSDDDNGQDFKENKYKEMIFGEDALKIPPSESYCLSRPIRRGHFNVSHNYSVHQVLEDLRTIWNWILTEKLHINPRDRGLYSAILVLGETFDNREIKEMLSIVLHDLGFSTAVVHQEALSAAFGNGLSTTCVVNIGAQVTQVVCVEDGVALPHTALALPYGGDTGSIDAAVLVHSYDNERSGGHQKTRLSAINVPPMGLLYPRVLVPEEYPPPPRSWFQDYDDMLEDTWQTSDGLYPSGNGGFGMWDSYPMFPTRLKKFDNIGLVEAIISSVLSTGRVDLQKKLFGSIQLVGGAASTAGLAQVLEQRVRTKISANQSIEKVEVLQSRTYPLFVPWKGGVILGVLDIGKDAWIHREDWIKNGVHIGSGRKYKDSYFLQAQVMCYYNV

SEQ ID NO: 224711 - protein, 283 aa, Zea Mays
MIFGEDALKIPPSESYCLSRPIRRGHFNVSHNYSVHQVLEDLRTIWNWILTEKLHINPRDRGLYSAILVLGETFDNREIKEMLSIVLHDLGFSTAVVHQEALSAAFGNGLSTTCVVNIGAQVTQVVCVEDGVALPHTALALPYGGDDISRCLLWVQRRHGTWPNFQTDPMSNPIDMLMLNKIKESYSQIKTGSIDAAVLVHSYDNERSGGHQKTRLSAINDVLTFKRSCLVAFSWLVVQLLQLALHKCWSKGFALKFQQTNLLRKLRCCNLGLIHYLFHGKVE

SEQ ID NO: 224712 - protein, 328 aa, Zea Mays
MIFGEDALKIPPSESYCLSRPIRRGHFNVSHNYSVHQVLEDLRTIWNWILTEKLHINPRDRGLYSAILVLGETFDNREIKEMLSIVLHDLGFSTAVVHQEALSAAFGNGLSTTCVVNIGAQVTQVVCVEDGVALPHTALALPYGGDTGSIDAAVLVHSYDNERSGGHQKTRLSAINVPPMGLLYPRVLVPEEYPPPPRSWFQDYDDMLEDTWQTSDGLYPSGNGGFGMWDSYPMFPTRLKKFDNIGLVEAIISSVLSTGRVDLQKKLFGSIQLVGGAASTAGLAQVLEQRVRTKISANQSIEKVEVLQSRTYPLFVPWKGGVTITKLD

SEQ ID NO: 224713 - protein, 173 aa, Zea Mays
METVEEDVEEYSWREVVLPHLVPVVPGAQPELERETGERRRGRDLLVAVDFGPNSKHAFDWALGHIARMADTVHLVHAVSSVQNEIVYDKSRELMEDLAVEAFKTLLVRTKARIVEGDAGKVICREADRLKPAAVILGTRGRGLIQSVLQGSVSEYCFHNCKAAPIIIVPGKV

SEQ ID NO: 224714 - protein, 88 aa, Zea Mays
METVEEDVEEYSWREVVLPHLVPVVPGAQPELERETGERRRGRDLLVAVDFGPNSKHAFDWALGHIARMADTVHLVHAVSILLCLNAN

SEQ ID NO: 224715 - protein, 732 aa, Zea Mays
MRRFFFFGSPAANAGEGAGQPVNDSRTGHRKTDEGKDISTARLSRSRSRRQKRNKEEPANPKQLRRSMSFSSPARSSCVEERCFSFSGDVPCSLYDESDAPHHAKDVAPDMWSPEGNPFSREYAIRTPKDHSAMENDSPRSKYCSCSAGHSPVSSPVAIQCRSTRLGNLLNRNEVLDRYIDRGHGDAIVDEKQKQCVPTVSNLGRPPRPHSTVPSIPRPFKETTESYPDVDLNDAFLWRLAQEGIGDTHKITTMCSASRRHINMSDASERESATTVEDIYEDLQDVRLPNVICPSTCPNSAVEETDDMLLQRVKEVESRFTIPCGDEYEFSMLRYKSSTSNDMFQLIQQLTEDRKQLAYELSSEIKARVTERFAAKEQYKQLKKELDNRTRRLEKEKSEVQTTLEGEMDRRSDDWSIRLSRFQSEEERLHERVRELAEQNVSFQREVTSLGATKAEALMKAASLETQNSKLNDDLEKLKNEHEKLHYSSTDLQARFAEIVEERDHIREYLKAKEGENKALHKVIARLQTTCNEQERTITGMRQGCIDELGRKFVEYSTNDKTRKLQMELIRLTGVEQKLRGEIRSCNLEVKSLRQENIALLNRLQGAGNGASFSSIRLDQELQARVDNLQMQGLSLLDKISQLCTKLLDLMKHKRHENEYLCGNDVSTFSDYIFEYQSIKGGIEGLKLSLKAINSILAEKQNAKEKSGEIVAEGSPSKDQTVSYTWMILDSS

SEQ ID NO: 224716 - protein, 520 aa, Zea Mays
MTRDPCAASSCYPATPSAHRGCWWCSRASAPEASSSPSSPRHSTSPTPSRSAATASTTASSAPRARRRTSSSRTPPPAVAHTLEDVDAVFVNAILSGIQQRNLEVAWGKSVLDRVGLIIEIFNAHAETKEAKLQSELAALMYMKTRLVRVRGPGGRLTFGPSGEAEVVSARGRGSGGRGFMSGAGETELQLQRRRIQERRVSLLAQIEDVRRTRAIQRSSRKRHGGSFGQELVTVAVVGYTNAGKSTLVSALSEADLYSDDRLFATVDPRLRSVILPSGRKALLSDTVGFISDLPVQLVEAFHATLEEVVEADMLVHVLDSSASNLEEHRSTVLQVLQQIGVSQEKINNMIEVWNKIDLVDENVKSDGIDDEVFLTEGEQEDDIFSEDDAPSEQTSFDSVDVDDGADSEYLSEENSEDSNELPSKKSFAEPTEMGAMKELSSKECFGELRVLDTNGHTFPQPASTCHVKTSAVTGTGLQELLALIERKLTEQQTVVQRSYGPFDRKWRPTSMDCEKAAEP

SEQ ID NO: 224717 - protein, 317 aa, Zea Mays
MMTGRLNVATSSSPGGDDFLFMPMQQHQPPPPPPPPYVGFEHGHGVAGGGSQRVAGGVQHHLYDGLDFAASALQFQQAEAPHLHQQQLLTLPSSLGPMAPPPPPPPLPMPMPVPGMPGDHVYPALGMVKREGGGADGRIGLNLGRRTYFSPGDMMAVDRLLMRSRLGGGGGAFGLGFGFGFGGAHHLQAPPRCQAEGCKADLSGAKHYHRRHKVCEYHAKASVVATGGKQQRFCQQCSRFHVLSEFDEVKRSCRKRLAEHNRRRRKPPTTASSKDAASPPANKKPNCGSITSSYSTDNKSKHIYISIRVLSFPVMDQ

SEQ ID NO: 224718 - protein, 862 aa, Zea Mays
MSGGGAGGKGAAAPVPPGSRKLVQGLKEIVNRPEAEIYAALRECGMDPDETVSRLLSQDTFQEVKSKRDKKKEIKEVPETRYRSANSSTNRGLRSGVDRGGRNNSMHSSSTDNMTSRPPGSGTASGTSSQRQTVASPSANKHMVADGPAASLQSSSGFQHGGWSGTPGQLSMADIVKMGRPQGKTSIKPVVTADRGYAGQYPSLPSTNQNLKQSGSMVPPTELDKGLQPAQDSVQVKDHDHSTADSKLPYGTDWSPQDGPTFANQSSLPEPSGDPSLYEASFQSSTLVTDVVNSHENSHLDENDTFAMGPAPASERHLDPSDGISEYNDVILNNSSSYQPHNYSYTEQQEVEDSSADVSAAAANFQSLSLHNDELAAKKSAEDNPAVIIPDHLQVTNTECVKLSFGSFGSGAFSGLLPQNTTDSNVEFPAREESAPVDQIDARNQDYYESGAVTSPADENLEAMLGANMENVDAPSVSQANELRQDVLDPSELQYDVPSVPSHAYSNTDTLQPSTIEEPQGNNQAHTLSHLSNLMQANPLSTSSLLGSNQNHATLHGLEFDLPPYLGAKYNAGSTTNPRPPISMQQEALKAGVFSNAQSTQSLPSTSIQTGLPLPQQLAHHPYSQPTLPITHFPNMVGYPYLPQNYATYLSSGTFQQAYPSSGPFHQSAAAALLASGMKYSTPEYKNNLSATGLQQQHQPQPQPLSSVISGYGGFGSSSNIQGNFTLSQSTGSASALGFDEALSRQYKNTSQYMALQQGDNSGMWVHGSGSRAASTLPPNHFYGYQGQSQLGGFARAQQPQPSQFGGHGYPTVYQSQGQEHPQNLAEGSLNGFQVTPSQPSHPSWQHQHTFGHDFTASKTFP

SEQ ID NO: 224719 - protein, 684 aa, Zea Mays
MDISCPGALPSRRTVLHIHENMANKFKGILPRIVAQVTPATARSGTAGEWELQRGILEVSLTPKLEDASHREESPGAGVHLPARGLPSVSPCRETGQWSCDPVVGARTGCGNVRVETDTRGPQLNNGERLKDYEQFTCNGSVDIRGYPASKRHTGNWRACYSILGGEFCGAMAYYGVGTNLVSYLTKAQKKSNVAAASNIASWQGTCYLTALLGAFLADSYLGRHRTIVVSLMVVTMGVLLLTLSATIPASIHVMATATSNSQEALSSLGLFLTALGLGGIWPCVPTFGADQFDDTDAAEKEQKQLYYNWYYFAVNGGFLFASTVLVWVQDDHGWGWGFGIPAAVSAVGVAGFLACMKLYRYQKPGGSALTRICQVVVAAARKVNVDVPTDSSLLHEMPPGEESAIVGSRKLMHTDGLKFFDRAATITTSEDKSTDATNPWKLCTVTQVEELKILARMLPVFLTGIVFNTAEAFFPLFIEQGQVMDNHIIEQLWIPSATLTTFNCLCIIILAPAYDKVVMPVVSRITGMKRGLSELQRIGVGMVFAMFSMVSAALVETVRLDTAKNRLLMSILWQAPQYMFVGVAKVFSIVGFIEFAYEQSPDAMRSLCQACSLLMVTLGSYLVSIMLKMIDSVTAGRGSHGWIPEDLNEGRLDLLFWLMAVLHLLNLLAFAYCAARYKCKLAT

SEQ ID NO: 224720 - protein, 225 aa, Zea Mays
MGIRGVWIKLPITLSNLIPPVVEEGFWYHHAEETYLMLAYWLPNTTHTLPVNATHRVSVGAFIMNDKREVLAVQEKSGVLRGLGVWKFPTGVVEPGEDINVGAVREVKEETGIDAEFVEVLAFRQSHKSFFDKSDLFFVCLLRPLSYDITKQDSEIEACQWMPVEEFAAQPFVQKHELVKYILEVGLAKVDKEYAGFSPISIKSAFTDKLSLFYMNRRDLDRASG

SEQ ID NO: 224721 - protein, 71 aa, Zea Mays
MILLTLVLFVVLSFICCDLAKVNSTDGTNDTSICFVNTLRSLLSYFSFKVRCRLKVHIMNRALPSFELLHN

SEQ ID NO: 224722 - protein, 71 aa, Zea Mays; identical to SEQ ID NO: 224721

SEQ ID NO: 224723 - protein, 71 aa, Zea Mays; identical to SEQ ID NO: 224721

SEQ ID NO: 224724 - protein, 71 aa, Zea Mays; identical to SEQ ID NO: 224721

SEQ ID NO: 224725 - protein, 71 aa, Zea Mays; identical to SEQ ID NO: 224721

SEQ ID NO: 224726 - protein, 71 aa, Zea Mays; identical to SEQ ID NO: 224721

SEQ ID NO: 224727 - protein, 71 aa, Zea Mays; identical to SEQ ID NO: 224721

SEQ ID NO: 224728 - protein, 71 aa, Zea Mays; identical to SEQ ID NO: 224721

SEQ ID NO: 224729 - protein, 71 aa, Zea Mays; identical to SEQ ID NO: 224721

SEQ ID NO: 224730 - protein, 105 aa, Zea Mays
MEKKRVRLDFQRAFSSPMEQILERLRAFGEFEIIIFGDKVILDDPIEIWPNCDCLIAFYSSGFPLQKVQAYAALRRYIFYSLFLYISLSNGNYSCKHVSIFLIMS

SEQ ID NO: 224731 - protein, 264 aa, Zea Mays
MSTPEFKLDTNAPTVSWADPKNANEATSTAQVKSLYVKNLPKTVTQEQLKKLFEHVGEITKVVVPPAKSGHENRYGFVHFKERYMAMKALKNTERYELDGQLLDCSLAKPPADKKDSTVSTPTAKGGPLLPSYAPLGYGLVGAYNPRGKGLADAYNNPLGNGLAGAYGVLSARAAQPMVYAPGAPPGSTMIPMVLPDGRLVYVPQAAGQQPVHATSPLPQQGGRRFGGSGSGGGGSSSSGGKRQRGDDHGSNSNNSRRGRHRPY

SEQ ID NO: 224732 - protein, 143 aa, Zea Mays
MASSSCALLGLACFVLLAAAAGATQYKVGGDNGWAVPDATAESFNTWAEKTSFQIGDSLLFVYPKDKDSVLLVEPADYNACNTSSYDKQFDDGSTSVALDRAGAFFFISGVEASSPRLQDASPTPCLLSETENCWMQCSRRVV

SEQ ID NO: 224733 - protein, 192 aa, Zea Mays
MDCSSPASDAVARSGDDRKSEGEEKLGLGLLDSSGGDKAKKKRSKKKPPRPPRPLTPTPLDVSDQKLLNELSELAVLKRARVERMKALKKMKNAKQGFSGGNLCPLIVTVIFCVVILWQGFFSGHGPAVSFHGSPESSIRGTRSSLISIRFYKNHSNTRPPPFSETTAAPDNVVETGPRLRNRNQARRLLAR

SEQ ID NO: 224734 - protein, 155 aa, Zea Mays
MYKLKAAIQGLAGSRSAAAEVYGGEYQFQRAVENLCEPRFPNPLTRAHRCGFLCCFPPSRALLLHGAMAGSGNRRFGRDMVSSSTHFSQWQMVWVGDHVPGGRVDLQCGGPIWPPMSARSGANSDSLAVTTFRCSFRCSDDLSLHPWISRQLASK

SEQ ID NO: 224735 - protein, 166 aa, Zea Mays
MWYTWTHQGLCFRSLQERAPSSGNLSCYIFTSHSSCYWACYWRLPCTGIVVDKNISSIRKVSIIPSLLCNIVASSRIMYCMHLASDRIGNIPIFLHIQWGLGDALHGKHSHFHHQRYVPDSCCLLLLFATNWTFLGLLHYCLYIWCLIKLVVDILASLDIVQHITA

SEQ ID NO: 224736 - protein, 639 aa, Zea Mays
MTSSASPNPSPVPVPTPITTANGTTSSPKDQPPPPPPLPQQQQQQGGGQEEAEAADGGGAEAAEAGVLAGVAAEAMEVDGGSGAGDAEAGGSVGGGVGAGAGGGAQQASPATVFRIRLKQSPASLRHKMRVPELCRNFSAVAWCGKLNAIACASETCARIPSSNSSPPFWIPIHILNPERPTECSVFNVKADSPRDFVQFIEWSPRSCPRALLVANFHGRITIWTQPTKGPVNLVRDASLWQCEHEWRQDLSVVTKWLSGISPYRWLPTNSTSSNLKTFEEKFLTQQPQSAGSVQLHWSQWPSQNSAHSRWFSTSKGLLGAGPSGIMAADAIVTESGALHVAGVPLVNPSTVVVWEVMPGLGNGIQATAKINAASSVPPSLNPPSWPGFAPLAAYLFSLQDYLVSEGAQTKKLTDNNETTEAASIHCCPVSNFSAYVSPEAAAQSATTTTWGSGVTSVAFDPTRGGSVITVVIVEDERSSSECSVDRANRLSFDPYDLPNDVRQLAQIVYSAHGGEVAVAFLRGGVHIFSGPNFDQVDSYHVNVGSAIAPPAFSSSSCCLASVWHDTLKDRTILKIIRVLPPAILSTQTKISSAAWERAIADRFWWSLLAGVDWWDAVGCTQSAAEDGIGKGIADDDML

SEQ ID NO: 224737 - protein, 106 aa, Zea Mays
MPSSHSATVTALSVAVGIQEGFRSATFATALVFACVVMHDAFGVRLHAGKQAEVLNQIVYELPEEHPLSETKPLREILGHTVPQVVAGCILGILMAVVMLLALGRS

SEQ ID NO: 224738 - protein, 352 aa, Zea Mays
MLPAFLACCNELVDRWEKQISASAEPTELDVWPEFQNLSGDVISRAAFGVSYEEGRRIFLLQAEQAERLVQSFKTNYIPGFSLLPTENNRRMNEIDREVKTILRGIIEKRQKAAKNGEATKDDDLLGLLLESNMNYSDSDGKSSKGITVEEVIGECKVFYFAGMETTAVLLTWTVAVLSMHPEWQDRAREEVLQVFGENKPDFNGVARLKVVTMVLYEVLRLYPPVAAINRRTRQPTKLGGVTYPAGVMLTTPVMFIHRDPALWGSDADEFNPGRFADGVSKACRDPGAFAPFSWGPRVCIGQNFALLEAKLAVSMILQRFAFEVSPAYVHAPYTVLTLHPQHGAPVRLRRL

SEQ ID NO: 224739 - protein, 213 aa, Zea Mays
MAAAQAISKGSVVSPCGNRAAPGFLARRRGAVAARMAPSAARIGGFWRKNAFPGGRLTLRTRRSRAASPTQMNMNLALGKSMRWWEKGLQPNMREIESAQDLVDALTNAGDRLVVVDFFSPGCGGCRAFHPKVRGKSITNSRCMIFFIYPRTFEKIVSFLRNLFRADLSICGAESRCAVLASELRGAQVYVPQPSCPCPTLVQILQGSTGTTL

SEQ ID NO: 224740 - protein, 248 aa, Zea Mays
MAAATEKTAEDIRRELQELQRQHREITERLRDPRGLRRGAPGPGPGPGPPRPLRGFVRPHVGAEVADQAPQKRRLLSAVVKVDGAENNEEGTKDANGEGQEAGSGATEGSDRRTFNTGGFRRDGSLWMQRRVDYNSLPEPAPRELPRNEDPSLVRRNKRMLGQLLVGTLEKFQQEDKKLSNSEAFLRRSETQRKAEQKVREESERLRQQEREQIAEKRKRDMLLRQKKRGWSCCTFSGLSIIKGCPIS

SEQ ID NO: 224741 - protein, 69 aa, Zea Mays
MLLVSVAPYQFMDLRGTQGGAVLSLAIAAYLAFQHFTRVGGPGKAFEQGSIVATLAIICIMIVPLMLLF

SEQ ID NO: 224742 - protein, 663 aa, Zea Mays
MSASVDAASAVAVPAVPPAVEEAGGAVEQARTLIAALNLLSRNLPLPPDVMRAVSSIYHDGGAGDRAGEEEKGGDEEMPAADGAAEGNCSVYAAGGATEGKAFTLQGTTLIEELEDAILKNQRTPITYSELAAIREGRFNASIQHRLAELEGLPSTRGEDLQMKCLLELYGLKLLDLQKKVRSDISAEYWLQKKCAYPERQLFDWGMMRIRHPFSMYGIGDSFSVDVDDVHRRKRFTERMSRLEEEGKNQADIRKRKFFAEILNASREHQVQLGTTFKQRKQRNDGVMAWHVRARQRITRQEKSRINLLKTGDQEAYMRMVEESKNERLKMLLDKTNELLEGIGKAVQRQKDAEHVSKPEGGSEVPKGSESEDCSQISGIKSESAEESPSDDDGDLPGPADESKFNAGRRLDFTVHSIEEKNTPTELVAADVLTTAPIDDDDSNQWQLAARIQEKRRLPLQAFGCATVSHALYTELEFPNTSRIRIRKYPRSIRIRYGIRHRYVTEQPSALEGGELRPYQLEGLQWMLSLFNNNLNGILADEMGLGKTIQTIALIAYLLEKKEVAGPHLIIAPKAVLPNWSNEFKTWAPSIGTILYDGRPEERRLLRDKNFDGEQFNVLLTHYDLILKDKKFLKKVHWHYLIVDEGHRLKNHECALARTLVSG

SEQ ID NO: 224743 - protein, 961 aa, Zea Mays
MKCLLELYGLKLLDLQKKVRSDISAEYWLQKKCAYPERQLFDWGMMRIRHPFSMYGIGDSFSVDVDDVHRRKRFTERMSRLEEEGKNQADIRKRKFFAEILNASREHQVQLGTTFKQRKQRNDGVMAWHVRARQRITRQEKSRINLLKTGDQEAYMRMVEESKNERLKMLLDKTNELLEGIGKAVQRQKDAEHVSKPEGGSEVPKGSESEDCSQISGIKSESAEESPSDDDGDLPGPADESKFNAGRRLDFTVHSIEEKVTEQPSALEGGELRPYQLEGLQWMLSLFNNNLNGILADEMGLGKTIQTIALIAYLLEKKEVAGPHLIIAPKAVLPNWSNEFKTWAPSIGTILYDGRPEERRLLRDKNFDGEQFNVLLTHYDLILKDKKFLKKVHWHYLIVDEGHRLKNHECALARTLVSGYMIRRRLLLTGTPIQNSLQELWSLLNFILPNIFNSSQNFEEWFNAPFACDVSLNDEEQLLIIHRLHQVLRPFLLRRKKDEVEKYLPVKTQVILKCDMSAWQKAYYEQVTSREKVALGYGIRKKALQNLSMQLRKCCNHPYLFVEHYNMYQREEIVRASGKFELLDRLLPKLQRAGHRVLLFSQMTKLLDVLEIYLQMYNFKYMRLDGSTKTEERGRLLADFNKKNSEYFMFLLSTRAGGLGLNLQTADTVIIFDSDWNPQMDQQAEDRAHRIGQKNEVRVFVLVSVGSIEEEILDRAKQKMGIDAKVIQAGLFNTTSTAQDRRALLQEILRRGTSSLGTDIPSEREINRLAARNDEEFRLFEKMDEERRLKENYKSRLMDGNEVPDWVFANDNETLRKKTVADEFRNIIVGSKRRRKEVVYSDSFGDQWMKSDEGFEEIAKMTPRVKRTAYSPDIQVEYNERRKRPKSVENSADGASNPTRTPDKGRAGVSSYSKDETEDDGEDEVITSGLQKGNSFTWKTLGRKRSSHLSSSSDSKGRPSF

SEQ ID NO: 224744 - protein, 279 aa, Zea Mays
MDVLKRELQRKRQLLNADFGGRKIIRRAEIEARELQRIREVERQLLLQKQHRHSRPLSSPSSSSSSSSPTSAAADADADASRAESGSKESLPREEVIRRLRVLRQPATLFGEDDIARLRRLQVLIEDSGALADIDAAEIGEGQTNDFLRDIQAMRAKAATVTKPKAAGAEAERGEGDSVSIDVPFEELCDEDKITAFFRRLLDEWTQEVDGMPEAERRTAKGKAAIATCKQCTRYLDPLFKQCKKKVWLSLLMSDKHCWRWSGAVGDETTWLQWTTISS

SEQ ID NO: 224745 - protein, 74 aa, Zea Mays
MEESPAASEDARGSRGLRCADAQEPSESRCGGPVVFLRPAASERGGSSSRRARRSPAAQEGPAGRQVRAAHAPH

SEQ ID NO: 224746 - protein, 487 aa, Zea Mays
MAMIDEPLYPIAVLIDELKNEDIQLRLNSIKKLSTIARALGEERTRKELIPFLSENNDDEDEVLLAMAEELGVFIPYVGGVEHAHVLLPPLETLCTVEETCVRDKAVESLCQIGAQMKENDIVDWFAHVVKRLAVGEWFTARVSSCGLFHIAYPSAPEQLKAELRTIYGQLCQDDMPMVRRAAASNLGKFAATVEQSHLKTEIMSMFDDLTQDDQDSVRLLAVEGCAALGKLLEPQDCAAHILPVIVNFSQDKSWRVRYMVANQLYELCEAVGTEPTRGDLVSAYVRLLCDNEAEVRIAAAGKVTKFCKILNPQIAIEHILPCIKELSSDSSQHVRSALASVIMGMAPVLGKDATLEQLLPIFLSLLKDEFPDVRLNIISKLDQVNQVIGIDLLSQSLLPAIVELSEDRHWRVRLAIIEYIPLLASQLGVGFFDDKLGALCMQWLEDKVFSIRDAGANNLKRLTEEFGPEWAMQHIIPQVICAKPMH

SEQ ID NO: 224747 - protein, 490 aa, Zea Mays
MITGKWNKSLSCQPCDQEGDPLPGTELKEIWRVAPAPQGDKYQYTQFAHKINSFDTAPKKLLASDSRLRPDRYALEKGDMSKSGAEKSSLETLPELKELCRADVLHLSRGVMPPMCSTQNPRNLRLSYLCHSQWCTQLDNDINPTRSRSTKNLEWARREGRAFSHLVSGIEAASPDHAAATAVAAKAEGGDARPSLAERLRLGSLLEDGLSYKESFIVRCYEVGINKTATVETIANLLQEVGCNHAQSVGFSTDGFATTTTMRKLGLIWVTNRMHIEIYKYPAWGDVVEIETWCQEDGKIGTRRDWILKDLSTGEVTGRATSKWVMMNQNTRRLQRVSDDVRDEVFIHCPKTPRLAFPEENNGSLKKIPNLSDPAQYSRLGLVPRRADLDMNQHVNNVTYIGWVLESIPQDIIDTHELQTITLDYRRECQHDDIVDSLTYVEEGEERSMNGSASSVPHTEQRRQFLHCLRFAANGDEINRGRTVWRKLAR

SEQ ID NO: 224748 - protein, 191 aa, Zea Mays
MINKVYQENFEKCFVQQYSMIHRLETNKLRNVAKFFAHLLGTDALPWHVLAYIRLTEEDTTSSSRIFIKILFQELSEHLGIRLLNERLNDPNMQGSFESIFPKDHPKNTRFSINFFTSIGLGGITESLREYLKNMPRLIMQQQKPESSESDSSGSESGSESSSSGSSSEPESESSPDERDRRRSNKRRKRT

SEQ ID NO: 224749 - protein, 150 aa, Zea Mays
MLCSSHLLLRAQVNSCLRPPRPTPVPMARSAPTFVAVFLLVLVLLTMDAAQGQQPFPLSTDPSDADALHAVFRQWRLEGGAAMEDPCRKGVWSESSGINASVECNCLPSRVCRITSLNVSGHGNISAIPRELFNLTELVSLCTSNLLTTF

SEQ ID NO: 224750 - protein, 613 aa, Zea Mays
MLCSSHLLLRAQVNSCLRPPRPTPVPMGQQPFPLSTDPSDADALHAVFRQWRLEGGAAMEDPCRKGVWSESSGINASVECNCLPSRVCRITSLNVSGHGNISAIPRELFNLTELVSLDLSNNNLSGSIPPEVINLSKLETWHFNNNPLSGGFPHELSLLRNLRSLWMFDNYIVGPFPAFIQNLTNLTDLRIYGTNLQGPIPKNFSNLSNLEVLMLGDLAGNHSYLNVIGAWANLSVLSLRKCGLTGQVPNTPPNLPKLKYLDLTSNNLSGSIGGLLLSYKTSNYIYVGGNNLSGPVPSEIVQSSVSLDVSYNYYVDGSLSNNPSGQKQFINYLGTSIDASGRINSGNLTILNCLRMNECNINNLTNRATSFAINCGGKQVEYSDLMPIMFSEDSTDLGGSGFHVNATSHWVVSHVGSDPFNESTGIVNTSDIFETNMQELYQTARTSTSSLWYYVVGLANGNYTVQLFFAEIVITHGPGKRLFDIDIQDQNIRKDFDITKEAGGSRKATNITYEVTVDNSILAIHLYWSGRGTCCIPYEGAYGPLVSAIKVTHSQDPKTSPPQAPHSDSARDDVKRRGVVAGIAALSIAAAVISSSVVYLWWKWVSLVKRPMA

SEQ ID NO: 224751 - protein, 357 aa, Zea Mays
MWSYRDLTSNNLSGSIGGLLLSYKTSNYIYVGGNNLSGPVPSEIVQSSVSLDVSYNYYVDGSLSNNPSGQKQFINYLGTSIDASGRINSGNLTILNCLRMNECNINNLTNRATSFAINCGGKQVEYSDLMPIMFSEDSTDLGGSGFHVNATSHWVVSHVGSDPFNESTGIVNTSDIFETNMQELYQTARTSTSSLWYYVVGLANGNYTVQLFFAEIVITHGPGKRLFDIDIQDQNIRKDFDITKEAGGSRKATNITYEVTVDNSILAIHLYWSGRGTCCIPYEGAYGPLVSAIKVTHSQDPKTSPPQAPHSDSARDDVKRRGVVAGIAALSIAAAVISSSVVYLWWKWVSLVKRPMA

SEQ ID NO: 224752 - protein, 71 aa, Zea Mays
MHNFTWALHNFTLGHTARYKGPVFGGIRLSLSSPSVTRPAAPSSSRTSRRRRTCTHAKGRESKREIRGGQR

SEQ ID NO: 224753 - protein, 1111 aa, Zea Mays
MPGVASAAGSGIWSRRRDEITFDRLQKFWNDLLPQARQELLKLDKQTLIEQARKNFYCSRCNGLLLESFAQIVIYGKSLQQEASDIGHLRTAIELRITHGEQDGAQDPSIHPWGGLSTTKDGFLTLLDCFIKAKSLRVLQNVFDNARAREREREMLYPDACGAGGRGWISQGMANYRGHGIREMCALHTAHLSCTTLVDFWSALGEGTRSSLLRMKEEDFIEKLMYRFDSKRFCRECRRNVIREFKDLKELKRMQREPRCTSWFCVADTAFKCEVFEDAVVIDWHQCLSEPDESYDHFEWAIGTDEGESDIFGFENVGMNAQVHRNGIDLDQFEDYFITLRAWRLDGQCTELCVKAHALKGQSCAHHRLVEDDAMDRDGNDFDGDDAHSQKHAKSPELAREFLLDAAAVIFKEQIEKAFREGTAQQNARSVFVTLALKLLEQRVHVACKEIITLEKQLNLLQNKLLEEEEKEKREEHERGMKRRTREREKKNRRKERLKEKDHSKGKRLVESKSPDNISSSAPSNSTASINDYSTNTLDSRDSGTEEEYSAEGVNLCTPDSCVNQSSCKKINGENSVHCNAVTEFSPMDNSDISTSDQPKSLRRSPRSRDYFPQDQSCWYDDCGDESGRIGELRWKSREKTRGTDRSCNTASTSNNKTRERHSYNFCSCGHPEDYGVMDSCFLPTVRSVREMKIARKSGVEKPKVQYNRCYTLDSFIVPKGNHAGCTQKNAIPKQVWEPMDARRKTNLHNTVHDSGSINDVDPLKHVVFDNSGSHKFSVRCESQPQASESSRDVCNSDQRCANGGRNQTTSCASTLMVNKQNCYSENDEGSRHDVELMTNSASSDSTSSCMSQGDRESSSSSTTSSSAQNPESSSESEESPERINSTVGTPSSRAASRSLLEACAGNGFREYQPKTTRPAHNDMFGYNVSPVQDQLLHYQITHPPQQPPITMGFHDRSWAAPTNGNFHHIPPEPIHKAAGSFRAVPLSLPFQNGHRQVAEHTQRDMNLERHPSKLTMLTGKDPPEDKNKSGLKYLPEDKNKSWEADASFSLFQFNLPIASPVTPSSKDKSGKLAARTPLVEVQPQLCLREQADVKQYNLFSSKDNGIFSFM

SEQ ID NO: 224754 - protein, 571 aa, Zea Mays
MFAWSRPRPHQPPAPISSSITPPNQNPNSTSPAIADVDGGFAGRSSADGCFAPPSSGPAAQASMPSIAPPSSSVAALTRQPVQFFKGCSVSKETKGPVRSFFTANSKSTTVKSADLKVASSFKNDGGYPAGGVSWKDDTLLPKSTTIRGQDHPVADPVLPMDSMITPEILSANVERVIDMFADDDTDTELDLDSPTEDFTSIAEAIEDIQQGKLVIVVDDESRENEGDLIMAASLVTPEAMAFIVRHETGIVCVSMKEDDLERLSLPLMVTTKENEKLCTAFTVTVDAKEGTTTGVSAKDRAKTVMTLASPDSKPEDLNRPGHIFPLKYREGGVLKRAGHTEASVDLAMLAGLPPVAVLCEIVDDADGSMARLPKLHVFAEKENLKIISIADLIRYRRKRDRLIERASVARLPLKWGNVHAYCYKSVIDGIEHIGMMKGDIGDSQDILVRVHSECLTGDIFGSARCDCGDQLAMAMEMIEKAGRGVLVYLRGHEGRGIGLGHKLRAYNLQDDGRDTVEANEELGLPVDSQEYGIGAQVRLDYLSSYRGTFLHNTSFLLKSACIGKLYHISF

SEQ ID NO: 224755 - protein, 271 aa, Zea Mays
MTPANGAPARAAEAGPHEVESEADAFRRQVDDLVSKTDVLERRVKEVADFYDGKKHGSGGRKGGGGGRYGASSRGMPDLMRQFGVLLKEITSHKDAWPFLEPVDVVTLQLPDYHNEKRQKEEESKGVAATNTSREVAIVKLAKDTDDELNQINKKLEELRKMVVHRCRKMTTDEKRKLGAGICHLSPDDLSKALEIVAQDNPSFQTKAEEVDLDMDAQSETTLWRLKFFVREALERQANVASGKMDENAKRKREICNALAKTTSRRIKKQP

SEQ ID NO: 224756 - protein, 547 aa, Zea Mays
MQPLFKRPWSILCQEVALPVAAEEGFTGLQDYAKNSQTVGDFSIAMPVEEEGLGELTREDLLRVDNEGRCIITDHGHFVLFNIYGPAVDGDDKERVRFKLLFYKILQKRWERLLALGKRVFVVGDLNIAPASIDRCDAAPGFEKQMFREWLRSMLREHGGPFFDAFRSKHPERTGAYTCFNQKIGAEEYNYGSRIDHILISGSCLHRCDSVEDHSIFCCHVEECEIMNHFKRGNSENLSKWKGGRSSKLEGSDHIPVYILLKEIPELPVHNIPPSAARYLPEIRGRQQSIVSFLDKGKIYELQNAANLIQSEDTVLDSYCSDGLENTILAKKGLATGITEFAKGGNLPSLMCKGTDLNQWINEGLMGISHVSQKKSLSSTKFVPQKKIKRNLSSQPTIKSFFQRPGSKTVNASTSTLVTPAETLDLTNQACVSNGDTLPENMQCTTSAAKVQDNTDASSCSLSTDKSNAAALEWQRIQKKMKMTLPRCKGHSEPCIPRSVKKGPNIGRLFYVCARAQGPASNPEANCGHFQWAPGKSKEKSSKEKRL

SEQ ID NO: 224757 - protein, 62 aa, Zea Mays
MVISTMLFSILQVLWQIVFLMWHIYCICFNIKTYEWVISNFPCFRFFFHQLQVVFSLGVSCS

SEQ ID NO: 224758 - protein, 176 aa, Zea Mays
MLRLRAFRPTSDKVVKIQLHPTHPWLVTADANDRVSVWDWEHRQVIYELKAGGVDERRLVGAKLEKLAEGDDSKGKPTEAIRGGSVKQVSFYDDDVRFWQHWRNCSAAAEAPTAVSQQSSTFIAPAPSTRGRHFVVICCENKVIFLDLVTMRGRDVPKQELDNRSLLWECWFLLLR

SEQ ID NO: 224759 - protein, 1162 aa, Zea Mays
MTYMSAAGEVHLVSGGSDGLLILWSADHIHDSRELVPKISMKAHDGGVVAVELSRVMGSAPQLITIGADKTLAIWDTVTFKEIRRIKPVPKLACHSVASWCHPRAPNLDILTCVKDSHIWAIEHPTYSALTRPLCELSSLVPPQVLALHKKLRVYCMVAHPLQPHLVATGTNIGIILSEFDPRALPAIAPLPTPTGNKEHSAVYIVERELKLLNFQLSNTANPSLGNAGVASDAGRSMNNSIEQLIVKQTKKHISTPAPHDSYSVLSVSSSGKYVAIVWPDIPSFAVYKANDWSVVDSGTGKLFAWDTCRDRYALVESALAPRMPLVVKGGSSKKAKEAAAAAAQAAAAAASAASAATVQVRILLDDGTAHVLQRSIDGRNEPVIGLHGGALLGVTYRTSRRISPLTATAISTVQSMPLSGFGGSGSSFASDDPFSSKEGPPQNFQLYSWETYQPVSGLLAQPEWTVWDQTVEYCAFAYQQYIVISSLRPQFRYLGDVSIPFATGAVWHRRQLFVSTPTTIECVFVDAGVAAIDIETKRIKQEMKAREAQSRAAEEHGDLALITVEAPQVTVSEKVSLRPPMLQVVRLASFQYAPSIPPFIVPKQSKFDGDDSVFQKELDDRRYAEVAVAGGGVSVAVTRFPPEQKRPIGPLVVVGVRDGVLWLVDRYMCAHALSLSHPGIRCRCLAAYGDPVSAVKWATRLGREHHDDLAQFMLGMGYATEALHLPGISKRLEFDLAMQSNDLKRALACLLTMSNSRDVGQETAAADATDVTQILSLAVAKQAKQESLTDAVQGIVKFVKEFFDLIDAADATGQSDIAREVLKRLAAAASVKGALHGQMLRGLALRLGNHGELTRLSGLVSNLITAGHGREAAFAAAVLGDNALMEKAWQDTGMLAEAVLHAQAHGRPSLRNLVITWNKMLQKELDHTPTVKTDAAAAFLASLEDPKLTSLGETEKKPPIEILPPGMPPLSAPPIVIKKAGAKPGLPNAAKASNGPIGAPMAQGAPMAHGTPGPQGVPMNQVTPSQGSHDEARPSDATVADAAAAVAEGTAAPPAAEGTSAPPAAEGTATPSSEEAKAAPGNEEGTSNPINEEATAAAVSVAAGSPDSAAAPAADTSSDAPAVNPTEDTVSAPSTEAPPELTDKPSSAEASLPPPPSVSGV

SEQ ID NO: 224760 - protein, 654 aa, Zea Mays
MAAALAPGVSRKLKKVLETRTDNPDLLASLGALSTFYVQNTPQARRNLKSSIEQRALAINRHFLDASLPAHKALDRVEGEVHALNDSWKKIEEALNSCSASTGDIISTTERLQQELEVITQRQEIVSCFLRDYQLSNEEINALREEEIDDKFFKALLHVQEIHSNCKVLLRTHHQRAGLELMDMMSVYQEGAYERLCRWVQAECKKLGDTDNPEVSELLKMAVCCLKERPVLFKYCAEEVANMRHHALFRRFISALTRGGPGGFPRPIEVHAHDPLRYVGEMLGWLHQALASERELIVVLLDPDAMTDSGPTFRRQSGRDGDSSKGEPDVTSVLDRIFEGACRPFKVRVEQVLQSQPSLIVSFKLSNTLEFYCYTISELLGEDTALCNTIWSLRDAAQQTFFNILKSRGEKLLRYPPLVAVDLSPPPAVREGISLLLELIDTYNSMMVPASGKRPNFDPVISALLDPIIQVCEQAAEAQKSKGSLARRGRTSSDPSGNSRDSISVDAILSKNLSTSILSAESSSKVYLINCLSAIQEPLMGQEVATSYMPYIKEYGSKADARPLADIIETSPQMLMECLKAFYGIVTGTEGSLPEFEQLQVPRLRSDACNGLARALAESYELIYSAVMDPNNSYPDPRSLVKHSPEQIRTILEA

SEQ ID NO: 224761 - protein, 211 aa, Zea Mays
MAIPVEEAIAALSTFSLEDEQPDVQGLAVLLSSERYATNSPIEYSDVAAYRLSLGEDTKAINQLNTLIKEGKEMTSLLYTYRSCVKALPQLPDSMKHNQADLYLETYQVLDMEMSHLREIQRWQASAASKLAADMQRFSRPERLVNGPTITHFWSMLKLLDVLLQLDHLKNAKASIPNDFSWYKRTFTQVSTQWQDTDTMREELDDLQQEL

SEQ ID NO: 224762 - protein, 346 aa, Zea Mays
MIFESAPSSVTRAMDSGPVPTRPTGGSAAVASSSSSLIFLGTGCSGALPDARCLIQPSEPPCTVCSTALSLPPDRNPNYRCNTSLLVDYCHDDGAHRYILIDVGKTFREQVLRWFVHHEVPSIDSVILTHEHADAVLGLDDLWVALPSCQRNGSAKVPVFLTQFTMDSVAARFPNLVEQKLQGGDDFARPAQLHWTIIEGDVDKPFVASELQFWPLPVMHGEDYVCLGFLFGRKARVAYLSDVSRILPRTEHAISKSGTATGQGQLDLLILETNRLHGAGDGRSCHLTLSQSLDAVKRIRPKRALLIGMNHEFEHHRENQLLARWSCRERIPVQLAHDGLRVFIDL

SEQ ID NO: 224763 - protein, 629 aa, Zea Mays
MMDLGTRDWWTRQENPKLRRLPRDDGVTRGEKRKGDRHGSVAAAARPGRPWQRRVDSRAVLVAAGQGGPPVRPGARPALLRPPGARRVRQGLPRLHPALADAAGAPSPSSRRGPPPLAGRRDRRPHRPPLLRPVPAHRRHRASLRGVRLLPRRPRPRLLPGRRPPPRPRQTPPLPRQDAEYKEWKHVVQEIARFLRADSPFMNMRPLRYSYAFDPPPDTLRTVPTTVKKRGLVLSDTILCSYYPNEVKFTDLSIDVFRMVQCLEWEPCGSFALNDGYSAHDESGQNQPNLLKDLRDAALPPNPLKTILYRPSVTHFLTVLSTKCEELPSNGIMLIYLSATGEMGTSGFCPDTGENVLSNFNKFDISSLSHTSSKENKEPCLWLGCRETEGSNCIYPGDLIPFTRRPLFLVIDSSTSYAFKSIHGTERGETSAMLLSPSSRSSAAGFSGDSTRHSGSQFTMFLTSPLQAFCLLLGNNGTDIDRDAYNKAEELLLLSLNEWAATLVASSSLHSIWVEVLGDPLLRRLLLRFIFCRATHSLFKPTNHKTEFLPTCMPPLPESVDAESMLSQSCVLRVASFFGAASQFSFAEVTTWPDVDSEEAVVTSSSGSANKGVPETARDSDISNSSSSF

SEQ ID NO: 224764 - protein, 110 aa, Zea Mays
MQGLVMEVILTFSLLFVTYAMILDPRSQVRAIGPLLTGLIVGANSLAGGNFTGASMNPARSFGPALATGDWTNHWVYWIGPLLGGPLAGFVYESLFLVQKMHEPLLNGEV

SEQ ID NO: 224765 - protein, 156 aa, Zea Mays
MRTLKRFYIKRVQDLHKEVQVFEEKDLMKSLSKSTCVPEVLSTCADQSYLGILLNCCLCCSLASILHTPLNETSARFFAASVVVALEELHQKSIIYRGVSADILMLDRSGHLQLVDFRFAKKLEGQRTYTICGIADSLAPEIVLGRGHGFPADWSL

SEQ ID NO: 224766 - protein, 110 aa, Zea Mays
MIGMEAAGIHETTYNSIMKCDVDIRKDLYGNIVLSGGSTMFPGIADRMSKEITSLAPSSMKIKVVAPPERKYSVWIGGSILASLSTFQQMWISKEEYDESGPAIVHRKCF

SEQ ID NO: 224767 - protein, 381 aa, Zea Mays
MAAAALAMAEQVVAELRVRCETPPSMLREVAVEMAREMGAGLEKDGGSRVKMLLSYVDKLPTGREEGLFYGLDLGGTNFRVLKVQLGGNAKHVVDRDSREVGIPPHLMSGSSSELFGFIASELAKFVDDDEKCANISNGKKREIGFTFSFPVKQRSVASGTLVKWTKAFSINDAVGEDVVAELQTAMEKQGLDMHVAALINDAVGTLAGARYYDKDVVAGVIFGTGTNAAYVEKANAIPKWEGELPHSGDMKKNDFAVLQVINMEWGNFFSSHLPITEYDQELDKESLNPGEQIYEKLTSGMYLGEIVRRVLLKISLQSAIFGDIDHTKLQTHFLLRTPHISAMHHDETSDLKIVAENFEENLEVRRHCDHVLCHVIQRYT

SEQ ID NO: 224768 - protein, 590 aa, Zea Mays
MAGKEQGGGGPPQRPPMPAASMQPPIKKLVRQLDFNSAALAGNPAMAAAAAAVSRALQPRALPAGFQHPQHVRAAVPMVVPQQLHQRALPVMRPHPVVGHVPRHAVPLAVPVPQLRPMPPQPVQRPPVAVPLKPDSPKPWARLYEGKDSTPTKKKCCNCRNSRCLKLYCECFASGTHCDGCNCTNCFNNPENEVARREAIEATLERNPDAFRPKIGSSPHTNRNNEVSSDLPLVGKHNKGCHCKKSGCLKKYCECFQANILCSENCKCMDCKNFEGSEERRNLFQGDHKNAINIQQATNAAVNGAIGTTGFPSPSTSRKRKHIDPSLDHSNKEHAAHRNCHIPQKNAVPDGSIPISQSAHPPTLGPFKVTYRPLLADIVQAEDVKELCKLLVVVSGEAAKTYADRKAKEERVGKKEDERAEQKEDDRAGSLALTNHDREGNNQDPDKKASIDDHSSRGTHTGKANQEESRPNCADDQKSNRPMSPGTLALMCDEQAFEKMCDEQDTVFTASQNAVPQQTVTVNQNQSALYAEQERIVLTEFRDCLRKLVTYGRMKEERYAMEIKSETSGHPGQVCIRGVAMIKGIMFSPS

SEQ ID NO: 224769 - protein, 712 aa, Zea Mays
MTASQSSMSGGGEPGVRTVVWFRRDLRVEDNPALAAAARTAGEVVPAYVWSPEEDGPYYPGRVSRWWLSQSLKHLDASLRRLGACRLVTRRSSDAVVALIDLVRSTGATHLFFNRLYDPLSLVRDHRVKEQLSAEGITVQSFNADLLYEPWEVLDDDGFPFTMFAPFWNRCLCMPDPAAPLLPPKRINSGDLSRCPWDELIFEDESEKGSNALLARAWSPGWQNADKALTAFLDGPLVDYSANHKKADSASTSLLSPYLHFGELSVRKVFHQVRMKQLMWSNDGDRAGEESCTLFLRAIGLREYSRYLTFNHPCSLEKPLLSHLRFFPWVVDEVHFKVWRQGRTGYPLVDAGMRELWATGWVHDRIRVVVSSFFVKVLQLPWRWGMKYFWDTLLDADLESDALGWQYISGSLPDGRELDRIDNPQFEGYKFDPHGEYVRRWLPELARLPTEWIHHPWDAPESVLQAAGVELGSNYPRPIVELDAANSRLQGALSEMWELEAASCAAIENGMEEGLGDSTDEPPIDFPQELRMEVDRQPAQPAIIHTPVVAGWRREDQRVPSMTSSLIRAETELTADFGNTSEDSRPEVPSNIHLQARAEREETVDGATGNTVRVNGNQQQQNLQNNMHRVLGIAPSISEASSSWTGREGGLVPVWSPPAASVHSDPYTADEADISSRSYLDRHQQSNTMMNWSQLSQSLSTPVAQAECLTVD

SEQ ID NO: 224770 - protein, 551 aa, Zea Mays
MIRYGDGEPTDNAARFYKWFTEGKEKEVWLKDLKYGIFGLGNRQYEHFNKVAKVVDELLEEQGGKRLVPVGLGDDDQCIEDDFTAWKELVWPELDQLLRDEDDTNGASTPYTAAIPEYRVVFIDKSDLSFQDRSWSLANGTGVIDIHHPCRANVAVRKELHKPASDRSCIHLEFDISGTSLVYETGDHVGVYAENSVETVEEAESLLDLSPDTVFSIHADAEDGSPRKGGSSLAPPFPSPCTLRTALLRYADLLNPPKKAALLALASHASDPAEAERLRFLASPAGKDEYSQWITASQRSLLEVMAAFPSAKPPLGVFFAAIAPRLQPRYYSISSSPKMAPSRIHVTCALVYGPSPTGRIHQGVCSTWMKNTIPLEYSEECSWAPIFVRQSNFKLPADPSTPIIMIGPGTGLAPFRGFLQERLALKQSGAELGTSILFFGCRNRNMDYIYEDELQTFLEEGALSELIVAFSREGPTKEYVQHKMVEKATEIWNIISHGGYLYVCGDAKGMARDVHRMLHTVVQEQGSLDSSKTESYVKSLQMEGRYLRDVW

SEQ ID NO: 224771 - protein, 287 aa, Zea Mays
MIRYGDGEPTDNAARFYKWFTEGKEKEVWLKDLKYGIFGLGNRQYEHFNKVAKVVDELLEEQGGKRLVPVGLGDDDQCIEDDFTAWKELVWPELDQLLRDEDDTNGASTPYTAAIPEYRVVFIDKSDLSFQDRSWSLANGTGVIDIHHPCRANVAVRKELHKPASDRSCIHLEFDISGTSLVYETGDHVGVYAENSVETVEEAESLLDLSPDTVFSIHADAEDGSPRKGGSSLAPPFPSPCTLRTALLRYADLLNPPKKLLMHLIQLKLNDLGSWPLLLERMSILNG

SEQ ID NO: 224772 - protein, 247 aa, Zea Mays
MAAFPSAKPPLGVFFAAIAPRLQPRYYSISSSPKMAPSRIHVTCALVYGPSPTGRIHQGVCSTWMKNTIPLEYSEECSWAPIFVRQSNFKLPADPSTPIIMIGPGTGLAPFRGFLQERLALKQSGAELGTSILFFGCRNRNMDYIYEDELQTFLEEGALSELIVAFSREGPTKEYVQHKMVEKATEIWNIISHGGYLYVCGDAKGMARDVHRMLHTVVQEQGSLDSSKTESYVKSLQMEGRYLRDVW

SEQ ID NO: 224773 - protein, 147 aa, Zea Mays
MIGPGTGLAPFRGFLQERLALKQSGAELGTSILFFGCRNRNMDYIYEDELQTFLEEGALSELIVAFSREGPTKEYVQHKMVEKATEIWNIISHGGYLYVCGDAKGMARDVHRMLHTVVQEQGSLDSSKTESYVKSLQMEGRYLRDVW

SEQ ID NO: 224774 - protein, 644 aa, Zea Mays
MERARRHASRALLRRLLAAAAASPAASPATSSRGISTLSPPPPAAGKQQRRCCPPPRGAHQHAQARAVSVSALQPSDTFPRRHNSATPAEQEAMASACGFGGVDALVDATVPPAIRAPPMRFPGRFDAGFTESQMLDHMRRLASMNRDFKSFIGMGYYGTHVPAVVLRNLMENPAWYTQYTPYQAEIAQGRLESLLNYQTMVADLTGLPMSNASLLDEATAAAEAMAMCSAILRGKKRTFLIASNCHPQTIDVCRTRSDGFGIRVVVADAKDLDYGGGDVCGVLVQYPGTEGEVLDYAEFVRDAHAHGVKVVMATDLLALTALRPPGEIGADIAVGSAQRFGVPMGYGGPHAAFLATSQEYKRLMPGRIIGVSVDSTGRPALRMAMQTREQHIRRDKATSNICTAQALLANMAAMYAVYHGPAGLKAIADRVHGLAGTFAHGLKKLGTVTVQDLPFFDTVRVTCSDARAIAKEAVKNEMNLRVVDANTITVAFDETSTLEDVDKLFKVFNNGKSASFTAESIAPEVSSSIPSSLARESPYLTHPVFNMYHTEHELLRYLHKLQSKDLSLCHSMIPLGSCTMKLNATVEMIPVTFPNFANLHPFAPTDQAAGKCLTTWATCYARSQVLILSLCNQMLVLQESMLD

SEQ ID NO: 224775 - protein, 474 aa, Zea Mays
MEDKASNLDAVLKEAVDLENIPIEEVFENLRCSPQGLTTEQAEQRLAIFGPNKLEEKQESKFLKFLGFMWNPLSWVMEAAAIMAIALANGGNKPPDWQDFVGIITLLIINSTISFIEENNAGNAAAALMARLAPKAKVLRNGRWTEEESAILVPGDIISVKLGDIIPADARLLEGDPLKIDQSALTGESLPVTKGPGDGVYSGSTCKQGEIEAVVIATGVHTFFGKAAHLVDSTNQVGHFQKVLTAIGNFCICSIAVGMLVELVVMYAIQHRAYRPGIDNLLVLLIGGIPIAMPTVLSVTMAIGAHRLAQQGAITKRMTAIEEMAGMDVLCSDKTGTLTLNKLTVDKSLVEVFQRGVDQDTVILMAARASRTENQDAIDATIVGMLADPKEARAGVQEIHFLPFNPTDKRTALTYLDGEGRMHRVSKGAPEQVINLLLGRKLHVVWEWVLICTLLLLYSDRIRMSQLLPCQLMI

SEQ ID NO: 224776 - protein, 255 aa, Zea Mays
MKLKPLWLTTSAQSKKSKQKDHFLIAIAAGINQKKSVDAIMKKFLPENFTAVLFHYDGNVNGWNDLPWSKSVIHIAASNQTKWWFAKRFLHPAVVSMYQYIFLWDEDLEVDNFNPRRYLNIVRSEGLEISQPGLDSKLSEIHHRITVRKNTGTFHRRVSRANKRCLREGPPCSGWVEGMAPVFSKYAWQCVWHLIQNDLIHGWGIDYKFGYCAQGDRTKNIGVVDSEFIVHRGVQTLGGSTITKGANISAGRFSG

SEQ ID NO: 224777 - protein, 320 aa, Zea Mays
MKLKPLWLTTSAQSKKSKQKDHFLIAIAAGINQKKSVDAIMKKFLPENFTAVLFHYDGNVNGWNDLPWSKSVIHIAASNQTKWWFAKRFLHPAVVSMYQYIFLWDEDLEVDNFNPRRYLNIVRSEGLEISQPGLDSKLSEIHHRITVRKNTGTFHRRVSRANKRCLREGPPCSGWVEGMAPVFSKYAWQCVWHLIQNDLIHGWGIDYKFGYCAQGDRTKNIGVVDSEFIVHRGVQTLGGSTITKDGIRGKNAQSLRQKAAQVQKSRGRDPGLDMRTKIRRKSRSELRDFQKRWARAAREDRTWVDPFAHSRRKRRNRNPQ

SEQ ID NO: 224778 - protein, 643 aa, Zea Mays
MSTDPSKQVKLGSLSGLVPKEKAMAFERILFRATRGNIFLRQEPVDEPVTDPVSGEKVTKNAFVIFYSGERAKTKILKICDAFNANRYPFPEDVSKQLHAVQEVSGKISELKATIDMGLAHRDSILKNIASDFEQWNHLVKKEKAIYHTLNMLSVDVTKKCLVAEGWSPVFASIQIQDALQRATVNSKSQVGSIFEVLNTKESPPTYFQTNKFTSAFQEIVDAYGVAKYQEANPGVFTIVTFPFLFAVMFGDWGHGICLLLATLYLIIREKKLASQKLGDIMEMMFGGRYVIMMMAVFSIYTGLIYNEFFSVPFGLFGKSAYACRDSSCSDATTEGLIKVRDAYPFGVDPVWHGSRSELPFLNSLKMKMSILLGVAQMNLGIVISYFNAKFFRNSLNVWYQFIPQLIFLNSLFGYLSLLIIIKWCTGSKADLYHVMIYMFLSPTDEIGENQLFSGQKTVQLVLLLLALVSVPWMLIPKPLLLKKQHQQRHQGHQYAMLQGVDESVGAELGEHHEEAHDHEEFEFSEVFVHQLIHTIEFVLGAVSNTASYLRLWALSLAHSELSTVFYDKVLLMAWGFNNVIILIIGIIVFIFATVGVLLVMETLSAFLHALRLHWVEFQNKFYEGDGYKFAPFSFALIREEED

SEQ ID NO: 224779 - protein, 221 aa, Zea Mays
MEKRVPQSTRNETRIEAMMLSDPKDCTLCKGREIIIGEHVTNMMQIFSLKLAKIDVDGGPIELYGYIATRDVLEPLLNYIVNVSRNDPITIEQGSLIEMTGPKRGIELCGEIMLEFDMRIKRGGEEKDDPQLIDGVAIVLDEMSMPRSTYAFTKRIHGDCGAVDITVSRLDFAVEATIQLHGILIAVMTIRNIGVASKRPVMDGPANRLQYTAKWQPTSEV

SEQ ID NO: 224780 - protein, 252 aa, Zea Mays
MMLSDPKDCTLCKGREIIIGEHVTNMMQIFSLKLAKIDVDGGPIELYGYIATRDVLEPLLNYIVNVSRNDPITIEQGSLIEMTGPKRGIELCGEIMLEFDMRIKRGGEEKDDPQLIDGVAIVLDEMSMPRSTYAFTKRIHGDCGAVDITVSRLDFAVEATIQLHVSEVEGSFSLRAGCFTSGLCEEIQIFKGTISEPRALRRCVVAAVHDTWMDVKLKVDDSGHSYSSDDNPEHWCSFKTTSHGWTCQQSCS

SEQ ID NO: 224781 - protein, 179 aa, Zea Mays
MRPNASAAFRNFEQEARQSAVWDSDQNATSSSGDNLASLYRPPFSLMFNGPFDKAKLEASSLDKWLLINLQSTAEFSSHMLNRDTWGNDAVAQLIRSNFIFWQVYYDTSEGRKVCTYYHLVSMPAILLIDPVTGQKMHAWNGMVHPDRLLEVRRSTMQLNLKSAQGKLIRKLLRASKAK

SEQ ID NO: 224782 - protein, 358 aa, Zea Mays
MEYERIHEPLPRRQSGGFSPAKLRAMLRGLEKHQRNSGEDTSPEANDSGELDDRRSLECSTSTEMSSNSGHRSRNRAPDDDSFDSESSSSGPPTVKRSAAVAALLPPFSRPTPSKWDDAEKWISSPTSNRTGRAGPTAGTMPKKSALAFPEHGARQPAVAKVVTDVPTIAGPLVKNSDGLAHPDLLKLAHDASIVDGPAPAVRSVSMRDMGTEMTPIASQEPSRTATPMIASSPTSSRTPTPQRTTEFSVSNIDSNKMAMSEEEVHISTRQEIMDLGERLGKTTIAAWASKEEKAAARSTDTAADNAVDVNRENRAADWQEAEKAKYLARFHREEAKIQAWENLQKAKIEAEMKRIEG

SEQ ID NO: 224783 - protein, 332 aa, Zea Mays
MAGYGEENQNAMNGYEEEEEEEEVEEVEEVYEEEEEGDGEGEGDEGAAAEAAAMAAETRSVDGGRGLAEAVGNVDAGGEDERDADSSGGDASGVLEDEHVIDGRTVEVKRTVPKELSSKDGPKTKKIFVGGIPPSLTEDKLKEHFSSYGKVVEHQIMLDHSTGRSRGFGFVTFESEDAVERVMSEGRMHDLGGKQVEIKKAEPKKPGAGDSSSNGRHSRGGGHRDSYRGSGVSVNSGGGYGYGGGYRSAAAAYYGSTAYGAYGRGYGYGATSGYGSGYGSAYGGSMYGGPYGAYGSYGGAYGGYGSYGGAGGMGGGGSAGGRGSSRYHPYGK

SEQ ID NO: 224784 - protein, 158 aa, Zea Mays
MDMVVVTDQLLQHIMAAQHMVPMAEGMDMVLLLAMAQVMALHMVAPCMEVHMVPTGHMVVPMEVVRMVLQEGMVGEDMAATVVLEAWVGVAALVVGAPADTTLMGNDHPFCVSLGSDNKAIPFLVSATEKMEHSIRLVESAASGHFFPWNLHCTSTIL

SEQ ID NO: 224785 - protein, 541 aa, Zea Mays
MPPLVPSLLLPIPALILPAPPRLSRHRCFLPAVSSSSSSSSSPHSREPYRRRRRDTPSQTPTPAPRPSSQPQPPPRRANAATPGARSQEELEAAIYDFMCRSAKPGAFPTREELVAAGRSDLAAAVASSGGWLSLGWSSTAAEGPATTAAPCSSGGGHPDYPPETGVYYRGDLAPVSVEDSECLRCREDDEEDASPSGRESGTEEASEVRLNAGIEGMLTRLQKDRERARPPPRTSTHDTQGQSDDDAGNSGAPSHTAAGGRHIPRAPENGSVHGSHSQNGTIEGNSTFQGSNDDAWQTWTLGKGDLSHFEAAEVLPIERRKVSRHDDIASVQNDIHRSSNGVAVSDFSSDGVGTGRDEIHSRLQILELDLSAALKTLRSRFDKVLSDLSNSNGATVLDDISDDWEFEETKVMQAQEELRSIRAKIAVLEGKMALEIIERNKIIEDKQRRLDKVEKALSELRTVCIMWANPASDVLVVGSFDGWTSQRKLERSENGMFSLNLRLYPGRYEIKFIVDGVWKNDPLRPTVHNNGHENNLLLVT

SEQ ID NO: 224786 - protein, 490 aa, Zea Mays
MPPLVPSLLLPIPALILPAPPRLSRHRCFLPAVSSSSSSSSSPHSREPYRRRRRDTPSQTPTPAPRPSSQPQPPPRRANAATPGARSQEELEAAIYDFMCRSAKPGAFPTREELVAAGRSDLAAAVASSGGWLSLGWSSTAAEGPATTAAPCSSGGGHPDYPPETGVYYRGDLAPVSVEDSEWEDDEEDASPSGRESGTEEASEVRLNAGIEGMLTRLQKDRERARPPPRTSTHDTQGQSDDDAGNSGAPSHTAAGGRHIPRAPENGSVHGSHSQNGTIEGNSTFQGSNDDAWQTWTLGKGDLSHFEAAEVLPIERRKVSRHDDIASVQNDIHRSSNGVAVSDFSSDGVGTGRDEIHSRLQILELDLSAALKTLRSRFDKVLSDLSNSNGATVLDDISDDWEFEETKVMQAQEELRSIRAKIAVLEGKMALEIIERNKIIEDKQRRLDKVEKALSELRTVCIMWANPASDVLVVGSFDGWTSQKHCRHKD

SEQ ID NO: 224787 - protein, 576 aa, Zea Mays
MAANNSDPIQDQLGEGGAGVRHEAEEEEVGEETSSAAAQATATTMLPRSSSRPQLDLSGAAIHGTLEDRNPTILLPNQSDDISHLALDIGGSLIKLVYFSRHAELSTEDKHKISTKRRLGMFNGGRRSYPILGGRLHFVKFETGKLNECLDFISSKQLHRGGIDSPSWRSGAQSDDIVIKATGGGAFKYADVFKERLGVSLEKEDEMDCLVAGANFLLKAIRHEAFTHMDGQKQYVQIDQNDLFPFLLVNVGSGVSIIKVDGHGKFQRVSGTNVGGGTYWGLGRLMTKCKSFDELLELSQRGDNSTMDMLVGDIYGGLDYSKIGLSASTIASSFGKIISENKELSDYRPEDISLSLLRMISYNIGQISYLNALRYGLKRIFFGGFFIRGHAYTMDTISFAVHFWSKGEAQAMFLRHEGFLGALGAFMSYEKHGLDDLRVHHLVERFPMGAPYVGGKIHGPPLGDLNEKISWMEKFVQKGTQIIAPVPMGVPATTGMGGFERPTAKGDILRSDASAALNVGVLHLVPTLDVFPLLEDPKTYEPNTIDLDQDEFKYWFKILSDHSPDLVDKIYLLQFP

SEQ ID NO: 224788 - protein, 271 aa, Zea Mays
MDCLVAGANFLLKAIRHEAFTHMDGQKQYVQIDQNDLFPFLLVNVGSGVSIIKVDGHGKFQRVSGTNVGGGTYWGLGRLMTKCKSFDELLELSQRGDNSTMDMLVGDIYGGLDYSKIGLSASTIASSFGKIISENKELSDYRPEDISLSLLRMISYNIGQISYLNALRYGLKRIFFGGFFIRGHAYTMDTISFAVHFWSKGEAQAMFLRHEGFLGALGAFMSYEKHGLDDLRVHHLVERFPMGAPYVGGKIHGPPLGDLNEKARASSPDHA

SEQ ID NO: 224789 - protein, 386 aa, Zea Mays
MRVGGGRDDDDEVSRKLKSMDVDKLENGGGEESPRPAVKYHGWKAMPFIIGNETFEKLGTLGTSANLLVYLTQVFHMRSVDAATLLNGLNGTTSLAPIIGAFLSDAYLGRYLALAIASVASLIGMFLLTMTAGANSLHPPECSVGETCEKATSYQFAVLFVAFAFLVLGSAGIRPCSMPFGADQFDPNTESGKRGINSFFNWYYFTFTAAMMISATVIIYVQSNVSWPIGLGIPTALMFLACVLFFMGTRLYVRVTPEGSPFTSVVQVLSAALKKRSLKQPKDPKQDLFDPPHTSAIVTKLAHTDQFRCLDKAAIVASPDEVRSGGGAPADPWRLCSVQQVEEVKCLIRIVPVWSTGIIYYVAVVQQSTRCGSPSTTASCCPSSGR

SEQ ID NO: 224790 - protein, 330 aa, Zea Mays
MNIDLRVIGITGSSTMLLSDTGIDLTQWKQLLQKEAEPADIGSFVHHLSDNHVFPNKVLVDCTADTSVASHYYDWLKKGIHVITPNKKANSGPLDQYLKLRTMQRASYTHYFYEATVGAGLPIISTLRGLLETGDKILRIEGIFSGTLSYIFNNFEGTRAFSDVVAEAREAGYTEPDPRDDLSGTDVARKVVVLARESGLRLELSDIPVKSLVPETLASCSSADEFMQKLPSFDEDWARQRSDAEAAGEVLRYVGALDAVNRSGQVELRRYRRDHPFAQLSGSDNIIAFTTSRYKEQPLIVRGPGAGAEVTAGGVFCDILRLASYLGAPS

SEQ ID NO: 224791 - protein, 330 aa, Zea Mays; identical to SEQ ID NO: 224790

SEQ ID NO: 224792 - protein, 649 aa, Zea Mays
MQGLAVSCQLPPAAAAARWRPRASSSNREAVLQCWKYELSQDHYLGGPLRIGQSQGSLHRHRSTNFLRPAAAAISVEQDEVNTYLPKGDMWSVHKFGGTCMGTPKRIQCVANIVLGDSSERKLIIVSAMSKVTDMMYNLVQKAQSRDDSYAIALAEVFEKHMTAAKDLLDGEDLARFLSQLHSDVSNLRAMLRAIYIAGHATESFSDFVVGHGELWSAQMLSYAIKKSGAPCSWMDTREVLVVTPSGCNQVDPDYLECEKRLQKWFSRQPAEIIVATGFIASTAGNIPTTLKRDGSDFSAAIVGSLVRARQVTIWTDVDGVFSADPRKVSEAVILSTLSYQEAWEMSYFGANVLHPRTIIPVMKDNIPIVIRNMFNLSAPGTMICKQPANENGDLDACVKSFATVDNLALVNVEGTGMAGVPGTASAIFSAVKDVGANVIMISQASSEHSVCFAVPEKEVAVVSAELHDRFREALAAGRLSKVEVINGCSILAAVGLRMASTPGVSAILFDALAKANINVRAIAQGCSEYNITVVLKQQDCVRALRAAHSRFFLSKTTLAVGIIGPGLIGGALLNQLKNQIRHHRRLRRNGQHQVYCRVHLLGAGNTNNASDDGRARMVGDRDNIDERRAVHDHERDNLGAREAAGSTE

SEQ ID NO: 224793 - protein, 456 aa, Zea Mays
MAIVLRYLNKQGLIIESLVGVVHVKETSAICLMEALQKLFTDIGLSIKQVRGQCYDGASNMRVAKKHGDVADFFYMISILFNVVGGSCKRKDMIREKHRDDVTKAIGSGQLSTGKGLNQDQTLQRAGDTRWGSHYRTLSSIVKLFPSIISVLKYVEKEGKSDKKSQARGLIAYFETFDFVFYLHMMLHILGSANTLSQSLQRKDQDILNAMSCVRGTRNELQNLRENGWNSLMEKVHLFCDEHHIERENMHDEYVNRHAPRKKSNKTNLQHYQIEVLNYVIDWQLQEFDDRFSEVNSALLGHMAAFNPKNSFLAFDRETLVRLAEFYPDDFDSNKLDDLSLELVIYIDNVRADRRFDNLDGIVDLAKLMVQTNKHITFSLVYQLLKLVLILPVATASVERCFSAMNVVKKKLRNKMGDQFMSDCLICYVEKDMFSTISNDEVIDLFKKMKFRSGKL

SEQ ID NO: 224794 - protein, 304 aa, Zea Mays
MQSATRLTLLLCAAWAAALLYGEMGAYWVSYLACSWPSSSSSPPNNHVKVAVVADPQLMDSTSLGLPSSSVALQAAEFYTDLNMRRSFQSTILPFKPDVVLFLGDHFDGGPYMPDEEWQESLFRFKHIFGLNDQRTKQQIPIYYLPGNHDIGYSAFHSVHPEVLSRYEKEFGSRNYQFSAGKVDFVVVDAQTLDGAKQSKERSSSWEFIKTLSPGNTSNPKVLLTHIPLYRPDNSPCGPHRSSPVINQRVSYAALDQGITYQNYLTKETSDLLLSLLKPAMIMTNAQLSTPLLLGQLQSIPWGQ

SEQ ID NO: 224795 - protein, 607 aa, Zea Mays
MSMPETFTLKVGEATPAAAGRPSAGPVYRSIYAKDGLMDLPQDIQSPWDLFSGAVKKYPTNRMVGQRQVTDGKAGEYVWQTYEEVCQKVMRIGSAIRSLGVEPGAHCGIYGSNCPEWVMAMQACNSQGICYVPLYDTLGAKAVEFIMYHAEISIAFVQESKIKSILAVLPKCTAHLRAIVSFGDFASEMKAEAERLGVSCFSWEEFSSMGKQDYQLPNKRKEDICTIMYTSGTTGDPKGVIITNKAIVAGVMTTEHLLKETDKVITEEDSYFSYLPLAHIFDQVIENYCISKGASIGFWQGDIRYLMEDVQVMKPTIFCGVPRVYDRIYTGINMKIQSGGMIARHLFQYAYNYKLANMRKGLKQHEASPFFDKIVFSKIKEGLGGRIRLMIAGAAPLPGQIEEFMRVTTCSVVVQGYGLTESCAGCFTSIANIFSMIGTVGPPVTTIEARLESVPEMGYDALSDTPRGEICLRGHTMFSGYYKRPSLTEEVFSDGWFHTGDIGEWQSNGTMKIIDRKKNIFKLSQGEYVAVEVLERAYLQSPLVASVWVYGNSFESFLVAVAVPERQALEEWAAANSKAGDFAELCADPKARTYVRDQLNQTGKKLG

SEQ ID NO: 224796 - protein, 336 aa, Zea Mays
MEDVQVMKPTIFCGVPRVYDRIYTGINMKIQSGGMIARHLFQYAYNYKLANMRKGLKQHEASPFFDKIVFSKIKEGLGGRIRLMIAGAAPLPGQIEEFMRVTTCSVVVQGYVGPPVTTIEARLESVPEMGYDALSDTPRGEICLRGHTMFSGYYKRPSLTEEVFSDGWFHTGDIGEWQSNGTMKIIDRKKNIFKLSQGEYVAVEVLERAYLQSPLVASVWVYGNSFESFLVAVAVPERQALEEWAAANSKAGDFAELCADPKARTYVRDQLNQTGKKLGLRGFEMLKAVYLEPVPFSIEKDLVTPTFKLKRPQLLKYYKDRVDQMYKDAKEGRAAP

SEQ ID NO: 224797 - protein, 374 aa, Zea Mays
MPCLAFAYLLIEPSEQGETRHRVRPPHPPPLRSEGGRKETVDQSLRRRPIHHRSDEREEMKIIIDTDPGIDDSVAILMAFQMPGVQVLGLTTIFGNCTTEHATRNALILCEKASHLEVPVAEGSHEPLKGGKPHVADFVHGPDGLGNVDLPDPTIKKVEESATDFLVDKVSRFPGEVSVLALGPLTNIALAIKKDPSFVKNVKKIVVLGGAFFAAGNATPSAEANIHSDPEAADMVFTSGADIYVVGLNITTQVSFTDKDLLELRNSQGKYAQFLCDVCKFYLDWHTESYGAPVIFLHDPVSFAALVRPELFTFKKGVVRVETQGICVGHTSMDMLLKKWNSENPWTGYSPISVAWTVDVPKVVAFVKELVTKP

SEQ ID NO: 224798 - protein, 148 aa, Zea Mays
MRSRPAAPSCWSPAEPPSVPDAASPWCSPLFPPALDDLALPPCSRFLHATSHGRQPSAMDAEPPLFSAFLYSPCVAVRVRCLYKCSRGVTCHGQPFWRRRMFDVLCIPSTTPSTIGEDSFLLCHFIDRRLFANMNCVYVPMCVEERNP

SEQ ID NO: 224799 - protein, 145 aa, Zea Mays
MASPLRRSFPSLGRALLTPAPARMLSAEASDALVEIKPGEIGMVSGIPEEHLRRKVVIYSPARTASQQGSGKVGRWKINFLSTQKWENPLMGWTSTGDPYANVGEAGLTFNSAESAKAFAEKHGWNYVVRKRHTPLLKYKPSLLH

SEQ ID NO: 224800 - protein, 350 aa, Zea Mays
MPPLRRILDSALATSPSLAYPPQPSLGWGCFGMGFTRKADEDPEPGRCRRTDGKKWRCSKEAYPDSKYCEKHMHRGKNRSRKPVEMSLATPAPAPAPAAATTATATSSPAPSYHRPAHDATPSPYHALYGGGGGGGGSPYSASARPGATGGGGAYHHAQHVSPFHLHLETTHPHPPPPYNYSADQRDYAYGHAAAKEVGEHAFFSDGAGERVDRQAAAGQWQFRQLGVETKPGPTPLFPVAGYGHGAASPYGVEMGKDDDEQEERRRQHCFVLGADLRLERPSSGHGHGHDHDDAAAAQKPLRPFFDEWPHQKGDKAGSWMGLDGETQLSMSIPMAATDLPVTSRFRNDE

SEQ ID NO: 224801 - protein, 281 aa, Zea Mays
MAAASLALASPLRLLLRVRHPRGAIAVPCYFISRGRYSTAIAVAAARDLAVKGSVDRNSAEEVRNILNMAERASQRRNVFHTNFLTPPIVKEAMLALEKFADTKAVAQGGYPQAERCRISVGHPDVMTSNPDVVAALSISGNFRLESCSHGDFLGAILGTGITREKVGDILLQVGKVGVSCTQIPLLALEYEPPRTNSFKTVESSLRVDALASAGFKISRTKLASLISSGDVRVNWTPTTKNGVTLKSGDVVSVSGMGRLKIGEIVTTRKGKYAVELIRYL

SEQ ID NO: 224802 - protein, 573 aa, Zea Mays
MAAMDLLSGKLIRSLRLHSSLLPSAPSSSRAFEVSASRTVREEFFSAFEEEMEVKRRLEQVQAALEGATEDMDLMGRLLDELDLLQRRSQDVDLDMVDVKVQKLMPELGFMPEDADRLVASFSGGWKMRMSLGKILLQDPDLLLLDEPTNHVDLDTIEWLEMYLKTQDVPMVIISHDRAFLDQLCTKIVETEFGVSKTYKGNYSEYILAKAVAVEAQYAAWEKQQKEIEQTKELINRLGAGVNAGRASSEQKKLEKLEKEGLIEKPFQRKQLKIRFPERGRSGRTVLTINNLQFGFENKTLFNNANLIVERGEKIAIIGPNGCGKSTLLKLMLGMEKPQGGEVLLGEHNVLPNYFEQNQAEALDLEKTVLDTVAEAAEDWILDDIKGLLGRCNFRDDMLDRKVQFLSGGEKARLAFCKFMVTPSTLLILDEPTNHLDIPSKEMLEEAISEYTGTVITVSHDRYFIKQIVNRVIEVKDQTIQDYQGDYNYYLERNLEARERELAREEELEERAPKVKAKSKMSKRKPSGRSRRCRPSSRASRNPSRLRTRSGGTEIFSSFVEAALAFVTMQNAI

SEQ ID NO: 224803 - protein, 692 aa, Zea Mays
MRRSVYANYAAFIRTSKEISDLEGELLSIRNLLNTQAALIHGLSEGVQIDSLTSGPEGSAEDDISKVEDQEPSEIQKWSADFPDMLDVLLAERRVDEALDALDEAERVAVDAKRKQTLTAAEVSALKRSISDNRQRLADQLAEAACQSSTRGIELRAAASALKRLGDGPRAHSLLLSAHNQRLQCNMQTIHPSSTSYGGAYTAALAQQVFSVIAQALSDSVDVFGNESCYASELVTWATKQVMSFALLVKRHVLSSCAAAGGLRAAAECVQISLGHCFLLEARGLSVSSVLLKQFKPSLVQALDANLRRIEESTAALAAADNWILTYPLTGIRPLTRSSAANLALQPKLSSSAHRFNSMVQDFFEDIAPLLSLQLGGSSMDGITQIFNSYVNLLISALPGSMDDEANLDGLGNKIVRMAETEEQQLALLANASLLAEELLPRAAMKLSSINQSMDDLHKRGTDKQNRVPEQREWKRKLQRMVDRLRDNFCRQHALELIFTDEGDTHLSAEMYISMDNTVEEPEWVPSPIFQELYVKLNRMASIAAEMFVGRERFATLLMMRLTETVILWLSEDQAFWEEIEQGAKPLGPLGLQQFYLDMQFVIIFGQGRFLSRHVHQVILDVIDRAMAAFSATGMNPDSVLPGDDWFMDVSQEVVSMISGRGRVANGDREVNSPTASVSAHSISSFKSHGSS

SEQ ID NO: 224804 - protein, 473 aa, Zea Mays
MQTIHPSSTSYGGAYTAALAQQVMSFALLVKRHVLSSCAAAGGLRAAAECVQISLGHCFLLEARGLSVSSVLLKQFKPSLVQALDANLRRIEESTAALAAADNWILTYPLTGIRPLTRSSAANLALQPKLSSSAHRFNSMVQDFFEDIAPLLSLQLGGSSMDGITQIFNSYVNLLISALPGSMDDEANLDGLGNKIVRMAETEEQQLALLANASLLAEELLPRAAMKLSSINQSMDDLHKRGTDKQNRVPEQREWKRKLQRMVDRLRDNFCRQHALELIFTDEGDTHLSAEMYISMDNTVEEPEWVPSPIFQELYVKLNRMASIAAEMFVGRERFATLLMMRLTETVILWLSEDQAFWEEIEQGAKPLGPLGLQQFYLDMQFVIIFGQGRFLSRHVHQVILDVIDRAMAAFSATGMNPDSVLPGDDWFMDVSQEVVSMISGRGRVANGDREVNSPTASVSAHSISSFKSHGSS

SEQ ID NO: 224805 - protein, 110 aa, Zea Mays
MEELGVRPDGSIIRMLGDVFQKIEMMDKYEKLKKKYPPPKWEYRYIKGKRIRIRVYPDSKTEETAKGDHDNDELGEVESIQLDNELEEEASSGLDRSVLDDATCGDLEYI

SEQ ID NO: 224806 - protein, 73 aa, Zea Mays
MKMKSFRTRGLSRTSDHLTDSETNGVIVHHTSIVSVFHVIIDACLILGKLCLVLRSLLSTVLGLKFQSVCLDL

SEQ ID NO: 224807 - protein, 144 aa, Zea Mays
MACGWLHPVPAGAATVAALWPCFLSPVRQSFTKEATVLLFPMSEFSTSASDEQLNQFQRWKLPLNAAKSQRESWNLADRSSSGSSEGVAAASRPADAPTAQSALPMTRSVDAVPGAPIVISGYWTGPGVDDGCGSVEAVLQRIA

SEQ ID NO: 224808 - protein, 198 aa, Zea Mays
MRWGICDPCEGRGTRRKMGLAFGKLFSRLFAKKEMRILMVGLDAAGKTTILYKLKLGEIVTTIPTIGFNVETVEYKNISFTVWDVGGQDKIRPLWRHYFQNTQGLIFVVDSNDRDRVVEARDELHRMLNEDELRDAVLLVFANKQDLPNAMNAAEITDKLGLHSLRQRHWYIQSTCATTGEGLYEGLDWLSSNIASKA

SEQ ID NO: 224809 - protein, 181 aa, Zea Mays
MDTAEKMRWPFSDGSVTDLLDARSLHGSPDIKKKAQFHSSLVQKLALEKEMEGHVGCVNAIAWNSSGSLLVSGSDDTRINLWNYNNRELVHDIDTGHSANIFCTKFVPETCDEVVVSGAGDAEVRVFNMSRLSGRRPREISMEPTMVYQCHSKRVKKLASWMNCLLENLKLLFRLNLAILT

SEQ ID NO: 224810 - protein, 244 aa, Zea Mays
MGTPKANTHGKLRSLSEILFRPDVGGSSEEGREDSDYDDEMELDYETSVSGDESRENDQDILRGRLSYRFHQREDQTNEHTGENGSIEFAQNDDFAFQSDVAIDMKQRYVAHCNVGTDIKQASFLGEQGEFIASGSDDGRWFIWEKRTGRLIKMLAGDGAVVNCIQSHPFDCAVATSGIDNTIKLWTPDANATSMVAGPELDVLSAIENNQRTLCRKRQIVLPFEFLERVRMREFSESFECNQS

SEQ ID NO: 224811 - protein, 244 aa, Zea Mays; identical to SEQ ID NO: 224810

SEQ ID NO: 224812 - protein, 223 aa, Zea Mays
MGTPKANTHGKLRSLSEILFRPDVGGSSEEGREDSDYDDEMELDYETSVSGDESRENDQDILRGRLSYRFHQREDQTNEHTGENGSIEFAQNDDFAFQSDVAIDMKQRYVAHCNVGTDIKQASFLGEFIASGSDDGRWFIWEKRTGRLIKMLAGDGAVVNCIQSHPFDCAVATSGIDNTIKLWTPDANATSMVAGPELDVLSAIENNQRTLCRKRQIVLASKG

SEQ ID NO: 224813 - protein, 962 aa, Zea Mays
MLDFCAPHGPAKLPVASVAGVRVAGRWLWRSAAVGAVRHGVSARASSFGSRIGLDSQNFHTRDLSQLLWIGPVPGDIAEIEAYCRIFRAAEQLHTAVMSALCDPETGECPVRYDVESEDLPVLEDKVAAVLGCMLALLNRGRNEVLSGRSGVASAFQGSEDSTADRIPPLALFRGDMKRCCESMQVALASYLVPSEPRGLDIWRKLQRLKNTCYDAGFPRADGYPCPTLFANWFPVYLSIVSDDSGMDELEVAFWRGGQVSEEGLAWLLGKGFKTIVDLREEDVKDDLYLSAVQEAVSSGKIEVVNMPVEIGTAPSAEQVQQFAALVSDGAKKPIYLYSKEGVSRTSAMVSRWKQYVTRSERLAVQNHSLNGNGNILTNHKTMQHTGIPSSSPNGAENGMITESDRTMNNGESSEIDIDTARHNLEVTNALCNDQSTQQGEMPDTVAELLSNFKLESNPLKAQFPTCDVFSRKEMTKFFRSKTVYPKSVLNSRRRSSSLVIRRKQNLCTERSGTNDYEAAEFAVLRSSNGKSFDSDYILSVASGITDGKPSNNEASLIEEKEREVSVATIDTRASANSSNRKVQVGSQESAEKNSTPYLERNKSDNVDRNMCASATGVVRLQSRRKAEMFLVRTDGFSCTREKVTESSLAFTHPSTQQQMLMWKSPPKTVLLLKKLGDELMEEAKEVASFLHHQEKMNVLVEPDVHDTFARIPGYGFVQTFYTQDTSDLHERIDFVTCLGGDGLILHASNLFRTSVPPVVSFNLGSLGFLTSHNFEGFRQDLRDLIHGNNTLGIYITLRMRLRCEIFRKGKSMPGKVFDVLNEVVVDRGSNPYLSKIECYEHNHLITKVQADGVIVATPTGSTAYSTAAGGSMVHPNVPCMLFTPICPHSLSFRPVILPDSARLELKIPDEARSNAWVSFDGKRRQQLSRGDSPDQVSQLEREIGPEGIIGTRKFFIVSVHM

SEQ ID NO: 224814 - protein, 763 aa, Zea Mays
MQNSGLGLQNKHSFAGDSAGAYPLVLRISVRETSILTLKISKKDNPFENYKRANKIFNVDSQPVHVWDFSGQTNLILMNEWNRLHDCCHADQENLLEVQVYAMSDSLTSKIGGTNKENYGDISDMNSDSSYRSFGRAGSMGLIGLENLGNTCFMNSSIQCLAHTPKLVEYFLGDYAKNINRTNPLGLNGELALAFGELLRSLWTTDGKPVPPHYFKEKIACFAPQFGGFNQHDSQELLAFLLDGLHEDLNQVKCKPYEEAKDASGRPDEEVADEYWSNHLARNDSVIVDTCHGQYKSTLTCPTCSKTSVTFDPFMYLSLPVPSTAKRVMTVTVFSTDGSREPCSYDVSVPKFGTLSDLVQALSIVCLLGDDEILLVTEVYNNCIIRYLEEPSDSVSLLRDGDKLAAYRLPKRHEKSPLVVFTHQHFVQHSSDGNLTPQMREFEAPLLAALPEEISGLSLQDIYLKLLSPFQLSNGASSLNDCMESNSDSVDTPSDSGSINFQNSQLEDGPESNHCSASECEVTKGPDDLYDGVSGSNKEAHMDFEFYLKSERGEGQQQKIEINELHLLLETAPSRLHVNVHWLQNASRKYATSMLNNLPEIHKLELIPKGTEDSVALHGCLEAFLKEEPLGPEDMWYCPRCKKHQQAMKKLDLWRLPEVLVIHLKRFSYTQFTRNKLETFVDFPTVDLDLSSYVADKSEQPSSHYRLYAVSNHYGNMGGGHYTASIYHEEGKGWYKFDDDCVTPMSEDSIKTPAAYVLFYRRE

SEQ ID NO: 224815 - protein, 123 aa, Zea Mays
MARGARFLLVLALLVALLAVVFQLYRLRKPRLWTVEELSLYNGTDEGLPILLAILGSVFDVTKGRSHYGPGGGYHHFAGRDASRAFVSGNFTGDGLTDSLQGLSSSEVNSIVDWRKFYFERYM

SEQ ID NO: 224816 - protein, 373 aa, Zea Mays
MAGDPGDAPEVGGGGIRSVLTTASLVAPSGDEVQFREIDGKIIGLYFAANWYPKCEAFTPVLAAAYEQLKERGAGFEVVLVSCDEDRPSFERFHGTMPWPAVPFGDLSCKKRLSERFQVEGIPRLVVLAPDGGAVVHPDAADLVHRYGERAFPFTAARVAELEADDQRKYASQTLEKLFSVSGKEYVMNSGNNEKVPVSSLVGKTVGLYFSANHCAPCIKFTTKLAAIYSSLRGKAEDFEVVYVPMDREEDGYLRSCGDMPWLALPYDGATVTRDGRNLVNLYFDMAFPFTDAQIRLLQEAEDEAAKEYPRSLRHRGHRHELSIVSEKSGGGPYICCECEEQGLGWAYQCIACGYEIHLRCGQNAEGGSAGTA

SEQ ID NO: 224817 - protein, 149 aa, Zea Mays
MIVETFDTRLEAMESFTNGNVRLLKHERSIVAEDDLDQRWQEATGESVSEVIFLSKHTAVSKRPALTVHPIGVPHLKEDETPPQGGTPGWAAIPSPRIGPWLRLMQKIAVEQGLVPEFEVTLEATHHGPVTSTPTMFVEIGFYTPIMST

SEQ ID NO: 224818 - protein, 67 aa, Zea Mays
MNNMLTRLLTLAGHALANVTFINACKCTLHILDWPYIAHTCALKYVIGNDRMWNANYLGRDKAYKCH

SEQ ID NO: 224819 - protein, 58 aa, Zea Mays
MMVRARDAARALLRLAGARAGVHRDYFPPLARATFARAFLDFRKTGNKEAIEKDKARL

SEQ ID NO: 224820 - protein, 506 aa, Zea Mays
MSDLQISRNNQMELHRNSTNGSCLSACGPLTDYYIPDYILKPAYEPVTVDNVPCCPVVVFINSRSGGQLGSSLIKTYRELLNEAQVFDLSEESPDKVLHRLYSNFERLKSSGDHVATQIQKSLRLIVAGGDGTASWLLGVVSDLKLSHPPPVATVPLGTGNNLPFSFGWGKKNPATDQAAVKSFLDQVKGAREMNIDSWHIIMRMRIPQEGPCDPIAPLDLPHSLHAFHRVSACDSLNLEGYHTFRGGFWNYFSLGMDAQVSYEFHSERKRNPEKFRHQLRNQGTYAKLGFKHSLNHLSSRNISQLAKVKIMKRPGSQWEELKIPRSIQSVICLNLPSFSGGLNPWGTPGTRKAQDRDLTAPYVDDGLIEVVGFRDAWHGLILLAPNGHGTRLAQAHRIRFEFHKGAAEHTFMRIDGEPWKQPLPKEDDTVVVEISNLRQVAMLANDPCRSKSVNEPSSPSCHGHEDDDSNSLEDEDEDEWEDGRKKFGAAATFKIPDEVDIAHLS

SEQ ID NO: 224821 - protein, 387 aa, Zea Mays
MTLLNQISLAMLSGGLVIHNILELMLLQIIELLSIRPPPVDAKLKLLKEIAEEHEVDWDPSETETEFLKPHEDLLNGPTYFNVSTLPLPKEKHEETVVASAAEQPDEDYESDTGLDSLDLPEVPKAAIRPPSDAPLTPDICPHVQGSQSLPHEFSDPGNLEENPTAGGAFNVIQMKSLEHLVYAPSDQSNIPDLPNEKKQFIPFASPPPVLSPSVGKAETVPSPSLSPPVKPTEPEPEILTKKIDEVTTPPVLPSDYIFTKQPEQVRTISPSESGANIDLDDVLSAAQTAAESAERAASAARAAANLAQLRISDLKKNSKVYSNYGDSVQKESHHQTEATQEPVFDHQDSFTNDTQDYVSSHVPQRSSSLEDDPYFSYPNLFSAPKP

SEQ ID NO: 224822 - protein, 501 aa, Zea Mays
MSMLDTFFSKGGGGGFRGAKCKTLLKLSIPRIKLLRNRRELQLRQMRRDIAKLLEAGQEATARIRVEHIIREENMMAAQEILELFCELIAVRLPIIEAQKECPIDLKEAISSVCFAAPRCADLPELMQVQMMFATKYGKEFVAAASELMPDCGVNRQLKLLKEIAEEHEVDWDPSETETEFLKPHEDLLNGPTYFNVSTLPLPKEKHEETVVASAAEQPDEDYESDTGLDSLDLPEVPKAAIRPPSDAPLTPDICPHVQGSQSLPHEFSDPGNLEENPTAGGAFNVIQMKSLEHLVYAPSDQSNIPDLPNEKKQFIPFASPPPVLSPSVGKAETVPSPSLSPPVKPTEPEPEILTKKIDEVTTPPVLPSDYIFTKQPEQVRTISPSESGANIDLDDVLSAAQTAAESAERAASAARAAANLAQLRISDLKKNSKVYSNYGDSVQKESHHQTEATQEPVFDHQDSFTNDTQDYVSSHVPQRSSSLEDDPYFSYPNLFSAPKP

SEQ ID NO: 224823 - protein, 119 aa, Zea Mays
MDARPDPAASVTITTRTTHEHTRRLTRRGEHSAAMGGGGAHGGTTYKGYTIPHNKRWHTVAGKGLCAVMWFWVFYRAKQDGATLLGLRHPWDGHDDHSHGHGHGHESFHSNASSWISYC

SEQ ID NO: 224824 - protein, 758 aa, Zea Mays
MEVEEPLPTSKNPRRARRRDLNALDPTLEESDGEDIGVPEVGMVFNNHTEVNRFYRRYARRVGFGVSVRRSSFSREGTCLYLELMCCKGGRPRYEPKFRKRASSTTNCPAKVRVKLWGDKLLHIELAILDHNHPVSPAMARFLNSYKQLSGPAKRRLRMGGPGTMPVEESSKMPMDKLGELEQLLFGESKHNSFVERGRLKLQPGDSEALRLFFTRMQAKNANFFNVIDLDDEGCTRNVFWADARSRAMCEYYSDVITLDTSYVASKYDMPLATFIGVNHHGQSVLMGCALLSDETAETYSWLLKSWIACMYGNLPKAIVTDYCRGIQSAVAEIIPGVRHRMCLFQIMRKAAERLGGLSEYRAINKAMHKAVYDSLTIDEFEEEWNTLITYSGLQSNDWLRSLYECRSSWVPVFIKDTFWAGMSTTQRNETITPFFDGYVDLKTTLKQFLVKYEMALQSKYEKEAQADFETFHKQRPPVSKFYMEEQLSKVYTHNMFKKFQDEIEAIMYCHVSLISVDGPVSTFNVKECIFFEDGKRTMSKIFAVTYKVDEKNISCICGGFQFSGILCRHSLSMLKFQLVREIPQHYILDRWKKDFRQLHVMRRPPSDLVPNNRMDRYDYLSIRCLQLVDSAVLSDKYRLALRLVRETEKFLLNSNTHDDTQPRIKSRVPKVNKPNIVTGQTMVGAATGNGNDGLKGPEATAVTQVPQSQKGGAEKGIVPTGYIGVPANLQQFVGNQTAFRPSIVYMVPEYATDCCWL

SEQ ID NO: 224825 - protein, 152 aa, Zea Mays
MATNPSNGAGADGGPSEEELQKKREEDYDAFTSTKAQDLAQPLVDAQIPFKIHVVKDHDMKERLCLEAERLGLSAMIMGSRGFGASRKGSKGRLGSVSDYCVHHCVCPVVVVRYPDDAADAGGDASGVTDELHTVPEDEPVYHDAPEVQKEN

SEQ ID NO: 224826 - protein, 864 aa, Zea Mays
MAKGALGSLSSVQISSHSTPRSTATFTTSLSLQNPSKAPACMKDATRGTSAVEEALAAHRPRRAMASPLLCVLLYLLRHLTACHAARDIITPDRPLAGNETLVSGGEGNFALGFFTPPGANSTYLGVWYNKVSLRTVVWVANREAPIAGAVGDNPGATLSVSAGGTLAIAAGNRTVVWSVEPASRLASPAAQILDNGNLVLKDGAGGVAWEGFDYPTDTLLPEMKLGIDYVKGKNRTLTSWKSPSDPSPGPVAMVMDTSGDPQVFIWNGGEKVWRSGPWDGVQFTGVPDTATYSGFTFSFVNSAREVTYSFQVHNVSIISHLGVVSTGNYGLLQRSTWVEAARAWNLYWYAPKDQCDAVSPCGPNGVCDTNNMPVCSCLRGFTPRTPAAWALRDGRDGCVRSTPLDCRNGTDGFVTVRHAKVPDTERSAVDWSLTLDQCRQACLRNCSCTAYASANVSGGAGGGRRAGAGSGCVMWTTGLTDLRVYPDFGQDLFVRLAAVDLDVEAKSREARIKIAVGASVSALALLLAVAGLLIWSWRRRLTRTDGSSKWSSSRPTGRRYEGSSHGDDLELPIFDVGTIAAATDGYSIENKLGEGGFGPVYKGKLEDGMEIAVKTLSKTSAQGLDEFKNEVLLIAKLQHRNLVRLLGCSVSGQERMLVYEYMANKSLDYFLFEKDNVVLDWQVRYRIIEGITRGLLYLHQDSRYRIIHRDLKAANVLLDKEMTPKISDFGMARIFGNEETEINTRKVVGTYGYMSPEYAMDGIFSVKSDVFSYGVLLLEIVSGRRNRGVYSYSNNQSLLGHAWSLWNEEKSIELADERMNGSFNSDEVHKCIRVGLLCVQENPDDRPLMSQAADNRRGGGDQQ

SEQ ID NO: 224827 - protein, 653 aa, Zea Mays
MGILISTSFVTSGTVMDPEKQNEMSLIDKRELVYEVARWPQGAMEILRCWTRRELLELICVELGKERKYTNVPKAKMIAYLLKLVSRNSGKNGQLKNDNPNVMLLGQDNKDEIQMKESDEQSRPLKTANSDSSISREACAGSSVVCSNVACQATPNAGDKYCKRCSCCICNKYDDNKDPSLWLVCSSDNPYSGCSCGVSCHLNCALKNKRAGIVKNGCNKLDCSFYCVSCGKINWLMRCLQKQLAIAREARRVDVLCERLSLSHKIIQGSERYKEIASIISSAVKTLEIEVGSALDQVSVITGRGIVNRLTCGAEVQKLCSSTLEIVDSKVDNILEFESNNSPKLLGPQPQILFHEITPFSVVIVLNYQHDIGKEQIDGSKIWHRSARVCNYSSEPTCHILRPNTRSLVSGLSPSTEYFFKVLPFSSTHGFTEWETKCSTRSLDHGSSQCSTQNSESMCLKDDSMQHHKKDLNVQNHQRTIQYDSPKGSTNSSENNLSCDRYSKRAKVARLDGASDNDESQLPPTSEVLPFASSNSSPSEAPSKPDLLIGTPDSASKNYVEQQYEYCVRVVRWLEHEGHMDNDFRVKFLTWFSLKATTQDRRIVGAFVDVLIGDPASLVGQLVDAFKDAICIKEKPSQAQQKDACCKLEDQAI

SEQ ID NO: 224828 - protein, 942 aa, Zea Mays
MAAVKASEARGDPPLLQVVELSRIVAVEGAGTLSSADLARILVSNLCFAHNSPSLWKLLGQAVVSRLLCPLHVLALLTPRVLPQRRAQPEAYRLYLELLKCHVTSSLLSMEAGPNRDKIGKSIAEALQLSKVYGFSGTEFGHVVIMFVLAVVSKLIDSIFEDCGFPSAMVEGQESVNAIDGPQPMDLDVKMGSTENQNEHREQLRRKNTLIALDVLHMMTADRKIQSFLRLIFLNMPERFSSLRQRLSSIEAQKVSLETLLPSGHKINELLINFWRVCKTDYQPNNKHILGVLGNMGSGGSLLGQLTGAGRPACWIIFDIYVENAIDGRHLSVISAIRIIKEMTKTMQVLNEASWQETFKALWISALRLVQRAREPLEGPIPHLDARLCMLLALIPLSVAAILQEESDMLGAEGNKILPQRQGLISSLQDLIQYSGLLVPPSSVVNAANAAASKAAIFKANYEAGVGNSSMMDQTDSSMKAAGNMLHLIIEACISRKLIDTSAYLWPGYVVPSGTLKDTALPQESPWLNFMKGSRLSGPLIDALVASPASSVAELDKLYSIALNGSEEEKTAAAKILCGASLVRGWNIQEHVVGMVVKLLSASLPSDSATSTPGSMSNYLAHMSTLNEILLGVSYGDAIHILSLYGMVPDVAVALMPICEAFGSIPPPPNHKSTILGEISVYTVFSCAFLCLLRLWKFYRPPQEYCLAGRGGSVKLELTLDYLLLMHNNHIEFSNSSASNRDSCNDMGSVNEVPAQLIYIDSFPKLRAWYFQNQACIASPLSGLCNKNPVHQVANKILNMICRKMNKGVVSSSTLSSTSSSSVSGSSVSASDDPCQRPAVSGWEFLEAVPFVLEAVLTACAHGQLSSRDLTTSLRDLVDFLPASLAAIVSYFSAEITRGIWKPVPMNGIEWPSPGASLHSIEAEVKEILASAGVQINSCYPP

SEQ ID NO: 224829 - protein, 1264 aa, Zea Mays
MAAVKASEARGDPPLLQVVELSRIVAVEGAGTLSSADLARILVSNLCFAHNSPSLWKLLGQAVVSRLLCPLHVLALLTPRVLPQRRAQPEAYRLYLELLKCHVTSSLLSMEAGPNRDNIFEDCGFPSAMVEGQESVNAIDGPQPMDLDVKMGSTENQNEHREQLRRKNTLIALDVLHMMTADRKIQSFLRLIFLNMPERFSSLRQRLSSIEAQKVSLETLLPSGHKINELLINFWRVCKTDYQPNNKHILGVLGNMGSGGSLLGQLTGAGRPACWIIFDIYVENAIDGRHLSVISAIRIIKEMTKTMQVLNEASWQETFKALWISALRLVQRAREPLEGPIPHLDARLCMLLALIPLSVAAILQEESDMLGAEGNKILPQRQGLISSLQDLIQYSGLLVPPSSVVNAANAAASKAAIFKANYEAGVGNSSMMDQTDSSMKAAGNMLHLIIEACISRKLIDTSAYLWPGYVVPSGTLKDTALPQESPWLNFMKGSRLSGPLIDALVASPASSVAELDKLYSIALNGSEEEKTAAAKILCGASLVRGWNIQEHVVGMVVKLLSASLPSDSATSTPGSMSNYLAHMSTLNEILLGVSYGDAIHILSLYGMVPDVAVALMPICEAFGSIPPPPNHKSTILGEISVYTVFSCAFLCLLRLWKFYRPPQEYCLAGRGGSVKLELTLDYLLLMHNNHIEFSNSSASNRDSCNDMGSVNEVPAQLIYIDSFPKLRAWYFQNQACIASPLSGLCNKNPVHQVANKILNMICRKMNKGVVSSSTLSSTSSSSVSGSSVSASDDPCQRPAVSGWEFLEAVPFVLEAVLTACAHGQLSSRDLTTSLRDLVDFLPASLAAIVSYFSAEITRGIWKPVPMNGIEWPSPGASLHSIEAEVKEILASAGVQINSCYPRGVPPMLPLPMAALVSLTITFKLDRSLEYIQGVIGQALENCAGGSSWPSMPIIGALWTQKVRRWHDFIVLSCMRSPFGRDKDAVAQLIQSCFSSFLQSSSSGSDIIANRGVGALLGDSITNQGLRLPMAPGFIYLRTCRTFHDTYFVSEVILKQVIEWAHKLANGWCFNGPPQLKSGRTPLSCAASMVQQVALLGGGLLCIAGGPLVVQVLYEETLPTLLLSARDQSLKGPGPVSSTLQGYAMANMLFYCGSLLWGADRTSPVMKLSFLSRRPRVVRTHMDFIAGVLDGHILLGCDPGTWKAYVSQFMFLVVKFVPSWLRDIKLDTLKKIAAGLRSWHEHDLALSLLERGGPQAISVVVETFL

SEQ ID NO: 224830 - protein, 651 aa, Zea Mays
MAAVKASEARGDPPLLQVVELSRIVAVEGAGTLSSADLARILVSNLCFAHNSPSLWKLLGQAVVSRLLCPLHVLALLTPRVLPQRRAQPEAYRLYLELLKCHVTSSLLSMEAGPNRDKIGKSIAEALQLSKVYGFSGTEFGHVVIMFVLAVVSKLIDSIFEDCGFPSAMVEGQESVNAIDGPQPMDLDVKMGSTENQNEHREQLRRKNTLIALDVLHMMTADRKIQSFLRLIFLNMPERFSSLRQRLSSIEAQKVSLETLLPSGHKINELLINFWRVCKTDYQPNNKHILGVLGNMGSGGSLLGQLTGAGRPACWIIFDIYVENAIDGRHLSVISAIRIIKEMTKTMQVLNEASWQETFKALWISALRLVQRAREPLEGPIPHLDARLCMLLALIPLSVAAILQEESDMLGAEGNKILPQRQGLISSLQDLIQYSGLLVPPSSVVNAANAAASKAAIFKANYEAGVGNSSMMDQTDSSMKAAGNMLHLIIEACISRKLIDTSAYLWPGYVVPSGTLKDTALPQESPWLNFMKGSRLSGPLIDALVASPASSVAELDKLYSIALNGSEEEKTAAAKILCGASLVRGWNIQEHVVGMVVKLLSASLPSDSATSTPGSMSNYLAHMSTLNEILLGVSYGDAIHILSLFQMLLWR

SEQ ID NO: 224831 - protein, 284 aa, Zea Mays
MSLLSAAKSFYFPVSMYVVRAKAGKRQSGKDATGKVAHSAGSSLRRYNEAALKKEVQELIVSWKSYFETCVCAFIYAPSRNRQMLFDGEKTQSVIQSCDVRPVPLTVHRPTMKEAKRVYCNLTQLYYEMECSTTDETLPDAGSVKNVEQGQGKKNEVTADPGESISDLSARLELLNKNEAATIPSSKNETTPLHEAAKCGNAQLTLELLEQGLDPCVKDARGKTSYSLASDKEVRNTFRRFMALNLDKWDWHAADVPSALTKEMEESQAAKQTRTPKGKHVQRN

SEQ ID NO: 224832 - protein, 505 aa, Zea Mays
MISIYRCMLLKEHEEPLIDCKSGQMENASCVQEEEMINRVKCLACEPRDTSHLRIVLLTSGGHFAGCVFDGNSIIAHKTFHRYVVRAKAGKRQSGKDATGKVAHSAGSSLRRYNEAALKKEVQELIVSWKSYFETCVCAFIYAPSRNRQMLFDGEKTQSVIQSCDVRPVPLTVHRPTMKEAKRVYCNLTQLYYEMECSTTDETLPDAGSVKNVEQGQGKKNEVTADPGESISDLSARLELLNKNEAATIPSSKNETTPLHEAAKCGNAQLTLELLEQGLDPCVKDARGKTSYSLASDKEVRNTFRRFMALNLDKWDWHAADVPSALTKEMEESQAAKQADKDAKRKARAKELKKLKKEREKEEKEKEKEKAKAQASQSQSDVKGTSSGQMANRTATAPGLVPKHQTPQQILIAKEEERQRKQAEEREKRAAAAERRLAALAVQSAGTSASGAAATNCSAKRAAPDDNSCSCCFGSLVGKVPFHRYNYKYCSTTCMHLHSEMLQDD

SEQ ID NO: 224833 - protein, 71 aa, Zea Mays
MMKKRHKIERDLSIGEEVGWSKNQQVAKSNPTLAAMNKKFGMIHGLSSLANIMSFGSLAMHSWYLASKLEL

SEQ ID NO: 224834 - protein, 243 aa, Zea Mays
MATTAAASTSLRPLSPSPPRIASLPRRWCWGIPVQSSGRSAFHAERRRRSTLLCAADKAPEESLKKTIEVDRLIDMLRDANPRELDQIVVENVLAFDAGFWVRLAARIDLCKSDDDKKDYEELAENVMNIVDRLVHKTNQKIEQSTDVLKAIISPAMHEGDVKWPPRDPDTLKLMEKEITRREQEGQLDEGFLSEVSAQLRQAKQDGDKPGLQAMLQKVLQLYASKSLQKRSYAYKVHEHLPF

SEQ ID NO: 224835 - protein, 122 aa, Zea Mays
MATTAAASTSLRPLSPSPPRIASLPRRWCWGIPVQSSGRSAFHAERRRRSTLLCAADKAPEESLKKTIEVDRLIDMLRDANPREVNVNLDQIVVENVLAFDAGFWVRLAARIDLCKSDDDKA

SEQ ID NO: 224836 - protein, 540 aa, Zea Mays
MAADPSSSSTGQQTADIRAAPPEDSRQMAMSGPLNVRGDRRPPPMQRAFSRQVSLGSGVTVLGMDRAGRSGGARGQRTLPRSGRSLGVLNHSGGLVQAAGDGAARRVGDFSMFRTKSTLSKQNSMLPTRIRESDLELPTHVEDPQSASSRPAEDPLNKSVPAGRYFAALRGPELDEVRVSSSLFVLGIPVTMDQIRGRGVAVPAAVPDRLLRCVPGPRQPGHPVGRAGGEPGDALPPRHAHDQRRAVAAGGRRARRDVRHLRAQVHLLLRGHPTRVLPPGPRQFLLRAVDRGHVRDHRPTPLLRARAAAPGRVVRLRPAALRARAQDIRAVAVRRQAAAVQGGQPVVPPLGGGQLRRGHTGGEGRVDGGRQAPVGHRGRALHRRVRHAVPAAAHQRGAAQGAAPGVLHVHRHAVGRQPRLGRDLRQLRRRGAHLLLHGHLLVPVPRRAHQLLPGVPVLPRVVVVHVPHDHGVAGHRQVCRGCAVLREQGPRAEPLPHVVDHGVDAARVDAPARARLAIALSQRPGHRHHQGPAKRRGEAE

SEQ ID NO: 224837 - protein, 631 aa, Zea Mays
MKQSPASTAVSDSGMLGRRLALLPAATVGRGGRTTRARMTMGCVLLDHVAPRLAVASATLVGAREVIAAAAAAGAGGSGAVHGAVASTLAQVAVTAVAIASGACLSTKVDFLWPRIDQLPDTLIFEGVEVTGYQIFEDPKVQKAIEFASTAHLGQFRRTGDPYITHCIHTGKILAALVPSTGERAVNTIVAGILHDVVCDTSESLKSIEEQFGADVASLVSGVSKLSYINQLLRRHRQKNTGGSTLTSEEANNLRVMLLGMVDDPRVVLIKLADRLHNMRTIYALPVPKAEAVAQETLAVWCSLASRLGVWALKAELEDLCFAVLQPQIFKKIQSELTLMWNRTGKSKNMRRSSIRNELLASMKDGNMVSINDLFSSCNQERPNMKDLLQAVLPFDIFLDRKRRSYFLSNLNSNSGESIPNPKIVDDAAVALASLASCEEELERELLISTSYIPGMEVTLSSRLKSLYSIYCKMKRKEVGIRQVYDARALRVIVGDKNGAMHGSAVRSCYSILDIVHRLWTPIDGEFDDYIINPKGSGYQSLHTAVQASDSSPLEVQIRTQRMHEYAEHGLAAHWLYKESKVEYRSSMSKRIRQSTSYSSSSSEDESSVQDDIPSKYSSMKVGHPVLRIEV

SEQ ID NO: 224838 - protein, 649 aa, Zea Mays
MHTRATRYWRRGAMPGMDAFAAVSLLATLFLVRAAAAHPPAAAADAMTPTDYWRAVLPETPMPRAILDLLTTSTVGEGSRKVTTSNGYQGHDLRTVSTSYASQDGDNSWKATMSYGFQSGEGSRKVTTSYPYRGQDLRMVSTSYVSQDEDNSWKVSMPSRFQVGEGSRKVTTSNGYQGHDLRTVSTSYASQDGDNSWKATMSYGFQSGEGSRKVTTSYPYRGQDLRMVSTSYVSQDEDNSWKATMSYGFQSGEGSRKVTTSYPYRGQDLRMVSTSYVSQDEDNSWKVSMPSRFQVGEGSRKLTTPFESQREDSRKATASYGIQDDEDTRKATTSYGIHGEDPRKATTSYGSQDEKGSRKVIMSYGSNGEDDPRKATTSYGIQDKEYPRKATTSYGVQGDIHHHDHAAVHIHSSGNKLVADVFFFHDVLRPGSVITPIIPPTITLPPLLPLREADALPFSTGRFADILAMFAPTTSDAMGEEIRSTLDTCENTRPLPGEKAACATSLESLARIPAVLLGTRNVRAFSGDMPTDPAGTSAKRGRYNVTAVQKLSESLTAAACHDLTYPYVVFYCHTTNPAATYLVKLAAQDGGTPDMEALVVCHLDTSLWSPRHPFLVAHSLKPGDDAVVCHFLSKLSIVWVPAGEQGWRA

SEQ ID NO: 224839 - protein, 64 aa, Zea Mays
MSWHHEIIQVVKSCICRNIVLSNGGLLRHGSLGEGLKDVMQNVYAGLGCPPHYGSKFMISKGVR

SEQ ID NO: 224840 - protein, 754 aa, Zea Mays
MVWRCNGKICCWWRVEASNYCRGSGKHPQLMPSTPRWAVANGAGVILSVCDEEVARYETANLTAAAVPALLLPPPTTPLDEHLVAGLPPLEPYARLFHRYYAIATPSATQRLLFGLLEAPPSWAPDALDAAVQLVELLRAAEDYASGMRLPKNWMHLHFLRAIGTAMSMRAGIAADTAAALLFRILSQPTLLFPPLRHAEGVEVHHEPLGGYVSSYKKQLEVPASEATIDATAQGIASLLCAHGPDVEWRICTIWEAAYGLLPLSSSAVDLPEIVVAAPLQPPTLSWSLYLPLLKVFEYLPRGSPSEACLMRIFVATVEAILRRTFPSETSEQSRKPRSQSKNLAVAELHTMIHSLFVESCASMDLASRLLFVVLTVCVSHQALPGGSKRPTGSDNHSHEEATEHSRLTNGRSRCKKRQGPVATFDSYVLAAVCALSCELQLFPFITKNGSHSNLKDSMKIIISGKNNGMNNELHNSISSAILHTRRILGILEAVFSLKPSSVGTSWSYSSNEIVAAAMVAAHVSELFRRSRPCLNALSALMRCKWDAEISTRASSLYHLIDLHGKTVSSIVNKAEPLEAHLTLTPVKRDNQHHREESNTSSLDSVKLENKNGSTSHKKNGFSRPLLKCAEEVLLNGDVASTSGKSIASLQVEASDLANFLTMDRNGGYRGSQTLLRSVLSEKQELCFSVVSLLWQKLIASPEMQMSAESTSAHQGWRKVVDALCDVVSASPTKASAAIVLQVKILLYCTFGQN

SEQ ID NO: 224841 - protein, 131 aa, Zea Mays
MVRERLNMEIRRQLSTGRANLPALQPPGSVDGFEMFGLLSPAIVQAIEARDRDRICTEYWRSRPHVVTEDRATAPPQAQGPLHALRGLFQRANRNELLALRSLLVSNISPDDFSRRQATQILDEEIAKQWR

SEQ ID NO: 224842 - protein, 1150 aa, Zea Mays
MQVGDDRLGRGGSRQGVGVSGWCLVPGGCRPGRCGARQGRDGGGKRHLGKERRRQGAAAAGDRPWLTAARNFIKAKSDIASEDLQALVKLGLEVFHASHNKFVVQIKWGGLLIRLLRKHGKRLSLVVQWRPLYETLIRTHFKRNMGPEGWKVRKQHFETVTSLVCASRNFFTEGVAAEIWSEFRPLLENPWHNSAFEGVGFLRLFLPANSRNQDHFTTDWIRNCLDIWDSVTNCNFWDIQWASIIARCIKNSRSVNWDAFLPLLFTRYLNMFEVPISSGNGSYPFPVEVPGNTRFLFSSKTRTLSKAIAKSVVYLLKPKSLAFEYFEKLINFLEQFYHPSNGGRWTYSLERFLRYLVVYFEKRLQHEQFVMAVEDHDQSYLGKEERSVFVKAILKLLDRGQYSKDNSLAETVSVATSILSYIEPTLVLQFVAKNFQRALETTTATHQLKNAVTSVAFSGRALLLCSLCSSQNDDSSVVDSFSDLVVASLSNALLGMDANDPPKTIATMQLIGSIFSNLAAVSDDVPILLQSTTLSNWLDEFFSRLFSVLHNLESSSPINEGYQSSFMSGTFLVDSPYYFCMLEILLGKLSKPLFNQSLKRIAKFVNANILPGATSEVGLLCCACVHSYPEEASVYLVKPILETIMSSFEGTPTTGYVGRVVADKASTKAALSPALETAIDYYLRVLAISISYAGPTLLNYKEELNHIITSAFQSPSWKVNGAGDHLLRSLLGNLVSYYPIDQYKPFTCQPIGNIIEPWGCSKAHQDREDEMLNFPPKWHDPSHDELSFANELLQLHFQSALEDLLTICQTKVHSDTGDEKEHLKITLLRIHSALHGVMSCLPEIRPSYKDGRSLEVESAFFIAGSAGSTVGSSEMREKAAEFVHIACRYLLKERTDDSILLSLVVRVIDALVNYGSLEYQEWSSHVQAWKLESASIIEPPCNFIVPFHAQGKKRPRWALVDKANLHSTWRCSQSSYHRYRMNADVSPSVPMINLMNDLLDLSLHNYETVRSYAGRSLTKLLKRWPSLISNCVLTLTGNLRDPKAPEHVVLGSCSILISQTVLRHLTTDSVSLSSFIMGILESSHHESLKCQKAITELFVTYNIRFSGISRSFFKTPENQADKPGFLSLISQINALGFETNGLHWRRTAHH

SEQ ID NO: 224843 - protein, 258 aa, Zea Mays
MFAAIRETLMVGGMEGPPHRSRERETRLWSIHMTGEPDPDANGKQQWRHPDPGAPTAPARPAPSFGGSGTPRDTGPCPCGMGWDGMEHFWAASGRQKLKPNAQLLARLLGEAIGYGSLLPMPSAPSSPRIAAFPSPFSSVRMVAAVTPTPLLRPQGSASSQPSRLHLRKIVVSLRVQGVRFQDHLGFEDFGCNLQLSKGTVPLNLLMNYLSPYMLCICSNNVDPWLVLVHSLSVHLNNESTVRIRQHRHCLWGDVIFQ

SEQ ID NO: 224844 - protein, 207 aa, Zea Mays
MYFTVRSYMPSRVKQILPSFCKDMFRILDSLNFNSLIEDGSTMKLKIAKRCLIIFCALVTRHRKHTDNQMPHIVNCAIKISKQSIHLSKLDSLPNRIVSLAFDVISRVLETGPGWRLVSPHFSSLLDSAIFPALALNEKDIEEWEEDTDEYMQKNLPSELDDISGWTEDLFTARKSAINLLGVIALSKLHLQHRSVRKVIKIKGNLK

SEQ ID NO: 224845 - protein, 254 aa, Zea Mays
MVATKEPLSSLAAEFQSGSPILQEKIKLLGEQYGALRRTRGDGNCFYRSFMFSYLEHILETQDKAEADRIMVKIEECKKTLLSLGYIEFTFEDFFSIFIELLESVLQGHETPIGPEELLERTRDPQVSDYVVMFFRFVTSGEIQRRSDFFEPFISGLTNSTVVQFCKASVEPMGEESDHVHIIALSDALGVPIRVMYLDRSSCDTGNLSVNHHDFIPSANDSEGDAATTPAPATEKPYITLLYRPGHYDILYPK

SEQ ID NO: 224846 - protein, 141 aa, Zea Mays
MRRPWRRPRTTPAWLLRSRSSTRRACMGLRNGRDRESERKDPDYDRSYDRPVIHGHIPPRVPRAASPRLHPVRSLFRSIELSLFIPSHYCIEISSLIIFSWVSGKEKTRFMLSILDLQRSTEIHQHTSTFHTEQSRRDDME

SEQ ID NO: 224847 - protein, 70 aa, Zea Mays
MQCLRKSIELSLFIPSHYCIEISSLIIFSWVSGKEKTRFMLSILDLQRSTEIHQHTSTFHTEQSRRDDME

SEQ ID NO: 224848 - protein, 70 aa, Zea Mays; identical to SEQ ID NO: 224847

SEQ ID NO: 224849 - protein, 50 aa, Zea Mays
MYFFCYVIFHCPLSILVPGLGFCFLYFFSMSSSYCSCPSSKFCRVVSVFG

SEQ ID NO: 224850 - protein, 165 aa, Zea Mays
MGEVSEEELSQYDGSDPKKPLLMAIKGQIYDVTQSRMFYGPGGPYALFAGKDASRALAKMSFEPQDLTGDITGLGPFELDALQDWEYKFMSKYVKVGTVTKNVTVEDRSSAASTAPGTSEAATEAEKAPTTTTTEEKPREVPAEAVKEKEAAAAAAAAGEGAQEN

SEQ ID NO: 224851 - protein, 115 aa, Zea Mays
MDPTEPRWRINSSFSPPTSRRWDCRYSSDGLPHRVHDAPHDHPPYVSSLSSHSKGSRSAFGSDQYLNHHHSASDGALSYFGSPADSLQAPRWTPSLQRFDLGEFSTPAGEFRLVS

SEQ ID NO: 224852 - protein, 373 aa, Zea Mays
MDDAGRAPPPAPAAVTVSATAAPAPTPPSATAAADKSSLDPDALYEEGMWQQMAMNSGATMQPGSYPERPGEPDCTYYLRTGLCRFGMSCRFNHPPDRNLAIASARMKGEYPERVGQPECQYYLKTGTCKFGPTCKFHHPREKAGIAGRVQLNTLGYPLLPNEKECAYYLKTGQCKYANTCKFHHPELFNVVPSSRGSPIYTSVHSSASAGPQSYTGTMSSWTFPRASFIPSPRWQSPSNYAPMVVPHGLVQVPSWNSYPGQLQSPGAQQTYGSSQQGEASAGNQGMLSPYRSSSFPVPQYALQRDNVFPERPDEPECQYYMKTGDCKFGAVCKFHHPRVRSQPPPDCVLSPMGLPIRPFFGVGHMRGFFKPR

SEQ ID NO: 224853 - protein, 334 aa, Zea Mays
MDDAGRAPPPAPAAVTVSATAAPAPTPPSATAAADKSSLDPDALYEEGMWQQMAMNSGATMQPGSYPERPGEPDCTYYLRTGLCRFGMSCRFNHPPDRNLAIASARMKGEYPERVGQPECQYYLKTGTCKFGPTCKFHHPREKAGIAGRVQLNTLGYPLLPNEKECAYYLKTGQCKYANTCKFHHPELFNVVPSSRGSPIYTSVHSSASAGPQSYTGTMSSWTFPRASFIPSPRWQSPSNYAPMVVPHGLVQVPSWNSYPGQLQSPGAQQTYGSSQQGEASAGNQGMLSPYRSSSFPVPQYALQRDNVFPERPDEPECQYYMKTGDCKFGAHCA

SEQ ID NO: 224854 - protein, 209 aa, Zea Mays
MSSWTFPRASFIPSPRWQSPSNYAPMVVPHGLVQVPSWNSYPGQLQSPGAQQTYGSSQQGEASAGNQGMLSPYRSSSFPVPQYALQRDNVFPERPDEPECQYYMKTGDCKFGAVCKFHHPRVRSQPPPDCVLSPMGLPIRPGEELCKFYSRYGICKFGANCKFDHPTMAAPMGVYAYGFSGSASVAPASTNAPMTRHLLGSPSGSGYMS

SEQ ID NO: 224855 - protein, 209 aa, Zea Mays; identical to SEQ ID NO: 224854

SEQ ID NO: 224856 - protein, 379 aa, Zea Mays
MWQQMAMNSGATMQPGSYPERPGEPDCTYYLRTGLCRFGMSCRFNHPPDRNLAIASARMKGEYPERVGQPECQYYLKTGTCKFGPTCKFHHPREKAGIAGRVQLNTLGYPLLPNEKECAYYLKTGQCKYANTCKFHHPELFNVVPSSRGSPIYTSVHSSASAGPQSYTGTMSSWTFPRASFIPSPRWQSPSNYAPMVVPHGLVQVPSWNSYPGQLQSPGAQQTYGSSQQGEASAGNQGMLSPYRSSSFPVPQYALQRDNVFPERPDEPECQYYMKTGDCKFGAVCKFHHPRVRSQPPPDCVLSPMGLPIRPGEELCKFYSRYGICKFGANCKFDHPTMAAPMGVYAYGFSGSASVAPASTNAPMTRHLLGSPSGSGYMS

SEQ ID NO: 224857 - protein, 321 aa, Zea Mays
MKGEYPERVGQPECQYYLKTGTCKFGPTCKFHHPREKAGIAGRVQLNTLGYPLLPNEKECAYYLKTGQCKYANTCKFHHPELFNVVPSSRGSPIYTSVHSSASAGPQSYTGTMSSWTFPRASFIPSPRWQSPSNYAPMVVPHGLVQVPSWNSYPGQLQSPGAQQTYGSSQQGEASAGNQGMLSPYRSSSFPVPQYALQRDNVFPERPDEPECQYYMKTGDCKFGAVCKFHHPRVRSQPPPDCVLSPMGLPIRPGEELCKFYSRYGICKFGANCKFDHPTMAAPMGVYAYGFSGSASVAPASTNAPMTRHLLGSPSGSGYMS

SEQ ID NO: 224858 - protein, 209 aa, Zea Mays; identical to SEQ ID NO: 224854

SEQ ID NO: 224859 - protein, 335 aa, Zea Mays
MAHTVMNPLLTLLEVYKNHSTVVYMILKFVVDFVDGQAVFLDAKETSALVSFCLQLLQIYSSHNIGKVMLSLSSSLRNESQAEKYKDLRALLRLLTNICSKDLVGFLSDCGGEGSPDIAEVIYIGLDIVTPLISLDLLKYPKLSRDYFVLISHLLELYPEKVAHLNSDAFTRIIGSLDFGLRNQDSDVVERCLAAVNALASYNFKERLGGRGRLNSQLMESEGSNGKLQESISSHFLRLLLQILLFEDFRSELAGYAADALLPLLFCEQELYQRLVHELLDKQQNPTVKSRLATAFHNLTSSNNLSSSLDRPNRQRFRKNLLSFMADVSGFMQIK

SEQ ID NO: 224860 - protein, 443 aa, Zea Mays
MEHASSPDGYVQSKVSAVAARLLKRGWVEFSDQEKAAIFFEVEQSIRGIHGPNRQFAAINFLETLVSEFSPSTASAMSLPKEFHEQCEYSLEVQFLKILSWNFKHTVEHESSDAKINFGLRIDTINLKKFERSLVKPGSMWREILISSGHPTWVLNFYTTLRQKYSYDTLWGDSPIAVSCRQLIVQLCSLAGSVFPNDNGDAQIKHLMLILSAVVLWIEPPDVITASIRNGGSESEFIDGCHALLSIASLTTGSLFDNLLKSIRPYGTVNLLSALTSEAVKSVLNNQSEEETWGIDSLDILLETWNVLLGDVDADKNPISTDGALASSSLFKMIVESHLKAAADSAFEDTDDTEYFHVSVSKRDEQLALYALIARASANTTIPFLAQLFSERFARLNQVFLLSCNLPELLRKEKLLSYTASVALYILLFCGGVFLQLTFNRFF

SEQ ID NO: 224861 - protein, 1136 aa, Zea Mays
MQGFPGGAPDPQQLQATMLAIEQACSLIQLHMNPSEAEKVITSLHSSLMPYQVCRFILETSQKPNARFQAAGAIGDAAVREWGVLTDDNKRSLIIYCLNYVMEHASSPDGYVQSKVSAVAARLLKRGWVEFSDQEKAAIFFEVEQSIRGIHGPNRQFAAINFLETLVSEFSPSTASAMSLPKEFHEQCEYSLEVQFLKDFYCWAQAAVFNTADKILNSTVTIPDERACSAALRLMFQILSWNFKHTVEHESSDAKINFGLRIDTINLKKFERSLVKPGSMWREILISSGHPTWVLNFYTTLRQKYSYDTLWGDSPIAVSCRQLIVQLCSLAGSVFPNDNGDAQIKHLMLILSAVVLWIEPPDVITASIRNGGSERPYGTVNLLSALTSEAVKSVLNNQSEEETWGIDSLDILLETWNVLLGDVDADKNPISTDGALASSSLFKMIVESHLKAAADSAFEDTDDTEYFHVSVSKRDEQLALYALIARASANTTIPFLAQLFSERFARLNQRNGESDPTQTLEELYWLLLVTSHVLTDSGEGETLLIPEALQAGFPNVIEAAHHPVVTLSWSIINFSRQCLDPGIRAKYFSPRLMEAVIWFLARWVATYLVPLDVSRGKVSREIDNVGTNGSQHSRKLLNSFAWENNQGELVLDFVVLISMLALTTYQGENELQTLTCQKLLATVVRRKHTCTYLVQLDSWRDLTRAFASGRSLLSLSGRLQRSLAETLASAASCIKDPEASAQYLRDLMGPVAGCLVENASRSDLKSVAQQADVIYMVCCLLERLRGAARATQPRTQKVLFEMAHTVMNPLLTLLEVYKNHSTVVYMILKFVVDFVDGQAVFLDAKETSALVSFCLQLLQIYSSHNIGKVMLSLSSSLRNESQAEKYKDLRALLRLLTNICSKDLVGFLSDCGGEGSPDIAEVIYIGLDIVTPLISLDLLKYPKLSRDYFVLISHLLELYPEKVAHLNSDAFTRIIGSLDFGLRNQDSDVVERCLAAVNALASYNFKERLGGRGRLNSQLMESEGSNGKLQESISSHFLRLLLQILLFEDFRSELAGYAADALLPLLFCEQELYQRLVHELLDKQQNPTVKSRLATAFHNLTSSNNLSSSLDRPNRQRFRKNLLSFMADVSGFMQIK

SEQ ID NO: 224862 - protein, 666 aa, Zea Mays
MQGFPGGAPDPQQLQATMLAIEQACSLIQLHMNPSEAEKVITSLHSSLMPYQVCRFILETSQKPNARFQAAGAIGDAAVREWGVLTDDNKRSLIIYCLNYVMEHASSPDGYVQSKVSAVAARLLKRGWVEFSDQEKAAIFFEVEQSIRGIHGPNRQFAAINFLETLVSEFSPSTASAMSLPKEFHEQCEYSLEVQFLKDFYCWAQAAVFNTADKILNSTVTIPDERACSAALRLMFQILSWNFKHTVEHESSDAKINFGLRIDTINLKKFERSLVKPGSMWREILISSGHPTWVLNFYTTLRQKYSYDTLWGDSPIAVSCRQLIVQLCSLAGSVFPNDNGDAQIKHLMLILSAVVLWIEPPDVITASIRNGGSESEFIDGCHALLSIASLTTGSLFDNLLKSIRPYGTVNLLSALTSEAVKSVLNNQSEEETWGIDSLDILLETWNVLLGDVDADKNPISTDGALASSSLFKMIVESHLKAAADSAFEDTDDTEYFHVSVSKRDEQLALYALIARASANTTIPFLAQLFSERFARLNQRNGESDPTQTLEELYWLLLVTSHVLTDSGEGETLLIPEALQAGFPNVIEAAHHPVVTLSWSIINFSRQCLDPGIRAKYFSPRLMEAVIWFLARWVATYLVPLDVSRGKVSREIDNLLLPIREKMSCRH

SEQ ID NO: 224863 - protein, 333 aa, Zea Mays
MCMHVDGRMTSSGTIDGLQSPPNCCEMDRGQNGRDDVFGRRDPFSGFGFGPHRSLFSGLLGGRDPFDDPFFTHPFGGRMMGDHDMFVPSPFGPMGGPFGDMRNGGFIEQAPPRGNRRRPVITEVEEDGGENAEHGNQQPNQDPYVQEPDDGIDEGGQVELHRDLSRANSGGQPQARTFTYQSSSVTFGGINGAYYTTSKSRRTGSDGITVEESKEADTTTKEATHRISRGIHDKGHSLTRKLNSDGKVDTTQTLHNLNEDELAGFEQSWKGNAGHYLPDWNHNAGAPNSDNSGDRSSNGRDRRSASGWALPGTEQGRDPRRNGKPKSRVIPIS

SEQ ID NO: 224864 - protein, 130 aa, Zea Mays
MDGDREGAAAVHHHARSPEDVFRDFRARRAGIVKALTTDVEKFYQQCDPEKENLCLYGLPNETWEVTLPAEEVPPELPEPALGINFARDGMVEKDWLSLVAVHSDAWLLSVAFYFGARFGFDKDASIWIS

SEQ ID NO: 224865 - protein, 1206 aa, Zea Mays
MATAAAMADDDDFASPPLAPRAREEGGGRGVYQVGGVPVEFPYKPYGTQLAFMGRVIATLDRARRQGRSHALLESPTGTGKSLSLLCSALAWQRHYPLRSPPAPDPLLHGGGFVPDDTQPQPTPVVPEKAVKKKNAPIIYYATRTHAQISQVVREYRKTSYRVRMAILASRKHYCVNKFACASDNIDEKCKSLLDKTVQGCPEFKNAQKLSRHPSLQIGGCYEVHDIEDLVRVGQKAKGCPYFAAQHMAEAAQLVFCPYNYLISPVVRRAMDIDISGSIIILDEAHNIEDIARDAGSIDIDEESLCLLQGELQNLAANEAVAMIYQPLHDIIQALIGWIAEREDNLHNHEFGHPASYWTGEKAMNELQRAGISPMYFPVLQECATKAIKAASDTESDGSHLSGGSAMTLESLFSSLSYFFAQKGRNSCDYQLALQRFVKKEGKDVISSTCTMSLWCLNPAVVFQEIADRTLSVILTSGTLSPMGSFTSELGVQFEACMEAPHVINADSQVFAAVLSSGPTRQILNASYKTADNSSFQDELGASLEEICRIVPGGALVFFPSYKLMDKLQVRWSQTGQWARLNAQKHVFVDTNIDSTWIRNDVQVKLKRRYNDSYKSSKHLLSGSEWYCHQAFRALNQAAGRCIRHKSDYGGIILIDERYQDDRNVLYISKWLRNAIKKYDSFQETMAKLQKFFQNAQEKIKIKDCGIFPKVKLDNEAPQSFSDDKRKLPWPELSSSNHSVSRCNQKVKTECLSQRIPDIDGVAVNQKVVGMCYTSPEVSKISVLVKKENSSSPESFSTVCPLHPCKIRSDSEGVANTGANYGVKTEIIKLEEDDFKPRYAEITILNPLEDRSRQPTLVEGTSAATPVASPSNYAEVNTSVNINNGDQIADMSISPFSTNRNLSSLSTLAATPERTTDKDCHDSFINRSVNSHYEKKRRLSSPMSCTYTTQSSPPSKSFCHTGSVMPGDLNRNSELCCKNIGLSRCENVKFERNYSPEEVSAKKSMQKKLLINCIRCKTALGLEEDGFLVTCTQYYSSKLYLAYLLKHGLSTFGILEDDFSASTPTEVHVVQCEASSLNKNVFGKFSSQGHVWFAKDGCVYNAMTCSLCSSENTSAMVLGVQVLATDRSNQQLVEKVLLFSDRLDVQSEPSKGQISRTRRDASNICQQSVIDLDSFAYKPLKKDPVALNSRRSKLRLPAPNKSTTGT

SEQ ID NO: 224866 - protein, 74 aa, Zea Mays
MSSAPLSSWHTTRLTPATLATGSVVGWGLGSRRAAALGRCRDPGWVARREKIPGDSGFIWEARINWLGWTLLGP

SEQ ID NO: 224867 - protein, 1025 aa, Zea Mays
MWPQLQLQELIGHYGKGTGYGTEAKISTAVDKWGRNVFEYPQPTFQKLMKEQIMEPFFVFQVFCVALWCLDAYWYYSLFTLFMLFLFESTMAKNRLKTLTELRRVKVDSQIVLTYRCGKWVKVPGTELLPGDIVSIGRSTSGEDRSVPADMLLLAGSAIVNEAILTGESTPQWKVSIAGRGPDDMLSIRRDKNHILFGGTKVLQHTADKSVNLRSPDGGCLAFVLRTGFETSQGKLMRTILFSTERVTANNKESGLFILFLLFFAIIASGYVLVKGLEDPTRSRYKLLLSCSLIITSVIPPELPMELSIAVNTSLIALARHGIFCTEPFRIPFAGKVDICCFDKTGTLTSDDMEFQGIVTSEGDDLISDANKLPLRTQEVLSSCHALVFVDNKLVGDPLEKAAIKGIDWIYTSDEKAMSKKPGGQPVQIVHRYHFASHLKRMSVIVRIQQKFYAFIKGAPETIQEKLVDLPAAYVETYKKYTRQGSRVLALAYKLLPEMPVSEVRSLERDQVESDLTFAGFAVFNCPIRSDSGAVLQELGQSSHDLVMITGDQALTACHVASQVHISSKPVLILTRIKTGGFEWVSPDETDRAPYSAVEVAVLSESHDLCINGDCFEMLQSTEAVLQVIPYVKVFSRVAPEQKELVLTTFKSVGRVTLMCGDGTNDVGALKQAHVGVALLNAEPVQKVDSKSKAENKSGKLKNKKPANEASSQVTPVANSSGKASSSLSLTAAERQREKLQKMLDEMNDESDGRSAPIVKLGDASMASPFTAKHASVTPTLDIIRQGRSTLVTTLQMFKILGLNCLATAYVLSVMYLDGVKLGDVQATISGVFTAAFFLFISNARPLQTLSAERPQPNIFCAYVLLSILGQFAMHIFFLITAVNEASKHMPEECIEPDSDFHPNLVNTVSYMVNMMIQVATFAVNYMGHPFNQSISENKPFKYALYGAVAFFTVITSDMFRGLNDYMKLEPLPEGMRGKLMLWAILMFCGCYGWERLLRWVFPGKIPAWEKRQKQAVASLEKKHH

SEQ ID NO: 224868 - protein, 233 aa, Zea Mays
MLVVCYFISYEQVQAVVKKYDILFIADEVITAFGRLGTMFGCDYYNIKPDLVSLAKALSNAYVPIGATLVSPEISEVIHSQSNKLGSFAHGFTYSGHPVACAVAIEALKLYRERDIPGHVKQIAPKFQDGIRALADSPIIGEIRGLGMIMGTEFTNNKSPADLFPAEWGVGAIFGEECQKRGMLVRVAGDAIMMSPTLIMTPGEVDELVSIYGEALRATEERVSDLKMKSEKN

SEQ ID NO: 224869 - protein, 347 aa, Zea Mays
MVAGSPIMVKLVWYYNNALGRPDKKKFIARSKAYHGSTLISASLTGLPALHQKFDLPAPFVLHTDCPHYWRYHLPGETEEEFATRLATNLENLILKEGPETIAAFIAEPVMGAGGVIPPPKTYFDKVQAVVKKYDILFIADEVITAFGRLGTMFGCDYYNIKPDLVSLAKALSNAYVPIGATLVSPEISEVIHSQSNKLGSFAHGFTYSGHPVACAVAIEALKLYRERDIPGHVKQIAPKFQDGIRALADSPIIGEIRGLGMIMGTEFTNNKSPADLFPAEWGVGAIFGEECQKRGMLVRVAGDAIMMSPTLIMTPGEVDELVSIYGEALRATEERVSDLKMKSEKN

SEQ ID NO: 224870 - protein, 311 aa, Zea Mays
MGVDAYRMSIAWPRLIPDGRGAVNPKGLEYYNNLIDELLSYGIQPHVTIYHFDFPQALQDEYSGLISPRFIEDFTAYADVCFSNFGDRVKYWSTVNEPNVETIGGYDQGILPPRRCSFPFGFGCEEGNSTTEPYVAAHHLLLAHASAVSLYRDRYQAAQGGRIGLTLLGWWYEPGTQTPDDVAAAARMNDFHIGWFMHPMVFGDYPPVMRRNVGSRLPTFTDEEAARVRGSFDFVGFNHYIVVYVKADLGRLDDQVRDYMGDAAVNAVSQVTQPVPVRRLDERLHDVHPLGSQENAEASPGDIQEPCSHDP

SEQ ID NO: 224871 - protein, 440 aa, Zea Mays
MSFRSMVRDIRESFGNISRRNFEVRIHHRGKSLGSSGDLQDRPAEVQQSRWASLPPELLCDVMKRLEEDDSSWPDRKDVVSCASVCTTWRDMCKDIVRSPEHCAKLTFPVSLKQPGPRDGVIQCFIKRDKSKLTYRLYLSLSSGVLDENGKFLLAAKRSRRMAHTEYAIFMDSRNFSRSSTGYIGKLRSNFLGTKFIIYDTQAPYNGGRVCTQERAPSRRLSSRKVSPRVPSGSYPVAQVNYELNVLGTRGPRRMQCAMHSIPASAVEPGGVVPGQPKELLPRLFDESFRSTATSSFSKYSVADSSMDLGSCPFSEVEVGGGSLREGDESEKERPLVLRNKAPRWHEQLQCWCLNFRGRVTVASVKNFQLIAPAKTQPQPQASGPPPPPPPSSSSYHDPVILQFGKVGRDMFTMDYRYPLSAFQAFAICLTSFDTKLACE

SEQ ID NO: 224872 - protein, 666 aa, Zea Mays
MRRRNLIVHSDSDEDDGEGMTTATTPASVSASVASGGVSGSGSVGRPSPQNLSPLPVPFPSLSLSSAPFVISDDDEDVDEIVDPDGDSPIVDAPEVFSPPAPPALHAPAPAPPSPPPPITTPSQTPIPTPPSARTPTPTPPSARTPTPTPPSARTPASIAPPHPSPLSGRLRPVDEFLRRLGLLLRPDWLESCAAGIPGFDGLGGVEAQARRCFEQFLFADMNSCGAGVLPEGVGGMHAEFLDGPFVLQVDEVVNISVPLKERYREAPAGPKRCLKLSMTDGIRHIFGMEYRPIKDLTVLAPAGLKIIVRNVHTRRGLLMLVPEAVEILGGVVDELEAARARLVSEVNKPPRGKSKQGGLSLSSRATRAAWPCSTDITNGVAQGISMQRAVNSSYPTGSGNAFQVGGATETVVEELVSPLVANRVQEINMQGSYASLTRETTETSMHTTHEYDPTHITEKSTGTVMEERPDPPILANSVHEQMQRVQPANGAQSSNVGKINQMEQSFILSGENEKPFTYIYSMLIDWGRQQDTKAYIQGKIKGLITSVKKFQYKQRTKYELYVYIDDGSFISEAFIDSDVTAALAGELEFASPSEVKETLKGFQKFLVKFEGMMLIELNKNSPVPVVRELNEGCSSSTAWLLLGRLKTISSQKKTIQTQDIMDTTP

SEQ ID NO: 224873 - protein, 643 aa, Zea Mays
MLDQVTPVVKEMFSSMESSSSAQAAAAAAAWPEDLPERRTLPPVLCRTTSHHPSDGDEVAMHTGRCKVEAPAPGHETDEGVCTREEDGQTSSREPLSAPIPTAEFLPLQPTLSSVSPHLLSAPPPSPMPVVGLSMLLQSWEATQDGHATAAAVVPPAGVAQPAEAAPTAHKDTTPVGTSMEVEGSTSSVLLEAGQPEPCVDSPNGSTQAPAQGGNAAVPNVPPPPPPVPAHRGRSQEGPSMDEPGPAVTDTPPRPPCEMQGEPPALPPAAAKVLPSPSPSPSPPPLPAHRGRFQEGASMDEPGQAVTDTPPRPPCEVQGGPPAPPPAAAKVSPAPPPPPGSISAAVRGKKAASKLKRSTQMGSLYRRLRDRVEGSGSTHGDRMRQNRKRPRTVGASKSDAGGQGMADALAEMAKRSTYFRQIEEDAEKYAAVILELKDAIGSFQSKDMSELVRFRQHVERQLVCLTDETQVLARFEGFPSKKLEALRTAAALYSKLDGTASRLQCWKHTAGPVSAQLDRLESYFNKVKDEVDMVERNRDEEMKRLQSQGVHFDFGVLVRIKEGMVDLSSACMELALKESQDARETPTPTRAKWASSHGDGESRMLWRVFQLAFRVYNFAGGQDERADRLTSILAHEIEERALL

SEQ ID NO: 224874 - protein, 343 aa, Zea Mays
MARSPPPPPPSPAQGNGNGSGSGSLTARDALAYIKAVKDNFQEKRHTYEQFLQVMRDFKSNRLDSAGLIARVKTLFHGYPDLVLGINAFLPKGHAIRPQDLSEDKEPVDYPRAINLVNRIKIRFQQEEHVYKSFLGILSMYRMDNKPIQDVYDEVTLLFHGHPDLLEEFTHFLPDTPIPPPEAGTTSKVRNDDKNAITHSAMRAQTVQSERALPSAADSDSSVDRLDLEHDIQKECIEKDKVRNACHDQHRGDYKRNRMNDEYENEDLDAEQSGPKSQRKVEGTGDDTPGVVTMSSFNCNEGDNDPEEESKVRNDNKNAIMHSAMRAQTVQSDLFLHLPLNFK

SEQ ID NO: 224875 - protein, 320 aa, Zea Mays
MPNSPKRFQVCHSLGGGTGSGMGTLLISKIREEYPDRMMLTFSVFPSPKVSDTVVEPYNATLSVHQLVENADECMVLDNEALYDICFRTLKLTNPSFGDLNHLISATMSGVTCCLRFPGQLNSDLRKLAVNLIPFPRLHFFMVGFAPLTSRGSQQYRALTVPELTQQMWDAKNMMCAADPRHGRYLTASAMFRGKMSTKEVDEQMINVQNKNSSYFVEWIPNNVKSSVCDIPPVGLSMSSTFVGNSTSIQEMFRRVSEQFTAMFRRKAFLHWYTSEGMDEMEFTEAESNMNDLVAEYQQYQDATAEEYDEEEQDGEEEHA

SEQ ID NO: 224876 - protein, 359 aa, Zea Mays
MPRDLRPAGMRLFGVTIAPVPEANPPGRNPSPNPPVAAREDVMRKCKSMGNLAALGAGLDGGGGCADGGVAGDGYLSDGGLMQSCGKRRRAQERKKAVPWTEEEHRTFLAGLEKLGKGDWRGIAKKFVTTRTPTQVASHAQKYFLRQTNPNKKRRSSLFDMMPRELSPTPNCPVLPPSMAKVHDVVAMTKQLQNSNLEGASSSNAANVVSQVGRDLPPVPSFKATNIDSSFSKFSHMERYWRTPYPSRPIPRAPEGTSSSTPVAASTAVPASEANLTAYTSTFLSQRADTPSLPPKGDPPPSEDDDLELTVAPPSQQNMTNMSSQNALDHQPHVFLPPPNTQQLRRTTTHYAQSTVKQS

SEQ ID NO: 224877 - protein, 334 aa, Zea Mays
MPRDLRPAGMRLFGVTIAPVPEANPPGRNPSPNPPVAAREDVMRKCKSMGNLAALGAGLDGGGGCADGGVAGDGYLSDGGLMQSCGKRRRAQERKKAVPWTEEEHRTFLAGLEKLGKGDWRGIAKKFVTTRTPTQVASHAQKYFLRQTNPNKKRRSSLFDMMPRELSPTPNCPVLPPSMAKVHDVVAMTKQLQNSNLEGASSSNAANVVSQVGRDLPPVPSFKATNIDSSFSKFSHMERYWRTPYPSRPIPRAPEGTSSSTPVAASTAVPASEANLTAYTSTFLSQRADTPSLPPKGDPPPSEDDDLELTVAPPSQQNMTNMSSQNAWDSFMLC

SEQ ID NO: 224878 - protein, 199 aa, Zea Mays
MMPRELSPTPNCPVLPPSMAKVHDVVAMTKQLQNSNLEGASSSNAANVVSQVGRDLPPVPSFKATNIDSSFSKFSHMERYWRTPYPSRPIPRAPEGTSSSTPVAASTAVPASEANLTAYTSTFLSQRADTPSLPPKGDPPPSEDDDLELTVAPPSQQNMTNMSSQNALDHQPHVFLPPPNTQQLRRTTTHYAQSTVKQS

SEQ ID NO: 224879 - protein, 548 aa, Zea Mays
MKFKFHGISIDLLYASVSLLVVPADLDISQGSVLYDVDEATVRSLNGCRVADQIIRLVPNFENFRTALRCLKYWAKRRGVYSNVTGFLGGVNWALLVARVCQLYPNAVPSMLVSRFFRVFTQWQWPNPVMLCSIEEEELGFPVWDPRKNPRDRCHHMPIITPAYPCMNSSYNVSTSTLRVMLEQFQFGNRICQEIEMNKTSWPALFEPFQFFEAYKNYLQVDIIAEDDEDLRLWKGWVESRLRQLTLKIERDTYGMLQCHPYPHEYADPSRQCAHCAFFMGLSRKEGVKIQEGQQFDIRGTVDEFRHEINMYMFWKPGMELAVSHVRRKQVPAYVFPEGYKRPRPSRHVNHQSDKNDTEDGTATRSPDSQLKRKHDSVGTDDIRYAKRSSTSPVHPKNSPQSGSTGDETRCNNQIKRAPSDASGGSPASPQASERSPDTILSAPRCTTTGAVCSGDAISKHSSVPLVENCTTPTVAVCTTLKRVAEKVVSELVGSERLGSNNSAELLESMEKEDVLAENVRFGGNGVAQGGLPEELEIRNYGGFYDDG

SEQ ID NO: 224880 - protein, 445 aa, Zea Mays
MSNYYDDYDDIDGMEDDYDMDDPIDDMVDEQQGIRDSDVEDNDYGQPNDKIPDTSSADARKGRDIQGIPWEQINITRKKYRQSRLEQYKNYENVPNSGEEAMKDCKPTEKGGIYYEFRRNTRSVKSTILHFQLRNLVWATSKHDIYLVSHYSIRHWSALSGVDTELINVQGHVAPREHAGSLLEGFYQTQVSTLTVKDNLLVAGGFQGELICKHLDQEGISFCCRTTYDDNAITNAVEIFNTSSGAVHFMASNNDSGVRYYDMERFQLFKHFQFEWPVNHASLSPDRKVVVIVGDDPDGLLIDANSGKTVHSIKGHRDYSFASAWSPDGRTFATGNQDKTCRIWDVRNLSKSVHVLRGNLGAIRSIRFTSDGQFMSMAEPADFVHIYDVKSDYNKRQELDFFGEISGTSFSPDTDTLFVGVWDRMYGSLLQFGRLYNYSYLDSLF

SEQ ID NO: 224881 - protein, 164 aa, Zea Mays
MIGSAAWCCSSSLPPRRRLCFWRRRRRMLRCRGCSTRPPRPTGRSPSSSSATGAAVVGQKLDIDFVISTGDNIYDDGIANTSDPLFKESFSNIYTANSLQKPWYLVLGNHDYTGNALAQLDPAIRKVDSRYTAIAKSFIVNSGQQMIIWNLKVCKHFKRYIYLF

SEQ ID NO: 224882 - protein, 405 aa, Zea Mays
MEAMDTEPSSPAPAAAVNLPPPPYHHCPAPADEVAATPQPKPKQSTAGPGLRTPSPPPSVQVSGYSLHDLLLLSPPPPSSRRHRSSTRGAAGTSVDESLEIVAVAGTPTPPRRRRRGGAEQCVTPVLASPRNARRARRRLEKDVEAVEDAGRRARRRKSTRAAPKAAAAADKAEAALNEEDITMAVVPACPAATCGLWERIVELVMWRNMAKSALWFGFGSMFFSCSLSRDVTFSPISALCHLGVMILGLAFFKDSVPQRPQVENERRFRLTEEDMLRASQAVLPFANSMISTAQVIFSGEPSMTLKVLPLLLFGAKYGGLVTVWRLLAAGFFISFTVPKLYSCYSSRIHKRVEILRDQALEAWKSCPRKKLVAAIIVTMFWNMFSVKTRVMAGLHDQNVIGVAL

SEQ ID NO: 224883 - protein, 400 aa, Zea Mays
MPPPVEPYIPSFTAGLSAHEAADADKDYLYFLRHVRLDGDAYTVVIPSKDGASCPPQIIRYEQPHSDHNAGAPVAGSECGRQRAHPPSEENSWATGEAAPHGVKRKVPGASPAGEVRSGAVRMEEDTPTLVAKSAWYDLQPDIDDDYRFFLQNARVVNDKLVFKTGNCSITIGDHSDAEEHDDTEEEEKEEEGEGEEDDEEEADDLPASGQSGEDGIGMEEAGPVSETEDGVDSDLPIPKVKDEVVSKNEEDDVGPGSDLHITNDQVYCETEKVKEGGGNTLNDLARRTTDLDPLDKKEASSSKGHLAMPLNPSELQGVIWPPHINERPNSVFKEKLIEFLIKPFTQEEYDRYFALASDRIPMVKERRTRNTVAYYHWTHEMSKSYFDRYPGALPCRSKK

SEQ ID NO: 224884 - protein, 539 aa, Zea Mays
MAGLAATLPSPAAGASPLLLHCNAAPSVSFRHRRRWQRPAATRHDGRVAQLLLPVARRWLPAAAPPGVNGARGGIAASGSGAGAVAGEAPYRGNEGQGSLWMVFLATAVVVCGSFEFGTCVGYSAPAQAGIVSDIGLSNSEYGVFGSVLTIGAMIGAVTSGSLADILGRKMTMRFAAVVGIFGWLTVYFAKDAMMLYAGRVLLGYCTGVLSYVVPVYISEIAPKGIRGGLATSNQLFICSGCSAAYIIGALVSWRCLVVVGLIPCAVLLVGLFFIPESPRWLANIGKEREFHASLQEFRGEDSDISEEATEIKDYIKSVRRLPKAKIQDLFQRKNMYAVTVGVGLMIFQQLGGINALGFYTSYIFSSAGFSGKLGTTLIGVIQIPITFFGALLMDRSGRRALLLVSSSGTFLGCFLTGLSFYFKAQGLCTQLVPTLALCGILVYYAAYSVGMGPVPWVIMSEIFSIDMKAIAGGFVTLASWIGSFAISYSFNFLMDWNPAGTFFLFSAASLVTVLFVAKLVPETKGRTLEEIQTLLKAT

SEQ ID NO: 224885 - protein, 157 aa, Zea Mays
MATTAFLPPAKLPLQGRRFASPKTAGRISVRVPPARAQQEQQVKEEEAEVASVPPPQDAEKQARKGDAQSLPRQPLAESKNMSREYGGQWLSSTTRHVRIYAAYIDPVTNAFDQTQMDKLTLMLDPQDEFAWTDEACQMVFNEFQDLVDHYELSSFL

SEQ ID NO: 224886 - protein, 607 aa, Zea Mays
MSSAAAVDEMELDGIERHRDKERRERHRREEKDHNGSGRRDREKEKDDRRRDKDDGKHRDRDRDRERDRDKDSKYRDRDKEPERERNRDRDRGKDREREPDRQRDKDRSKDRDKEAERDKERERRDRDKERSRNRDKDKDRTQREDRDHEKSRVKGRGEDEADLSKGDKGVQKQRVDASGDAEQPAADELRERIARAKEERLKEKKEGGILDGNDGASEILSWVGKSRKLDEKRQAEKEKALRLARALEEQDNILAENGDDDDDDKEEDTQVGDHLSGVKVLHGLDKVLEGGAVVMTLKDQSILANGDINEDADMLENIEIGEQKQRDEAYKASKKKGTYDDKFNNDSSSKKSILSHYDDQMEDEGVTLDEGGRFTGEAEKKLEELRKRIEGGYVQKKTEDLTSTTKISTDYFTPDEMLKFKKPKKKKSLRKKEKLDLDALEAEAIASGLGAADRGSRNDGKRQSAREEEQAADAEKRSSGYQTAIAKAEEASRALRGEKTAPAKPAEELVFGDDYEDLQKSLEQARKLALRKQEEASASGPRSIVELATATKSQEETEATEGDSEQNKEHASQKTMCLWMKMMMPCLQIMLQKMTLMGWQRWKRML

SEQ ID NO: 224887 - protein, 415 aa, Zea Mays
MGGCGLGRGRRTACLLLLLPPLLLFAVADAAASGKEKQGVSGKLRFRRESGTFKVVQVADMHYADGRSTACEDVLPSQVAGCTDLNTTAFLYRVFRAEDPDLVVFTGDNIYGADSTDAAKSMDAAIAPAIDMKLPWAAVIGNHDQEGTLSREGVMRHLVGMKNTLASFNPEGIEIDGYGNYNLEVSGVEGTSMDEKSVLNLYFLDSGDYSTVPSINGYGWIKASQQVWFQQTSSSLQAKYMNKNPKQKEPAPGLVFFHIPLPEFSSFTASNFTGVKQEGISSASINSGFFASMVEAGDVRAAFVGHDHINDFCGKLSGIQLCYAGGFGYHAYGKAGWSRRARVLSVQLEKTDSGEWRGVKSIKTWKRLDDKHLSTIDSEVLWNRGSNGKTLSYAWIRYLTQTCHSNCRVGGGFGE

SEQ ID NO: 224888 - protein, 104 aa, Zea Mays
MSADASLASSTNNGFSTNGPGSVRRCSLICSSIQACMPTPNRTIAGLLQLGRHHLLQDSLAVVSAIGVHIRVQLGVEQPAAGRGWMDRRMHAWIEQRGVQIARL

SEQ ID NO: 224889 - protein, 793 aa, Zea Mays
MTFGVFICIKCSGAHRSLGVHISKVVSVKLDEWADEQVDILADSGGNAAVNMIYEAFVPENYAKPRQDCSAEERNDFIRRKYEAQQFLTNPQLSCPPRRNEKHNHQQHSTSSSRHGLGHSFRNSWRRKEHEAKSTKKTIEVGMVEFVGLIKIDIIRGTNLAIRDVMSSDPYVIINLGHQTMKTKVVKSSLNPVWNERLMLSIPDPVPLLKLQVYDKDTFTTDDRMGEAEINIQPLVAAAKAHETSAIADTAQLNKWLAKDGIWIPRDSAISIVNGKVKQVVNARLQNVERGQLEMELDHLNRCKYLLGMTILCCILAMDAAALESLILDLHAIEVVKLGSFTLKSGIKSPIYLDLRALVSHPRLLSAVASLLHALPATRPYGLVCGVPYTALPIAAVLSVDRSIPMLMRRKEVKAHGTAKSIEGSFSPGDTVLIIEDLVTSGASVLETAAPLRAEGLVVADAVVVVDREQGGRENLAANGITLHSLMTLTEVLAVLLKHGKVTEEKAQEVRQFLDANRKVAVPGAAPVTPRVLRKTFSERANLATNPMGKKLFELMETKQTNLCVAADVGTTKELLELADKVGPQICMLKTHVDILSDFTPDFGSKLRSIAEKHNFLIFEDRKFADIGNTVTMQYEGGIFRILDWADIVNAHIVPGPGIVDGLKLKGLPKGRGLLLLAEMSSAGNLAHGDYTAAAVKIAEQHSDFVMGFISVNPESWSVKPSSPAFIHATPGVQMVAGGDDLGQQYNTPESVINYRGSDIIIVGRGIIKASDPMKKAWEYRLQGWQAYKNSLL

SEQ ID NO: 224890 - protein, 582 aa, Zea Mays
MELISVLEQKQKTVGRTKVLLDTVPVYRLADIFVASFEISFEEQLSMLDSVHLKVRLSKATELVDRHLQSILVAEKITQKVEGQLSKSQKEFLLRQQMRAIKEELGDNDDDEDDVAALERKMQNAGMPANIWKHAQREMRRLRKMQPQQPGYSSSRAYLELLADLPWQKVSEERELDLRVAKESLDQDHYGLTKVKQRIIEYLAVRKLKPDARGPVLCFVGPPGVGKTSLASSIAKALNRKFIRISLGGVKDEADIRGHRRTYIGSMPGRLIDGLKAMVKLVIERYTREAGVRNLERNLAALARAAAVKVAEQVKTLRLGKEIQPITTTLLDSRLADGGEVEMEVIPMEHDISNTYENPSPMIVDEAMLEKVLGPPRFDDREAADRVASPGVSVGLVWTSVGGEVQFVEATAMVGKGDLHLTGQLGDVIKESAQLALTWVRARAADLNLSPTSDINLLESRDIHIHFPAGAVPKDGPSAGVTLVTALVSLFSNRKVRADTAMTGEMTLRGLVLPVGGVKDKVLAAHRYGIKRVILPERNLKDLSEVPLPILSDMEILLVKRIEEVLDHAFEGRCPLRSRSKL

SEQ ID NO: 224891 - protein, 194 aa, Zea Mays
MVMLQMRHRCIEGRNFVLNMRNRSFLQIESHCRQQQIRCQSPLSTQLIERFNGRLPGYIGDGYDRESFCHVDDVVNGHIAAMEKGRVGQRYLLTGENMSFVLIFNMVANITNTRAPMFHVPLWLIEAYGWISVFVSRITGKLPLISYPTVRVLRHQWAYSCDKAKMELGYTPRNLTEGLSEMLLWLKEEKLIKF

SEQ ID NO: 224892 - protein, 161 aa, Zea Mays
MGEAADRERPPWRCTVAVQAALCLALYAAFSLGEPQLIPRGGVDALGRGARGGGVAFLSVAGGARGPIDQERLLRQMETTAKLYEVKFVLDVTQLGADDPLWQNGSMYFQALNIPWYSTSSHGRTVGNFLKKVKMPYDQVLDIIGLGTWPLQDKHFLQGTN

SEQ ID NO: 224893 - protein, 222 aa, Zea Mays
MKPVKTEEPVADLLPKELNDMTISDDKADDHNDKEGEGVTLDGNGAETGQIIVTTIGGHNGKPKQKVSYMAERVVGTGSFGIVFQAKCLETGETVAIKKVLQDKRYKNRELQTMQLLDHPNVVQLKHHFFSTTQRGEVYLNLVLEFVSETVYRVAKYYNRMNQRVPILYVKLYAYQMCRALAYIHRVVGVCHRDIKPQNLLVNPHTHQLKICDFGSAKKLGS

SEQ ID NO: 224894 - protein, 159 aa, Zea Mays
MRWLSRLLSQAVAARRASAAARSNTSLVKGGSHGFASGGRDGSPEVPREWLRKLWVDELKKQKEAARRWGVGSSLEVAGATEEAPSRSYQYEYSGSNPVEAKLAPLLARANLVIARDIEWANIMFAFEQESRYIIMDPLFPQSPVGFIREKSNIIFRQK

SEQ ID NO: 224895 - protein, 191 aa, Zea Mays
MRWLSRLLSQAVAARRASAAARSNTSLVKGGSHGFASGGRDGSPEVPREWLRKLWVDELKKQKEAARRWGVGSSLEVAGATEEAPSRSYQYEYSGSNPVEAKLAPLLARANLVIARDIEWANIMFAFEQESRYIIMDPLFPQSPVGFIREKSNIIFRQLLRTRRPFVAEITDAMGSPAILVDQQLNLCRSE

SEQ ID NO: 224896 - protein, 118 aa, Zea Mays
MTMSASTAAIRTANTNGNHASVAYDRSSAPKDFQVRGWYQGPHDDSEKDSNVMSTLGEFSYDLDKSNAQTFQLERTAQSRVVNMVQLDISSNHGNLELTCIYRFRVHGRKPVSPSTGG

SEQ ID NO: 224897 - protein, 194 aa, Zea Mays
MHLQDSVAAMARQYVRSVISAVQRVSMAISPSQSGLNAGHRMLSGFPEAATLARWVCQSYHYHLGMELLNQSDGAGEALLKMLWHHPDAVLCCSFKEKPMFTFANKAGLDMLETSLVALQDLTLDKIFDESGRKALFSDISKLMEQGYAYLPSGVCMSGMGRHVSFDQAVAWKVLGEDSNIHCLAFCFVNWSFV

SEQ ID NO: 224898 - protein, 194 aa, Zea Mays; identical to SEQ ID NO: 224897

SEQ ID NO: 224899 - protein, 59 aa, Zea Mays
MIYSRMSEDGEVNANHLLLGIWSDDESAGHKILYSLGFDDVKASLLAKTADEEAAMSPR

SEQ ID NO: 224900 - protein, 139 aa, Zea Mays
MAELEARKMRYPTTGTEGLLMGILVEGTSGAAKLLRANGITLLKVREEAANVLGKSEMFYFSPMHPPLTEAAQRALDWAVNEKLKSGEDGEVNANHLLLGIWSDDESAGHKILYSLGFDDVKASLLAKTADEEAAMSPR

SEQ ID NO: 224901 - protein, 264 aa, Zea Mays
MAKALLYSSLLPGLPRAVGSSRSAAARLLLLPPLRLRRGRRAASACAVRAGLHGLDSVGGPHLQAALERAEAALYTLADAAVAAADAAAGAGDDAGQAAAAVQKNGGWFGFISEALEVVLKVLKDGLSAVHVPYSYGFAIILLTIIVKAATLPLTKKQVESTMAMQNLQPQLKAIQQRYAGNQERIQLETARLYRQAGVNPLAGCFPTLATIPVWIGLYQALSNVANEKDFSGFHHWVVLQQLQLGKVVLGFRGSSHLWMAILR

SEQ ID NO: 224902 - protein, 167 aa, Zea Mays
MQGWHAHRLLTNGTYGDNILKDKDTMPLPNRDKNLSFGVLKRKKASSPEYALKSSRSKTNKSQEDSMVVDVGEPADWVKINVRQTKDCFEVYALVPGLLREEVHVQSDPAGRLVITGDPEQPDNPWGITPFKKVVNLPSRIDPHQTSAVVTLHGQLFVRAPFGHPDM

SEQ ID NO: 224903 - protein, 308 aa, Zea Mays
MAIRMPALIFRRRAAAAAPKPIQQYLAGLSTAVEHVIPEDNGHIAGGEENKKRWVELPPFAPLDANATARAISRGDGGEGACSNATAIRWVRHCCPHVPASLVQKLFRLRKVKKNLVTADTSSTDSITLQLRLRRVVLQDGRSERLTVCAGSNTASVQDALTEYRVIESFPQGYTWLELFPRTGRKHQLRVHCAEVLGTPIVGDYKYGRQAHQNWMPLPMPQTIDKEMLKKRKLPFGLTLGGGSVAEQQPQLHLHCKQMILPDISAAMQQLRSSDADHDFSDLEKLSFVAPLPLHMQLSWKILLSVGK

SEQ ID NO: 224904 - protein, 672 aa, Zea Mays
MLLTYEAMAEAAKFATVWVPFCRKHGIEPRGPESYFDLKSHPYMGRSQEDFVNDRRRVRKDYDEFKARINGLDHDIKQRSDAYNAARGLKDGEPRATWMADGTQWEGTWVEPSENHRKGDHAGIVLVLLNHPSHSRQLGPPASADNPLDLSMVDVRLPMLVYVSREKRPGHNHQKKAGAMNALTRCSAVLSNSPFILNLDCDHYINNSQALRAGICFMLGRDSDTVAFVQFPQRFEGVDPTDLYANHNRIFFDGTLRALDGMQGPIYVGTGCLFRRITLYGFLPMPKKSYGKSDAFADTIPMASHPSPFAAASAASVVADEATIAEAVAVCAAAYEKKTGWGSDIGWVYGTVTEDVVTGYRMHIKGWRSRYCSIYPHAFIGTAPINLTERLFQVLRWSTGSLEIFFSRNNPLFGSTFLHPLQRVAYINITTYPFTAIFLIFYTTVPALSFVTGHFIVQRPTTMFYVYLAIVLGTLLILAVLEVKWAGVTVFEWFRNGQFWMTASCSAYLAAVCQVLVKVVFRRDISFKLTSKQPAGDEKKDPYADLYVVRWTWLMVTPIIIILVNIIGSAVAFAKVLDGEWTHWLKVAGGVFFNFWVLFHLYPFAKGILGRHGKTPVVVLVWWAFTFVITAVLYINIPHIHGPGGKHGGAIGRHGGDAHHHGKKFDGYYLWP

SEQ ID NO: 224905 - protein, 171 aa, Zea Mays
MGRGKIEIKRIENSTNRQVTFSKRRNGILKKAREISVLCDAEVGVVVFSSAGKLYDYCSPKTSLSKILEKYQTNSGKILWGEKHKSLSAEIDRIKKENDTMQIELRHLKGEDLNSLQPKDLIMIEEALDNGLTNLNEKLMEHWERRVTNTKMMEDENKLLAFKLTYSFQRP

SEQ ID NO: 224906 - protein, 130 aa, Zea Mays
MFVAARATLPRLPHHPSLLVLPAVAGDRDHGTHVVVLALLAMLLLQGVILMSTVEGLVWIMQEAPQVPHQEDQANWLEGSYQKCSGGLLISLESGNSLTFQLDKRGYKSPEDYPGTWNLMSQASCALDHL

SEQ ID NO: 224907 - protein, 89 aa, Zea Mays
MLLLQGVILMSTVEGLVWIMQEAPQVPHQEDQANWLEGSYQKCSGGLLISLESGNSLTFQLDKRGYKSPEDYPGTWNLMSQASCALDHL

SEQ ID NO: 224908 - protein, 214 aa, Zea Mays
MSVERIQESVVGREAAMSTVESSGSALSRQRPETVTSGPRGWLLCGLSSPCPISASPSSPTQNQKHRESSPGHRRLGECCRRPFSRSLPDALLTFMSCSAVASDGIALHFPTPSRAGPSAEEEVSARAGCSLSVPTGVLGERGAGSQAPRHAPGQNQVAMLKFTGFKLLNNISDSGKAFLMILVSDILLGLLFQDVQSFMYFRTETCRHQKREA

SEQ ID NO: 224909 - protein, 107 aa, Zea Mays
MCFNQSKVAMLKFTGYKVLNNISDSGKAFLIILVSDILLGYHSESGWHTLVEVILEHYGLEADEAAVTFFVCLVPVAFDVYIKYWVYKYLPRLSPSVGNVLDEIKRH

SEQ ID NO: 224910 - protein, 255 aa, Zea Mays
MLKKNKSIRILQFSNNAIEYSGFASIAEALLENNTIRSLYLNGNYGGPLGACSLAQGILGNKSLREIHLHGNGIGNEGIRELMSALSAHKGKITVVDIGNNNISPEGLHPVAEFLKRTKSLQWFSLYMNDISDEGAEKVAEALKDNKTISTIDLGGNNIHSKAVSAVAETLKDNAVLTTLDLSYNPIGSDGVKALCDVLKFHGKIQTLKLGWCQAWKVQSVLPTVSSTTQRYRHWICGQTGLETMVLYAWREVSR

SEQ ID NO: 224911 - protein, 380 aa, Zea Mays
MTGKRLHIRTTNVHTTATLRPCSCRLHNLCKCMHAWIWIHAWPQPTAHRGGEGEAAPRGTASTLSSMLACKASPSRPCVVPLVCLLVVAAAVVVVAASAPPAEAAFDDNYVAQWGRDGYHLVVRGTEANVTMDQSSGAGFRSKSTYGSGFFHMRMKLPSGYTAGVVTTFYVSPTTDIYVLLHLISQPEDGSRDEVDLEFLGDKAGVPITLQTNVFVDGRGDREQRTRLWFDPAADFHDYKILWNPYQLVMFVDDTPVRVLRNLTGAVPGYPFPGKQTMLIRASVWDGSDWATDGGRTKVDWSRGPFTAGYRGFDVDGCANNGSDACQSPDLWWNAAEYRNITAEQRAAYEDVKRSYMNYDYCADKARFNSTTVPIECNYA

SEQ ID NO: 224912 - protein, 286 aa, Zea Mays
MPQIQNTMRQNCTLLAVLCGEFAEKRQTPASLAPDTKRLRLSYPFPELASSGRLEVHTLINPTLEQFREAQQAVHPVFLYLQGQQQENEEEIGTLVWGDTDLSDPQMFVSLITPPFPTMVYLEVPTGEKLAQSLHSKGIPYVVYWRNLFSSYTASHFRHALMSVIQSSCSHTWDAFQLAHASFRLYCVRNNHVQSVKLGPCLLGDAPKTNVIPAGDEVNEEQGCSEGFPDIRIYDEDVSMKFLLCGVPCTLDACLLGALEDGLNALLNIEIRASKLQNRARPIFGI

SEQ ID NO: 224913 - protein, 503 aa, Zea Mays
MVFQKRSSSELEASGGGQVAEMPRVPKSARGKRSVRKKEAQNPPQMSAFDLLATVAGKLLDEGVGSLGNMSAGAPALTACAKDVRVKKEQCDEEMKQFKHEVTDQDSCNESAILPHIVFQRAVNNARNEDPKAKSEAQDKESSMISCTKAELGCNFGVIADRWSPESVESGAFTGDAVASLMPPAPAGFHKNAPEMYNLLDSMDVDVKPPPLVSSDSTGEMPLYGDKVHRSTSLPRVSKGVGFFAVDRDDDDDKSSGCTHPSTTTNKDFRSNCTAEYSRVRKLLTSKYRKVAPARVYKSDLSYSDVDRKPSFRNKKMHYTRQRTQRSTFKRRKLFDRHSVLASEFGTAHGKGNTKKVTGRDSHAVSLEANKGTSSTPFQKSRGSNDCHVKLKIKSFKVPELLVEIPESATVGSLKKTVLEAVTAILGGGLRVGVLHHGKKVRDDNKTLIQAGIGQEDMLDNLGFSLEPNCTQNPQVQAPEDISFLETIDTAEPLARLVNFVSD

SEQ ID NO: 224914 - protein, 639 aa, Zea Mays
MVFQKRSSSELEASGGGQVAEMPRVPKSARGKRSVRKKEAQNPPQMSAFDLLATVAGKLLDEGVGSLGNMSAGAPALTACAKDVRVKKEQCDEEMKQFKHEVTDQDSCNESAILPHIVFQRAVNNARNEDPKAKSEAQDKESSMISCTKAELGCNFGVIADRWSPESVESGAFTGDAVASLMPPAPAGFHKNAPEMYNLLDSMDVDVKPPPLVSSDSTGEMPLYGDKVHRSTSLPRVSKGVGFFAVDRDDDDDKSSGCTHPSTTTNKDFRSNCTAEYSRVRKLLTSKYRKVAPARVYKSDLSYSDVDRKPSFRNKKMHYTRQRTQRSTFKRRKLFDRHSVLASEFGTAHGKGNTKKVTGRDSHAVSLEANKGTSSTPFQKSRGSNDCHVKLKIKSFKVPELLVEIPESATVGSLKKTVLEAVTAILGGGLRVGVLHHGKKVRDDNKTLIQAGIGQEDMLDNLGFSLEPNCTQNPQVQAPEDISFLETIDTAEPLARIAPADSSSKHGEVDLSQEFALTPLAMNYQGSDHDSVHSPGGVSSPDKVSTNSRALVPVPAADPNAGAIVPANKSKRSPEQGQRRIRRPFSVAEVEALVLAVEKLGTGRWRDVKLRAFDNAKHRTYVDLKVRTVKCLTLTSTKD

SEQ ID NO: 224915 - protein, 103 aa, Zea Mays
MWAVHALIHHLTPDSDANPLPCRRLSLTRFSTSLTSATLRAPTVPRRIGLGGRGLVEVSRDSVGPWRSLWDRASTVAALAGTTFAFTTTSSPRPFRQVENLVS

SEQ ID NO: 224916 - protein, 265 aa, Zea Mays
MRTPGFSGADLANLLNEAAILAGRRGRTAISSKEIDDSIDRIVAGMEGTVMTDGKSKSLVAYHEVGHAICGTLTPGHDPVQKVTLIPRGQARGLTWFIPMDDPTLISRQQLFARIVGGLGGRAAEEVIFGEPEVTTGAAGDLQQITGLAKQMVVTFGMSEIGPWSLMEGGAQSGDVIMRMMARNSMSEKLAEDIDSAVKQLSDEAYEIALRHIRNNREAIDKIVEVLIEKETLAGDEFRAILSEFVEIPVENRVPPATPAAALPA

SEQ ID NO: 224917 - protein, 221 aa, Zea Mays
MQRRENNIQSFEKLRLVRRNLEQAKALMDALIKREETKREAMECQVNLQRVQMKYKHEAQLVEDGTTLSGFQQTSSRFESSDDDVDSDDTATEQTYIRPAVFHPRFSANKLSVIPPLRIKRERELKRRPQQNGCVFKRDPEEPVFLFTRPLDPEKLVAAGIKPPPDPPIENGATSPPFRCRGRIGRGGRIIFDRWNPLLRTPIDQETYYVPYGHRPPSPEG

SEQ ID NO: 224918 - protein, 543 aa, Zea Mays
MHFLIARCLTAFPDEYKSLVPKVLTETMSELNSSFVSRINIATGDVIPETRSIAKGILDVLSGDLPKSTKLQNKHLQALIELHNMTGTFARNIQYLFSESDLAVVLNTLKAIYSPYETFKARYGQMERAILSAEMTSIDIRGAVPRGVGAQGIELSETVRRMEESIPEMIVLLEAAVERCISLTGGSEADELVLALDDVMLQYISNLQETLKSLRIICGLDSDALKKDAGLEKKEVQRLVDVSEEEEWSIVQGALQILTVADCLTSRTSVFEASLRATLARIGTNFSVSGFGSSLDKSPAATADENADLSFAGRAALDIAAIRLSDLPDKSKKFLTVLEQSKDPRFHALPLTSQRVAAFSDTVNELVYDVLISKVRQRLSEVARLPIWSSVEEQGGLPLPSFSAYPQAYVTSVGEYLLTLPQQLEPLAEGISGNEAGNDEAQFFATEWIFKVAEGATALFMEQLRGIHYITDRGSQQLAADIEYLNNVLSALSMPIPPFLSTFHACVSTPRDQVRDLIKSDGASQLDLPTTHLVCKIRRITLD

SEQ ID NO: 224919 - protein, 271 aa, Zea Mays
MLLWNGVLWDTRQPNFVHQFDQFTDYCGGGFHPAGNEVILNSEVWDLRKFKLLRSVPSLDQTVIKFNGTGDVIYAILRRNLDDVTSSINARRVRHPLFPAFRTIDAVTYSDIATVQIDRCVLDLATEPNDSLIGVVAMDDHQELFSSARLFEVGRKRITDDDSDPEDAGETDDDDDDDGDSDDDVLLAPVLEGDTDSEEISSSSDDGDEDGGDDDIPSSDDIEDDPEYIDGGGDFEGGGGLMDILGDDEGEGDESDMMESFSSGDEEGWIM

SEQ ID NO: 224920 - protein, 540 aa, Zea Mays
MQKLYYFHQQYRWATVLIQCCWRQKLAKRALRNLKHAAYETGALREAKGKLEKSLEDLTLRFTLERRQRLAAEESKALEISKLLKILESVKSELEASNEENKNSCKKISSLQHQLDLSSKDQEAQQNILSQIEEVKRENILLQAKNTEMEQELLKAQKCSHDNMDKLHDVEKNYVHLRDNLKNLEDKISNLEDENHLLRQKALNLSPRHSRTGSYHCGSSPCSPKSFVESSPVKLAPPPHNQTESRRSRMNSDRYEDYHDVLHRCIKDDMGFKKGKPVAACIIYKCLLYWGVFEAERTTIFDFIIHTINTTLKAENENDILPYWLANTSALLCMLQRNLRSKGFIMAASRSSSDTHLSEKANETFRTPLRAFGQQTSMSHIDARYPAMLFKQQLTASLEKIFGLIRDNLKKEISPLLSLCIQAPKLARGGSGRRSRSPDVALQQPISTHWDRIVKFLDSLMDRLHKNFVPSFFTRKLVTQVFSFINVQLFNSMLLRRECCTFSNGEYVKSGLCVLEKWIVDTEEVQLGMSCSSLGKRLTF

SEQ ID NO: 224921 - protein, 414 aa, Zea Mays
MNSDRYEDYHDVLHRCIKDDMGFKKGKPVAACIIYKCLLYWGVFEAERTTIFDFIIHTINTTLKAENENDILPYWLANTSALLCMLQRNLRSKGFIMAASRSSSDTHLSEKANETFRTPLRAFGQQTSMSHIDARYPAMLFKQQLTASLEKIFGLIRDNLKKEISPLLSLCIQAPKLARGGSGRRSRSPDVALQQPISTHWDRIVKFLDSLMDRLHKNFVPSFFTRKLVTQVFSFINVQLFNSMLLRRECCTFSNGEYVKSGLCVLEKWIVDTEEHAGAAWDELQFIRQAVDFLIIPQKSKKTIEQIKKNICPALSVRQIYRLCTMYWDDKYGTHSVSAEVVARMRDMVSNDMQNPVSNSFLLDDDLSIPFTTEEIAEQVPDVDMSNIETPASLRHVHSAQFLTQHLQPPYTSR

SEQ ID NO: 224922 - protein, 405 aa, Zea Mays
MWRGTRMYSLLGVLLLLALAYLNWHPGHGPSAGGPGGFKLPMPWLQPRMSFVGRAGTHFVDTLTGAPIYINGWNSYWLLSARSPSLSVEMLRRGRRMGLTICRTWAFSDGGPGALQISPGRFSEPVFQAQYVQWAQAAGVNVTNSTDSFFFHPTIKGYYMEYVKAILTRRNTYSGIKYCDEPAIFAWELMNEPRCVSNSSGPYIQSWIEEMAAYIKSLDRKHLITVGTEGFYGPGRGERLGVNPGDWAASVCSDFIQNSAVKDIDFASVHAYPDSWLPKASMEEKVKYLSVWVDSHLNDSEYVLRKPVLFTEVGYLQHAEANSTVDGDILLKVVYDKLYDSAKKLQAGSGALIWQLMVEGTQMYHDDFSMVARDRPSTYKLMKEQSCRLQSLYGKEGDPTWKCSP

SEQ ID NO: 224923 - protein, 328 aa, Zea Mays
MWRGTRMYSLLGVLLLLALAYLNWHPGHGPSAGGPGGFKLPMPWLQPRMSFVGRAGTHFVDTLTGAPIYINGWNSYWLLSARSPSLSVEMLRRGRRMGLTICRTWAFSDGGPGALQISPGRFSEPVFQSWIEEMAAYIKSLDRKHLITVGTEGFYGPGRGERLGVNPGDWAASVCSDFIQNSAVKDIDFASVHAYPDSWLPKASMEEKVKYLSVWVDSHLNDSEYVLRKPVLFTEVGYLQHAEANSTVDGDILLKVVYDKLYDSAKKLQAGSGALIWQLMVEGTQMYHDDFSMVARDRPSTYKLMKEQSCRLQSLYGKEGDPTWKCSP

SEQ ID NO: 224924 - protein, 139 aa, Zea Mays
MLKFLSKVVVEYCPLDPRKAAAVELLAQCNGRKAKDSNPACSVELRRLPSPAPSTDLKSQPTLPPPRVLVTYFTGAEEAIVFAEGATAQGIRDQIVARGRLIDTEKMFRDGGEKWPVVIPEEELGMSFPGIKDSRALEG

SEQ ID NO: 224925 - protein, 186 aa, Zea Mays
MSFLASPPLSLKAAGGISIPCPWRLDGRRPRAAPASVPRLASVGHIWRTGFECQEIKGVVFDDVPPALERWHASGIKTYIYSSGSREAQRLIFGNTTYGDLRRHLCGFFDATIGTKRDARSYYEIWQTVGVDRPSQILFLTDVCQEATAAQAAGLEVLISIRPGNAPLPAENHGFGTVESFAEILT

SEQ ID NO: 224926 - protein, 295 aa, Zea Mays
MGMALPLPPASQGLLRSRRMSFLASPPLSLKAAGGISIPCPWRLDGRRPRAAPASVPRLASVRSVVLDIEGTTSPISFVTDVLFPYARDNVRTHLDATYSTRETKDDIALLRAQVEQDLAEGVPGAVPVPPDGAGKDRVVDALVANVEAMIAADRKITSLKQLQGHIWRTGFECQEIKGVVFDDVPPALERWHASGIKSQTYIYSSGSREAQRLIFGNTTYGDLRRHLCGFFDATIGTKRDARSYYEIWQTVGVDRPSQILFLTDVCQEATAAQAAGDHLTPRFASLKKNATPRR

SEQ ID NO: 224927 - protein, 385 aa, Zea Mays
MASAVILLVMQWLSGGLVLILCIVKRGEFSRQVVTKLGSSFSTVAFVIVVATCTILAMVATVPLAQLLCFHVLLVKKGISTYDYIIALREHEEQQEVPGHQSPQMSIVSSVTGFSTASSFGPLHRGSWCTPPRLFLEDQFDAIPPEIGISRNSGSKKTKEEEGARRKAGAVKISPWTLARLNAEEVSKAAAEARKKSKILKPVGKHGAPENSSKPDHLPSYKRRLDRRGFPAELSLDPLATLSASGTESNYSDAATEICGSLAPLQLEARSAFQPSTAASTRNVASSPESSFDSPNLHPFRTSSATADEMQGAMMHTAHRGIEFKRSSSDGYEASGGEDSDRIPSRIVHRSSNWASVFLHSGQGDPPADLLTTSAEGFVANDSGS

SEQ ID NO: 224928 - protein, 63 aa, Zea Mays
MQFFTKPKNYKVILQPLYLLGLLPLNMSNIPSFSITALVNRVLSHLVLVFFWFSLGGRFLACS

SEQ ID NO: 224929 - protein, 1143 aa, Zea Mays
MMGSSTIEQIERSTSCEHSEPSGRKGMGGETLYSPGDYRNSTSIGKKNTSVDHQHIVGGINFLLKEVESRSNNTSTKVTKDTEHFVAPSISCASGVQSLQLVNPAGRQIGSGLMSQNNAVSHVKKISKTNLCSLVAAYDDQSDTYSFDIFQQIDTKVSCEGMVLLVSLLCSCIRSVKKPELRRASLILLKFSSTYIDDDRRLQLVLPYVIAMLSDPSAIVRCAALETLCDVLCLVQDFPISDTVIFPEYVLPMLSLLPDDTEESVRVCYASNIHKLALTAYRFLLRSRSIANIRPLDESLVAHRSQSADSPAKRQDIFFRQLAELRKSIYEIVQDLVMGQKQTPNTRRALLQDIGYLCYFFGHKQSNDFLLPILPAFLNDHDEQLRAVFFAQIVYVCYFIGARSVEEYLLPYLEQALSDGMEAILVNALDCLTMMCKSGYLRKRVIVGLLVKVLPLLRYTINWVKQSAVRFVAACSESLGSVDTYVYLSPQLRQFLHREPPSLDSETALLSCLKPPLPKSMFYVPLEDAQDIGNILLKSSGKKEQILHGGRYSGMAQSGSLGNLEDIRRLKGTNISSSVSLDVKDSFSFGKSLYSGFALHASAANSSFYDGLSKGIPSYSFCIDNRGLGETHMVPDSSVYKASIRLPWLEPNRPGMQTRDDHFSSKRRDLSINDSLKSNSSLQGDSISNSDTGGLPFSRSAVNLETGWKPRGILVAHLQEHRFSVNDIAVSNDNTFFVTASDDSSVKIWDTRKLEKDIAFRSRLTYSVGNSRALCTAMVHGTSQVIVGGSNGTLHLFSVDCARSVGSVVERYAGIVGVKRNDIKEGAILSVVNCSPDSFSPTVLFSTEHCGIHKWDTRTNSEFWYFKSSPEEGYISALVVGQCGNWFISGSSRGVLTLWDNRFLLPVNSWNYSIVSPIEKLCLLIPPPSSISSAGRPLVFVAAGCNEVSLWNAENGSCHQMFRTASTDNEAVMSKAPSRPVNKPIIKDIIRARNYKYRIDELNDPPVRRPGIRSLLPLPGGDLLTGGTDLKIRYWDQARPEQSFCIAGPSAKKVRSAKADILEKAAGNDECYDIRSSFGVQVVQEMYKQNTTVSGLTPKTQFAEAAADSAGCHRDAILALASFNLSSQRLISASRDGAVKVWK

SEQ ID NO: 224930 - protein, 725 aa, Zea Mays
MKFSYVISCQKFGEQKIKGDPHAQDIIDLMMRCPALRVAYIEEKEVIVNNCSHMVEGKEVIVNNCPHKVYSSVLIKAENNLDQEIYRIKLPGPPIIGEGKPENQNHAIIFTRGDALQTIDMNQDNYLEEAYKMRNVLQEFVRHPRDKAPTILGLREHIFTGSVSSLAGFMSYQETSFVTIGQRFLAEPLRVRFHYGHPDIFDRIFHLTRGGISKASKTINLSEDVFAGYNSILRRGNIIYSEYIQVGKGRDVGLNQISKFEAKVANGNSEQTISRDIHRLGRRFDFFRMLSCYFTTVGFYFNSLISVVGVYVFLYGQLYLVLSGLQRALLLEAQTQNIKSLETALASQSFLQLGLLTGLPMVMELGLEKGFRAALSDFILMQLQLASVFFTFSLGTKAHYYGRTILHGGAKYRPTGRKFVVFHASFTENYQLYSRSHFVKGFELIFLLIVYHIFRRSYVSNVVHVMITYSTWFMAVAWLFTPFLFNPAGFAWQKIVDDWADWNRWMKNQGGIGVQPEKSWESWWNSENAHLRYSVLSSRILEVLLSLRFFIYQYGLVYHLNISQDNKNFLVYLLSWVVIIAIIGFVKLVNCASRRLSTKHQLVFRLIKLLTFLSVVTSLVLLYCLCRLSIMDLIICCLAFIPTGWGLLLIVQVLRPKIEYYAVWEPIQVIAHAYDYGMGSLLFFPIAVLAWMPVISAIQTRVLFNRAFSRQLQIQPFIAGKTKRR

SEQ ID NO: 224931 - protein, 1635 aa, Zea Mays
MGVPTHPSLWWEEAHAKISKNDRSRFNGVMSYELYGVLSGAESQKNKNGASDHSTWRNYDDLNEFFWSADCFKLGWPMRLNNDFFFTSSATKDSQVLCGSRLSKVPHGLENCASCVPLVSLHTSQQNEQLNSQLPPESSSTENYLNSEAAEQRQQQAMSSSSQQRWLGKTNFVEVRSFWHLFRSFDRMWTLLVLGLQVLIIMAWHGLESPTQLLDPIIFEDILSIFITNAVLRVIQVILDIAFSWRTKGTMRVDQILRFTIKLSLVVAWAIILPVFYANSQNYKACSTKRSKTFLGMFCLSKYMVVVALYLASNVVGMALFFVPAVTNYIETSTWRICNVLSWWCQPQLYVGRGMQEGLVSILKYTTFWTILLSCKFLFSYYFEIKPLVGPTKEIMKINVNRYEWHEFFPQVKSNAGAILAVWAPIILVYFMDTQIWYSVFCTIFGGMCGIIHHLGEIRTMGMVRSRFYSLPEAFSMSLCPPATPIQRKGMFFSFLEKRIFKKLGKDERYYPRKFALVWNNIISSFRSEDLISNREMELMTMPMTPMHNSGSICWPLFLLAKKFSEAVDMAANFTGKSAQLFWMIKKDHYMFCSINEFYELTKNIFRFLIIGETERRVVAAIFDEIDKSIQNSSLVIDFRMNHLPSLFQKFDQLAELLFINEQKHRHEVTILLQDIVDIVVQDMIVDPQSILNVVNSSKRLISDDDGAFSYYEPELFASVSSRTSIRYPYFDQQKEQVKRFYLLLSTKEKAAEIPSNLEARRRISFFATSLFMHMPAAPKVRSMLSFSVITPYFMEEVKFSDEELHSNQDEASTLSYMQKIYPDQWKNFLERVDTKVTNDEIRYWASYRGQTLSRTVRGMMYYRKALKLQALLDMTNDQDLYEALLAIEQGKNKRNIHQALAAELEALADMKFSYVISCQKFGEQKIKGDPHAQDIIDLMMRCPALRVAYIEEKEVIVNNCSHMVEGKEVIVNNCPHKVYSSVLIKAENNLDQEIYRIKLPGPPIIGEGKPENQNHAIIFTRGDALQTIDMNQDNYLEEAYKMRNVLQEFVRHPRDKAPTILGLREHIFTGSVSSLAGFMSYQETSFVTIGQRFLAEPLRVRFHYGHPDIFDRIFHLTRGGISKASKTINLSEDVFAGYNSILRRGNIIYSEYIQVGKGRDVGLNQISKFEAKVANGNSEQTISRDIHRLGRRFDFFRMLSCYFTTVGFYFNSLISVVGVYVFLYGQLYLVLSGLQRALLLEAQTQNIKSLETALASQSFLQLGLLTGLPMVMELGLEKGFRAALSDFILMQLQLASVFFTFSLGTKAHYYGRTILHGGAKYRPTGRKFVVFHASFTENYQLYSRSHFVKGFELIFLLIVYHIFRRSYVSNVVHVMITYSTWFMAVAWLFTPFLFNPAGFAWQKIVDDWADWNRWMKNQGGIGVQPEKSWESWWNSENAHLRYSVLSSRILEVLLSLRFFIYQYGLVYHLNISQDNKNFLVYLLSWVVIIAIIGFVKLVNCASRRLSTKHQLVFRLIKLLTFLSVVTSLVLLYCLCRLSIMDLIICCLAFIPTGWGLLLIVQVLRPKIEYYAVWEPIQVIAHAYDYGMGSLLFFPIAVLAWMPVISAIQTRVLFNRAFSRQLQIQPFIAGKTKRR

SEQ ID NO: 224932 - protein, 165 aa, Zea Mays
MQGKLPQAPGELPTLNDWENHLTTIFPEVRLKRYLEMRGADGGPWRRLCALPAFWVGLLYDEESLQSILDMTFDWTKEEREMLRRKVPSTGLKTPFRDGYVRDLAEEVLKLAKNGLERRGYKEVGFLREVDEVVRTGVTPAERLLNLYETKWQRNVDHVFEHLLY

SEQ ID NO: 224933 - protein, 320 aa, Zea Mays
MGIGFLGLGFQPKWALSDIPIMPKGRYEIMRNYMPKVGTLGLDMMFRTCTVQVNLDFSSEQDMIRKFRAGLALQPIATAIFANSPFKEGKPNGFLSLRSHIWTDTDNNRAGMLPFVFDDSFGFEQYVDYALEVPMYFVYRNKKYIDCTGMSFRDFMQGKLPQAPGELPTLNDWENHLTTIFPEVRLKRYLEMRGADGGPWRRLCALPAFWVGLLYDEESLQSILDMTFDWTKEEREMLRRKVPSTGLKTPFRDGYVRDLAEEVLKLAKNGLERRGYKEVGFLREVDEVVRTGVTPAERLLNLYETKWQRNVDHVFEHLLY

SEQ ID NO: 224934 - protein, 176 aa, Zea Mays
MSEVFEGYERQYCEASASLSRKCTAASALDGEKKKQKLSEIQSGVEEAESLIRKMDLEARNLQPSIKAGLLAKLREYKSDLNNVKSELKRISAPNARQATREELLESGMADTLAVSTDQRGRLMMTTERLNQSTDRIKESRRTMLETEELGVSILQDLHQQRQSLLHAHTTVAKLQ

SEQ ID NO: 224935 - protein, 333 aa, Zea Mays
MPRRISAPLRVAVAYQNEIKLLGQSLYYLLTTGSGQQTLGEEYCDISQVATLHGLPPTPARRILFILYQTTVPYLAERISSRIVARSIVLNESQFDDHPESDNSSSDIAQSTTNSDIPSRSLSVSALSGFRGRVHALWQWVLQKWPSMLPYAQDFIQLAIRTNLMFFYFEGLYYHLPKRAAGIRYVFIGKPMNQRPRYQILGIFLLIQLCILGAERLRRSNISSIASSINQISSGGYPSTTGRGIPVLNEDGNIISDIRSGKAADIASHSETSNGKSKCTLCLSIRQNPTATTCGHVFCWNCIMEWCNEKPECPLCRTPITHSSLICIYHSDF

SEQ ID NO: 224936 - protein, 101 aa, Zea Mays
MEAVAAAASLPECGSTGGLLISGSRSASLQLPPPTLAQEGVRVQRGARGEPHKNWPVDTLSLDLARFGMVDEAVSYLVRSVCVLEIDGDVGSVEWYQVQLD

SEQ ID NO: 224937 - protein, 143 aa, Zea Mays
MKNAYAVSRLRKKTGYTKNQFYDQALKIYKEVNTLMAHGDTSSLRKILTERMHSTIKNELKRRQSMWNSVHWELVEPAVSIRTLRARMIGLDKNDLDKAFIQLTLEFVTKQKFEAYNSKGAVVSGDKSKEGALGPLATVAVTG

SEQ ID NO: 224938 - protein, 2631 aa, Zea Mays
MATPSYAAVKCLNTSSSSRKRFSFKSFSQRVEEIDIDVYRSLHTLKAEPSSGSSFFLDAIVEWRELNTAEDFISFYEEMIPLVQTLPQIVLHRDKLFSALLQRVNMSARLSLEPILMLIAAFSRDILEDFLPFLGRHASALLSLLNDGGDRDPEILEQVFTSWSYIMMYLQKYLVKDTVQILRITAALRYFPKDYVREFMAESVSFLLRNAPNNQLTQGLLKVLLEAAKQPSPARIDGVVSLLWHVMKGTSTKLHSKAGQVLKFLLSKSIVSTLRDKFPDDKVKMIKLVELLVSRYVFPGSNITGSSSIEVLGSILDFMLSVLDVPTILGNLSIISPFYAPVFKLKNPRVIVFIKKLLVKGPQVAQHFESQILSAMDNFIVSSPEDVIFILLNFFKGSKKQIFLCSTDGNHLDSVEKTCKFFESKFSLWIELLDDTAGTGNRSSNQVSEKEAAILWGSFFCYPNMKGVHQDSLSLLRKLIINFDRLLEVGEGNMNGLPMTTWRGLLGAALSSYHKLLLVNTSRNSEFSFFLSLAKSHSTCPQVLSAVAEYLDSLQGVSSMEVTKEFDPQNLLELFSIFAFNLSSPTKDVRILTLRILSYFVKMDQRLITDEERPHKRQRTEVSGEEAVAKYANVVDILLIIESMPISVSTSRKIAIFISRIQMSLSSKMVHDDYIPPLLHGIIGILYNRFSDLWPQTLDCLAVLIRKHKELVWGQFVPFIAIHQSKGLTVKNQEKLEAATQPQSIFDCFNLYLAMDFDCTPAVTVATLLLQSLQRIPDVAESRSRQLIPLFLNFMGYDDSSIFSADSYMPEKCKGKQWKAILKEWLNLLRLMHNARSLYQGNFLQEVLTKRVLDDSDPEIQAKALDCLLNWKDEFLIPYSQNLKNLIDVKTLREELTTWAVSHDSLSILKDHRSRVVPLVIRVLAPKVRKLKLLGSRKHTGASHRKAILRFLLQFDSNELELFFSLLLRSLIPGSLQLKMFGSQPDNLLGSFSDIVGTSTEICVENFTWKKANGFIHLVEEIFGTFDMPHISPFLNVLLIIVARLLESCMRNLRNESDGKYPCNQTNDHGNGCSINSEVGNSVNVDECFKEMHLEGHMEQPHSITQTSVSIKQLKDLRSSCIRVVSSALSHYESHEFGENFWGVFFSSVKPLIDCFTQEASSSEKPSSLFACFMAMSRSPKLAPLLGSNNLVPAIFSILTVKTASGSITTYALEFIENLLRLDIDLQQQDEHLVKKVLLQHMDVLIHSLHDFVNHRKELNRRSGTWLGQRELRLFKLLLNYITDPSAADNFIDLILPFFSKKDLNSDDCLEALCVVRGIIQNLRCKVSEKVLNALNPLLAIVGLELRLCICDIYAGLSLNDPSMLFLAGLIGDLNAVSASELGELDYDTRLNTYDKVRPQLFLGLTEEHVGAILSHCVYDMSSEELILRQSASRALQSFLDFSASVMNNDVSKYSIDDKFRENNTRSICTMGCIQKILEKTYLHNMGVAMTKDVSIQKEWIILLREMVSNFNHLASLSSFRPLCKVDIEEDFFHNITHLQAGKRSKALLLFRQGIKENNFSEDITMKVFVPLFFNMFSDVKAGKGEQVRDICLDTLSAVAAKVQWEHYRTILKRCFRELNLRPDKQKIILRLICSILDAFHFMKPANDASGNSDALSEDIDSSLTFSLVTVSSDKQQYMQKVVFPQVQKLLGSDPEKVNVNINLVALKILKLLPVDYFESQLSSIIHRICNFLKNRLESIRDEARSALAASVKELGIGYLQFVVKILRAILKRGFELHVLGYTLHYLLSKNITADMYGRLDYCLEDLLAVVDSDLLGDVAEQKEVEKLASKMKETKKRMSFETLKLIAQSITFKTDLLKKIISPVSLHLQKQLTPKLKTRLEMMLHNIALGIECNSSTETSNLFIFVYCLIEDTITGSRSECKENTQSSPDQDSTVRKTFLGLGESGSQNSYILTKFALDLLRNRLKSIKLDKEDEQLVKMLDPFVDLLRKCMSSKHASVLSATFRCFALLVKLPLPSLRDNAITIKNVLMEILQRAGNSNGHLVTSCFKLLADLLRGFRISLSDNELQMLVHTPMFVDLQTNPSPVALSLLKTIVRLKLVSHEIYDIVVKIGELMVTTLTESIQQQCIQIMLQFFLNYPLSEKRLQQHIDFFLANLSYEHPSGREAVLEMLHDILTRFPQRIIDEQGQTFFLHLVVALANEQHQNVSSMILRAIQKLLGRIGGQGKSYIYEYSLSWYTGEKKSLWSASAQVIGLLVGDHTLQMGKHLKSILAVVKKIMESSIIASGAIQLGLSDEAALPLWKETYYSVAMMERLLLRFPELYFEKNMEDIWIILCKLLIHPHSMLRSISSSLVASYFATVEKRKHEQKLDAPSWLLVQPSRLFIIAVSLLKQLRSELSDTTANNLIVQNVAYSVCNLHMLIRQSTSTHQFWSSISSDRGAFLEGFELLGSRKAKNIFLLCTSTSSDVSGSSLDTNEEPTSLLVSSILKKMGRIAMQMQDTQIKNVFNCFNMISSALGPDESLTYADHLLAPLYKVSEGFAGKVVSDEVKQLAQGVQNKLRDLIGSEKFVEVYKSVRMGLKQKRDGRKQAQKIVAAVDPERNAKRKQRMAAKHREHKRRKIMAMKIGRWMR

SEQ ID NO: 224939 - protein, 657 aa, Zea Mays
MVSNFNHLASLSSFRPLCKVDIEEDFFHNITHLQAGKRSKALLLFRQGIKENNFSEDITMKVFVPLFFNMFSDVKAGKGEQVRDICLDTLSAVAAKVQWEHYRTILKRCFRELNLRPDKQKIILRLICSILDAFHFMKPANDASGNSDALSEDIDSSLTFSLVTVSSDKQQYMQKVVFPQVQKLLGSDPEKVNVNINLVALKILKLLPVDYFESQLSSIIHRICNFLKNRLESIRDEARSALAASVKELGIGYLQFVVKILRAILKRGFELHVLGYTLHYLLSKNITADMYGRLDYCLEDLLAVVDSDLLGDVAEQKEVEKLASKMKETKKRMSFETLKLIAQSITFKTDLLKKIISPVSLHLQKQLTPKLKTRLEMMLHNIALGIECNSSTETSNLFIFVYCLIEDTITGSRSECKENTQSSPDQDSTVRKTFLGLGESGSQNSYILTKFALDLLRNRLKSIKLDKEDEQLVKMLDPFVDLLRKCMSSKHASVLSATFRCFALLVKLPLPSLRDNAITIKNVLMEILQRAGNSNGHLVTSCFKLLADLLRGFRISLSDNELQMLVHTPMFVDLQTNPSPVALSLLKTIVRLKLVSHEIYDIVVKIGELMVTTLTESIQQQCIQIMLQFFLNYPLSEKRLQQHIDFFLANLRKRSSA

SEQ ID NO: 224940 - protein, 170 aa, Zea Mays
MSCFQGLLFCPEAASLLLHNFCIYHISPPGHELGAAPISPNAPIPSVDDLADQVADVLDFFGLGSVMCFGVTAGAYILTLFAAKYRERVLGLILVSPLCKGPTWTEWLYSKVTSNLLYYYGMCGLVKECLLQRYFSKVDKSACLDHGSIIIIGVMDLGWFLSEESLFYPL

SEQ ID NO: 224941 - protein, 687 aa, Zea Mays
MLMVMPKVFYLRNADDDTQGVILEAFELMSDGQIIRSASYHDLLAYCQEFQNLVNAHKDTIGVSDLNRVPPHRENEILIKETIDVHGSRYKESLKPSPTDQLIKTEEREMGDTGLKPYILYLRQNKGFFYASLGIISHIVFVCGQISQNSWMATNVENPDVSTLKLTSVYIAIGIFSVFFLLFRSLAVVVLGVKTSRSLFSQLLNSLFRAPMSFYDSTPLGRILSRVSSDLSIVDLDIPFGFMFSIGAGINAYSNLGVLAVVTWQVLFVSVPMIVLAIRLQRYYLASSKELMRINGTTKSALANHLGESIAGAITIRAFQEEDRFFEKNLELVDKNAGPYFYNFAATEWLIQRLETMSAAVLSFSALIMALLPQGTFNPGFVGMALSYGLSLNISFVFSIQNQCQLASQIISVERVHQYMDIPSEAAEIIEENRPAPDWPQVGRVDLKDLKIRYRQDAPLVLHGITCSFHGGDKIGIVGRTGSGKTTLIGALFRLVEPTGGKIIIDSIDITTIGLHDLRSRLGIIPQDPTLFQGTIRYNLDPLGQFSDQQIWEVLGKCQLLEAVQEKEQGLDSLVVEDGSNWSMGQRQLFCLGRALLRRCRILVLDEATASIDNATDAILQKTIRTEFRDCTVITVAHRIPTVMDCDMVLAMSDGKVVEYDKPTKLVETEGSLFRDLVKEYWSYTSN

SEQ ID NO: 224942 - protein, 578 aa, Zea Mays
MGDTGLKPYILYLRQNKGFFYASLGIISHIVFVCGQISQNSWMATNVENPDVSTLKLTSVYIAIGIFSVFFLLFRSLAVVVLGVKTSRSLFSQLLNSLFRAPMSFYDSTPLGRILSRVSSDLSIVDLDIPFGFMFSIGAGINAYSNLGVLAVVTWQVLFVSVPMIVLAIRLQRYYLASSKELMRINGTTKSALANHLGESIAGAITIRAFQEEDRFFEKNLELVDKNAGPYFYNFAATEWLIQRLETMSAAVLSFSALIMALLPQGTFNPGFVGMALSYGLSLNISFVFSIQNQCQLASQIISVERVHQYMDIPSEAAEIIEENRPAPDWPQVGRVDLKDLKIRYRQDAPLVLHGITCSFHGGDKIGIVGRTGSGKTTLIGALFRLVEPTGGKIIIDSIDITTIGLHDLRSRLGIIPQDPTLFQGTIRYNLDPLGQFSDQQIWEVLGKCQLLEAVQEKEQGLDSLVVEDGSNWSMGQRQLFCLGRALLRRCRILVLDEATASIDNATDAILQKTIRTEFRDCTVITVAHRIPTVMDCDMVLAMSDGKVVEYDKPTKLVETEGSLFRDLVKEYWSYTSN

SEQ ID NO: 224943 - protein, 98 aa, Zea Mays
MVIGVKQADELENILAKKFLRFLSMRAEAFQVLRRKPVQGYDISFLITNYHCEDMHKHKLIDFIVQFMEDIDKEISELKLSVNTRGRLVATEFLKQFL

SEQ ID NO: 224944 - protein, 718 aa, Zea Mays
MKNPDFTADKALAKDFLSNFVGPHGDPKYLNILQDVANRKIRAVQIELDDLFHHKDVDEEFLQRVTENTRRYVGIFAEAMDEIMPEPTEAYTVDEDRDILMTQRVDEGVDGGADGTDPLQRMPPDIKRFFEVYIKTFSKATPLTIRQVKASNIGQLVKISGIVTRCSDVKPLMQVAVYTCEECGFEIYQEVTARVFMPLIECPSQRCKLNKAKGNLILQLRASKFLKFQELQELAEHVPKGHIPRSLTVHLRGELTRKVAPGDVVEMSGIFLPMPYYGFRAMRAGLVADTYLEAMSVTHFKKKYEEYDLKGDEQEQIDRLAEDGDIYSKLARSLAPEIFGHEDVKKALLLLLVGAPHRKLADGMKIRGDLHICMMGDPGVAKSQLLKHIINVAPRGVYTTGRGSSGVGLTAAVQKDPVTNEFVLEGGALVLADMGICAIDEFDKMEESDRTAIHEVMEQQTVSIAKAGITTSLNARTAILAAANPAWGRYDMRRTPAENINLPPALLSRFDLLWLILDRADMETDLEMARHIVHVHQNLESPALGFTPLEPSVLRAYISAARRVIPSVPRELEEYIATAYSSIRQEEAKSNAPTSYTTIRTLLSILRISIALARLRFSETVAQSDVDEALRLMQMSKYSLYSDDRQRSGLDAISDIYSILRDEAARTSSMDVRYAHALNLISRKGYSEAQLKECLEEYASLNVWQIHPSTFDIHFIDA

SEQ ID NO: 224945 - protein, 160 aa, Zea Mays
MAARCPYFAVEESSRGIRSGESPAAALRRILATPGAHQAPCCYDALGARLVERAGFPIGFMGGFCVSAARLGLPDVGLISYGEMVDQGRLINEAVSIPVIGDGDNGYGNSMNIKRTIKGYINAGFAGIMLEDQVAKKTAKRAVSEAKGRAYDDLYRRLST

SEQ ID NO: 224946 - protein, 521 aa, Zea Mays
MLLQLEQECLDVYRRKVDQASSSRSCLLQQLSNSKSELTRLLSALGESSISGAPDKTSGTIKEQLAAISPSLETLRRKKESRVKEFAHVQLQIQILRDEIAGDLHIGEQLETPHVNADDLSVRRLNEYLSELQALQKEKSTRLSRILESVSSVHDLCSVLGMDFVGTVTKVHPSLDDSVGVQSKSISGETISKLSKMVIVLEEEKSKRFAKQPFRHVTCIMSSTLDDVIVPGALALDVIQQAELEVERLDQLKASRMKDIAFKKQTELEDIYARAHVAVDSSAARDRIMSIIESSSFEPSELLADMENQILKANEESLSRKDILERVDRWMSACEEESWLEDYSRDDNRYSATRGAHLNLKRAEKARVLVNKIPAIVDTLLAKTRAWEQEHGVAFTYDGVPLLAMLDEYKILRQEKEDEKRRMRDQKKMNEQLAAEQEKLFGSKPSPARPQSSSRKVAGARTNGGGTPARRLSALQSGGRTASRDGRRDASRPVAPVNYVAIAKEDVASQASSNHTGPSTP

SEQ ID NO: 224947 - protein, 657 aa, Zea Mays
MARALPRARFRAPALLGGGEWSLNPGPFNVKEHVLISIFANAGFAFGNGSAYAVAIIDIIRAFYHRHISFFTAWLLVVTTQVLGYGWAGLLRKYVVQPAHMWWPGTLVQVSLFRALHEKDESAKASRQISRSKFFLVVLACSFAWYAVPGYLFPTLTSISWVCWVFSRSVTAQQLGSGMSGLGLGAFTLDWSTVSSFLFSPLISPFFATANIFFGYVFFVYVIMPAAYWGFDLYSAKTFPIFSSHLFMSNGSSYDVQSIVNNRFELDLDAYGKNGKVSLSVFFALSYGFSFATIAATITHVGLFYGKEIYYRFRSSQKEKPDIHTKLMERYSEIPAWWFYSLMALSIVVSLLLCTVLKREVQLPWWGLIFACGMAFVFTLPISIITATTNQTPGLNVITEYAMGLIMPGSPIAVVCFKVYGYMSMAQAVAFLSDFKLGHYMKIPPKSMFLVQFVGTIVAGTVNIGTAWWLLGSIDGICSDSLPPDSPWTCPNDRVFFDASVIWGLVGPRRIFGPDGNYGALNWFFLIGAAGPVIVYALHRTFPGQRWIPLINLPVLFGATAYMPPATAVNYNSWLLVGTVFNFFVFRYRKKWWTRYNYILSAALDAGVAFMGVVLYFSLTMQNKSIDWWGTAGEHCPLARCPTAKGVDLGDGVCPVF

SEQ ID NO: 224948 - protein, 95 aa, Zea Mays
MEYCQQQWVGSSGELEKDLLPPLSQDIQEYICTKKFTLPETSFQLLGSFGELEDLLSTFQSRHPGKYMYKEIYTTRNFFPVEFQRRLSPAPCSPV

SEQ ID NO: 224949 - protein, 83 aa, Zea Mays
MPPPSASASRLATHWIADALADDESLDFSVLKGWKLRRIGEGFASTFKSRHPGIYMYQEIYTTRNFFPVEFQRRLSPAPCSPV

SEQ ID NO: 224950 - protein, 91 aa, Zea Mays
MADGSSNSSASVAMGQEAFVENKYGGMVPKKPLISKDQERAYFDSADWVLGKQAANSGTARAATAIEFLKPKLKRTPHHQLPPRKPTCASS

SEQ ID NO: 224951 - protein, 464 aa, Zea Mays
MPGKMVQCLKSVGTANPLVLIDEIDKLGKGHSGDPASALLELLDPEQNVNFLDHYLDVPIDLSKVLFVCTANVIEMIPNPLLDRMEIIAIAGYITDEKMHIARDYLEKNTRQACGIKPEQVEVTDTALLALIENYCREAGVRNLQKQIEKIYRKIALQLVRQGVSNEPDHESVSASVTEESGNGDNTTTKDEILKDPAVEDASVTNNVTNPASEEANEENLTSEAAKEDSTSKGNKGTDGAADKAIEKVVVDSSNLGDFVGKPVFQAERIYEHTPVGVVMGLAWTAMGGSTLYIETKKVEEREGKGALVLTGQLGDVMKESAQIAHTVGRAVLLEKEPDNHFFANSKVHLHVPAGSTPKDGPSAGCTMITSMLSLAMGKPVKKDLAMTGEVTLTGRILPIGGVKEKTIAARRSAIKTLIFPAANKRDFDELASNVKEGLEVHFVDTYSEIYDLAFQSDAGTETS

SEQ ID NO: 224952 - protein, 130 aa, Zea Mays
MAQRILGMGDVLSFVEKAQEVMRQEDADELQKKILSAKFNFNDFLKQTQMIAKMGSFSRLIGMIPGMNKVTPAQIREAEKNLKFMESMINVMTLEERERPELLAESRERRKRVAKDSGKTEQQINCSSTI

SEQ ID NO: 224953 - protein, 536 aa, Zea Mays
MSDFVRSRYDKQEDFQVLLSKKDPGEQPQHKDYLWMAHWTKASSAAEPRNNDSNPLEDTNNGTTTKDSETLPYEFMKSTVAERLMVGVRHGSASMQHVRQFKSSMRGMPRLSNELGPKNSEQVDESFEKSLKNDAMNLRTRQVVSETYSIHKLSELPLDFQNLGSSDDPSPDWSHFPMFEINQKIDSIVNRKRRSPPLDLNVSASHVMALSSQEYMMHSHQTADENMDTCKPAEGFASRVEDHAGFNSDPPGPKLKGQLLDTMSCSCSKDDNNSADCPIDEQHTSHYFANSKHELPSVSNKKKFKFAGNNHNRIVASASHDLKTKRSAVHKQQSAAEAVFCAPVLDSEFQNEPITISNIDKKDGENFHDMYKCLGKAVSCPLLPYEHRHLNTQRTESAENLKVCTLPDHQTANKLTEKSHGELLTYGPKSKEMYTGSCNQRRSYFFEKLTIPSKSQSTYPKNSASSGKSSDFGVCMYGTNIGSQLFRAQNQSSAKTETLHSDTLIGSKSPAGIASLSAQKVSVYHNLQQSYLLSCA

SEQ ID NO: 224954 - protein, 411 aa, Zea Mays
MFKLHRHRSSDRVGERFDFRFSNFRAVQVPAISDRLFLSIVSVDNGKTIAKSTKVASRSGICQWPDTILEPIWFSKDQVSKEFQECQYRIIVSLGSAKSGILGEILLNLSNFLNLADPTAISLPLKRCNSGTVLQLKVQCLGTKSKLSGVRSLRDMAPRLDDRSPTPTNDELDNRSDCSDGMFNKGVHSSSENHLGGTYQDESGNMETGFSASGSHRSSNSGDSTADRTNFSPRVNSNGGLFVGRQDSASSYASYVSAGGGDDGLRSNNSSFSSRTSGPNLLQGSTPKTFSNDLSQLSMGASDSSKDFLEAAEETIEELRDEAKMWERHSRKLKADLEMLKKECSEKSKQHAELAVELSAAQAERDSYRHEIEELKSSLQDVNTRQTITGTPKRSDWIDLQKELEGDLEKW

SEQ ID NO: 224955 - protein, 975 aa, Zea Mays
MRTPRTAPRRSQRRRRRKWGREVEEETRWIQRPRRRRGGCRRGQQRAPRKATPGGVTPARTALRSGESGAGKTETAKIAMQYLASLGGGSGIEYEILQTNPILEAFGNAKTLRNDNSSRFGKLIEIHFSTTGRICGAMIQTFLLEKSRVVQCAVGERSYHIFYQLCAGAPASLKEKLNLKKVDGYKYLKQSCCYSIAGVDDAQMFRTVTQAMNIVHISKEDQESVFAMVSAVLWLGDVSFTVIDNENHVEIIVDEASKTVSELLGCSIEDLNLALSKRHMKVNNENIVQKLTLAQATDTRDALAKSVYASLFEWLVEQINKSLSVGKRRTGRSISILDIYGFESFDKNSFEQFCINYANERLQQHFNRHLFKLEQEEYVEDGIDWAKVDFEDNQDCLSLFEKKPLGLLSLLDEESTFPNATDLTFANKLKQHLDSNSCFRGERGKAFAVRHYAGEVAYDTSGFLEKNRDLLHMDSIQLLAKCKTSLPKMFASKMLVQSDNSMSVPYRSSAADSQKLSVAMKFKGQLFQLMQRLESTTPHFIRCIKPNNLQLPAIYEQGLVLQQLKCCGVLEVVRISRSGYPTRMTHQKFARRYGFLLEDVASQDPLSVSVAILHQFNILPEMYQVGYTKLFFRTGQIGNLEDTRNRTLHGILRVQSCFRGHQARHHARERTRGVLTLQSFIRGENARQIYSSLLRKHRAAVVLQRNVRCWLARRYFINVRKASVIIQSGIRGSLVRRCNGNIDLINVLREFESKQEAHGDQILIKASVLAELQRRILKAEATVREKDEENEMLHQRLQQYENRWLEYEQKMKAMEEMWQKQMRSLQSSLSVAKKSLVLDETPRMSDSSVDQSWESNGNHHVSSGSQLVPHTGGREMNAGLSVISRLAEEFEQRSQVFADDAKFLVEVKSGQADASLNPDMELRRLKQNFDSWKKDFSGRMRETKVILNKLGNGNESSPNSVKRKWWGRLNTSKFS

SEQ ID NO: 224956 - protein, 818 aa, Zea Mays
MASVEVRKSRALRARSGPSKLQPARSMPLDYRYSAGASPANGAGGGPDANGVGRRAAAAEAENGGEVVVRLEGGDADSPYSSTAVTAAEEEEVGERGGGGDEVDSAATATPRRLSPRAAASPTEGDARWGDTSSYGAKKKHRVFCQLPNGDWALCTVITTSGDESVVKVSEGKVLRLKTECLQPANPEILDGVDDLMQLSYLSEPSVLYNLQYRYSKDMIYTKAGPVLVAVNPFKKVSLYGNEYIDAYRNKSMDSPHVYAIADAALCEMKRDEVNQSIIISGESGAGKTETAKIAMQYLASLGGGSGIEYEILQTNPILEAFGNAKTLRNDNSSRFGKLIEIHFSTTGRICGAMIQTFLLEKSRVVQCAVGERSYHIFYQLCAGAPASLKEKLNLKKVDGYKYLKQSCCYSIAGVDDAQMFRTVTQAMNIVHISKEDQESVFAMVSAVLWLGDVSFTVIDNENHVEIIVDEASKTVSELLGCSIEDLNLALSKRHMKVNNENIVQKLTLAQATDTRDALAKSVYASLFEWLVEQINKSLSVGKRRTGRSISILDIYGFESFDKNSFEQFCINYANERLQQHFNRHLFKLEQEEYVEDGIDWAKVDFEDNQDCLSLFEKKPLGLLSLLDEESTFPNATDLTFANKLKQHLDSNSCFRGERGKAFAVRHYAGEVAYDTSGFLEKNRDLLHMDSIQLLAKCKTSLPKMFASKMLVQSDNSMSVPYRSSAADSQKLSVAMKFKGQLFQLMQRLESTTPHFIRCIKPNNLQLPAIYEQGLVLQQLKCCGVLEVVRISRSGYPTRMTHQKFARRCNSSSVQHFT

SEQ ID NO: 224957 - protein, 1454 aa, Zea Mays
MLAAVMADSGDAAMAVVLGWSSSWICGEEDGGRLTLTVASKCVQRTLIDCVNVVLFIAYVCTLAAACVRRRQRSADASSGRSGAPSRWVLLVVSTCCVAAAVAYCVTALQDAYDIKTAVPYFVRGLVWIALAASLHAQPTRPARVVAVLWWVLLSLLATAYNSEILAGGHSLDLAEMIAWPVSLLLLLCALGSLLPRGDGHHYRDASNGSSGLSEPLIGNDRTVPTSELYRAGLFGQLAFSWLNPLLRVGRSKALDLGDIPLIATDDTAHHTSQQFTEAWSRHVSDKARSRRGVGSNSLALVLGKCFLSEILLTGFYAFLRMLSIAVAPLLLFGFVWYSNQEERDLRVGLSLVGCLLLAKLVESLSQRHWFFSSRRTGMRIRSALMAVIFQKQLRLSIQGRNNHSTGEIVNYIAVDAYRLGDAISWLHMGWTSPLQLVFAVATLFWALKLGALPGLVPLVIFGFLNVPFAKMLQGYQAKFMVAQDERLRSTSEILNSMKIIKLQSWEDKFRSTIESLRDGEFKWLRQTQMKKAYGAVMYWMSPTVVSAVMYTATAIMGSAPLNASTLFTVLATLRVMSEPVRMLPEVLTMMIQYKVALDRIEKFLLEDEIREDDVKRVPSDDSGVRVRVQAGNFSWKASGADLSLRNVNLRVNRGEKVAVCGPVGSGKSSLLYALLGEIPRLSGSVEVFGSVAYVSQSSWIQSGTVRDNILFGKPFNKELYDKAIKSCALDKDIENFDHGDLTEIGQRGLNMSGGQKQRIQLARAVYSDADVYLLDDPFSAVDAHTAAVLFYECVMTALAEKTVVLVTHQVEFLTETDRILVMEGGQVSQQGKYSELLGSGTAFEKLVSAHQSSITALDTSASQQNQVQGQQESDEYIVPSALQVIRQASDIDVTAKGPSAAIQLTEEEEKGIGDLGWKPYKEYINVSKGAFQFSGMCIAQVLFTCFQIASTYWLAVAVQMGNVSAALLVGAYSGLSIFSCFFAYFRSCFAAILGLKASKAFFGGLMDSVFKAPMSFFDSTPVGRILTRASSDLSILDFDIPYSMAFVATGGIEVVTTVLVMGTVTWQVLVVAIPVAVTMIYVQRHYVSSARELVRLNGTTKAPVMNYASESILGVVTIRAFAATERFIYSNMQLIDTDATLFFHTIAAQEWVLIRVEALQSLTIITAALFLVLVPPGAISPGFAGLCLSYALTLTSAQIFLTRFYSYLENYIISVERIKQYMHLPVEPPAIIPDSRPPTSWPQEGRIDLQDLKIRYRPNAPLVLKGITCTFAAGNKIGVVGRTGSGKSTLISSLFRLVDPAGGRILIDKLDICSIGLKDLRTKLSIIPQEPTLFRGTVRNNLDPLGQHSDEEIWEALEKCQLKTAISTTSALLDTVVSDDGDNWSAGQRQLFCLGRVLLRRNKILVLDEATASIDSATDAILQKVIRQQFSSCTVITIAHRVPTVTDSDKGSF

SEQ ID NO: 224958 - protein, 1200 aa, Zea Mays
MLAAVMADSGDAAMAVVLGWSSSWICGEEDGGRLTLTVASKCVQRTLIDCVNVVLFIAYVCTLAAACVRRRQRSADASSGRSGAPSRWVLLVVSTCCVAAAVAYCVTALQDAYDIKTAVPYFVRGLVWIALAASLHAQPTRPARVVAVLWWVLLSLLATAYNSEILAGGHSLDLAEMIAWPVSLLLLLCALGSLLPRGDGHHYRDASNGSSGLSEPLIGNDRTVPTSELYRAGLFGQLAFSWLNPLLRVGRSKALDLGDIPLIATDDTAHHTSQQFTEAWSRHVSDKARSRRGVGSNSLALVLGKCFLSEILLTGFYAFLRMLSIAVAPLLLFGFVWYSNQEERDLRVGLSLVGCLLLAKLVESLSQRHWFFSSRRTGMRIRSALMAVIFQKQLRLSIQGRNNHSTGEIVNYIAVDAYRLGDAISWLHMGWTSPLQLVFAVATLFWALKLGALPGLVPLVIFGFLNVPFAKMLQGYQAKFMVAQDERLRSTSEILNSMKIIKLQSWEDKFRSTIESLRDGEFKWLRQTQMKKAYGAVMYWMSPTVVSAVMYTATAIMGSAPLNASTLFTVLATLRVMSEPVRMLPEVLTMMIQYKVALDRIEKFLLEDEIREDDVKRVPSDDSGVRVRVQAGNFSWKASGADLSLRNVNLRVNRGEKVAVCGPVGSGKSSLLYALLGEIPRLSGSVEVFGSVAYVSQSSWIQSGTVRDNILFGKPFNKELYDKAIKSCALDKDIENFDHGDLTEIGQRGLNMSGGQKQRIQLARAVYSDADVYLLDDPFSAVDAHTAAVLFYECVMTALAEKTVVLVTHQVEFLTETDRILVMEGGQVSQQGKYSELLGSGTAFEKLVSAHQSSITALDTSASQQNQVQGQQESDEYIVPSALQVIRQASDIDVTAKGPSAAIQLTEEEEKGIGDLGWKPYKEYINVSKGAFQFSGMCIAQVLFTCFQIASTYWLAVAVQMGNVSAALLVGAYSGLSIFSCFFAYFRSCFAAILGLKASKAFFGGLMDSVFKAPMSFFDSTPVGRILTRASSDLSILDFDIPYSMAFVATGGIEVVTTVLVMGTVTWQVLVVAIPVAVTMIYVQRHYVSSARELVRLNGTTKAPVMNYASESILGVVTIRAFAATERFIYSNMQLIDTDATLFFHTIAAQEWVLIRVEALQSLTIITAALFLVLVPPGAISPGSHITIITTSSFPMVSLD

SEQ ID NO: 224959 - protein, 167 aa, Zea Mays
MIKPDTRDSLISFLQILVAHHPSKRCRRGSAELLIDFDDHWHTNLSLSLEDSTTLLKGAGEKVCGNGVPRGYWIFCRGSKKETRGFSCGLWVLLHSLTVRIGDGESQTTFTSICDFIHNFFICEECRTHFYEMCSSYRSPVVYQSPSNLPVTLPSGYGPRITKLTRG

SEQ ID NO: 224960 - protein, 298 aa, Zea Mays
MLSLIQKFPIHMQVPDIEDFIYEKAKTLTSSSKATTSLVKVEKKVGVSSVIKVGAPDNWEAVLGGIKSMRLSGEAPVDTKGCEKAGSLLPPKERRFAVLISTMMSSQTKDEVTHAAVERLSENGLLDPDAIVRTDETTLANLIKPVGFYQRKAQFIKEASKICLERFGGDIPDSLNELLALRGVGPKMAHLVMSIAWKNTQGICVDTHVHRISNRLGWVFREGTRQKTTTPEQTRISLEKWLPKDEWEPINPLLVGFGQTICTPLRPKCDKCGINNICPSAFKESSSPIPKQKKTRSP

SEQ ID NO: 224961 - protein, 232 aa, Zea Mays
MAVDLLRVHRILSTLLETKGITVTRYIEGRGNTQKTTELLLEAGEQELLRTWEDPMDEQCKQDSKDSIRRTIVEHDKVFRQQVHELHRLYHVQKTLMAECDSHRYQPRAEGTHEVVQGSRSNLKCSPSTSGTNQSALLGNAQYPAPQQVQEDLSLHECKPVNCLSLFGEENSAAKERFHGENHKSVEDESWSAAVESDLDLKLSIGPSSHSPETPRWLFSGSRERNPSGQHR

SEQ ID NO: 224962 - protein, 988 aa, Zea Mays
MASNMQSSGLPQPPRPPMMGSSAQPQNLGPPMPMQFRPVMPSQHPPQFMPPAAQQFRPVGEPMAGANVGMPGQMPHFPQPGQHLPHSNQVPPVSQGVPMVYQPARPMSSAPMQQQQQTAYAGGHLPTMGAPMQPLTYTYQPTSIPPVAQPWSTGPGQSVHHVPPLVPSGHQPVSAPTTLPPVNLSEPSSSDWQEHTAAEGKKYYYNKKTRQSSWEKPVELMTPLERADASTEWKEFTTPEGRKYYFNKVTKQSKWTIPDELKVARELAENASNQQPDRESGIATSALVRSAAFEPSTAPANQSSSAVGIIASSAHDGSSNSVLSGPPLPHNVENTSSSIVGMQNGGSSTAVVPVAASTEVPLVATDAGSSRNNDENSSLTTGADAEDGTSAEDLVEAKKTMPVAGKINVTPVEEKTSEEEPVVYATKMEAKNAFKSLLESVNVESDWTWDQTMRVIINDKRYGALKTLGERKQAFNEYLNQRKKFEAEEKRIKQRKARDDFLAMLEELTSSTRWSKAILMFEDDERFKAVERPREREDLFENYLVELHKKEKAKAAEEHKRYVAEYRAFLESCDFIKASTQWRKVQERLEDDERYSRLEKFDRLDIFQEYIRHLEKEEEEQKRVQKDQVRRQERKNRDGFRKMLEEHVADGTLNARTRWRDYCAQIKDSQSYLAVASNTSGSTPKELFDDVIEELGKQYQEDKIQIKEVVKSGKIPMTTSWTLEEFQTATLEDDALKGISTINIKLVYDDQLERLKEKEQKDAKKRQRLGENFSDLLYSIKEISASSTWDDSKQLFEDSQEFRALDSETYARELFEECVVHLKERLKEKERLREEEKAKREKEREEKEKKKEKERKEKERKEKERDHREEREKEKGKDRSRRDEMEFDGADLNTHGAKDKKRDKDKEKKHKRRHHDTDDVSSERDDKDDAKKSRRHSSDRKKSRKHAHGSDSDSENRHKRHKKDRDSSRRNGAHELEDGELGEDGEIY

SEQ ID NO: 224963 - protein, 287 aa, Zea Mays
MNSHKFLLAVLLLLLHNYASYAATSKEDDDFLKTCPSHRCHKHGPEIRFPFRLPSHPPSCGAPGMQLSCSGHDTILDHPVLGSCRVTAIYYRHRVMNVIPPEDSSSHCQLQKLVKRNQSTDVYTPVAHPFSVLVGCSREATNQDGIVGPSSCLSLINNASQLWYLVDPSTDMSTLPMGCEVVAKGIPVPYTYDKNGPIDETFSGRSLFNENANRAINFGETSFNWNLNNITGSCQRCEQEGKHCGFSSNRRQAFCLHHGSHVILIAGGAMHSGCPRLGLQGGHVQTA

SEQ ID NO: 224964 - protein, 279 aa, Zea Mays
MNSHKFLLAVLLLLLHNYASYAATSKEDDDFLKTCPSHRCHKHGPEIRFPFRLPSHPPSCGAPGMQLSCSGHDTILDHPVLGSCRVTAIYYRHRVMNVIPPEDSSSHCQLQKLVKRNQSTDVYTPVAHPFSVLVGCSREATNQDGIVGPSSCLSLINNASQLWYLVDPSTDMSTLPMGCEVVAKGIPVPYTYDKNGPIDETFSGRSLFNENANRAINFGETSFNWNLNNITGSCQRCEQEGKHCGFSSNRRQAFCLHHGGAMHSGCPRLGLQGGHVQTA

SEQ ID NO: 224965 - protein, 157 aa, Zea Mays
MGYWRSGRSSILAGPGSAHFLRKFVVGNQWNPTIHFSCGWSCRWGQENSLEFGTDKIEMHVGAVQANDRALVVDDLIATRVQLSNLSEMDDEALDQGDGGWIKEMEEVAATATTSRSIMPFRAIQKGKPLSVSLASRRSPPLSSRTPVHRLMIIRTR

SEQ ID NO: 224966 - protein, 121 aa, Zea Mays
MALALAGLPHAASRLVPRVRQPPFRALCAAAAAGDASKRMLVLYTKPGCCLCDGLKEKLHAASMLAGTPYSLASLELQERDITTNPEWERLYQYEIPVLAKVLPDGTETLLTLCANYEAFQ

SEQ ID NO: 224967 - protein, 322 aa, Zea Mays
MTVGFLLLSSRYGKSSVKCRPRLSRLASALLTTSLAQQKRLRISQTSTPFSRPVERTMPTYSHITYCSSILACLVCPTMSDSAPSPSADRGSVSRAHLAASDGRGELSRSGEILRPWIRRKKQTAVTTRITGLKLTRILKFRISMDYNTTIPIALFGIPIFRSPNVRDITVPKSSSSSACAAALLPTGSRAAASSPPASLHSPPPVRLYRRWPPLGRQPRLACFYCCAPPQSPRWSYEPRDPRRCGTGARRRQRAHPPHALGGATNPARSSSPSAYGGRPCSTLPPRMRLSSPHCSISGTSPSIAPCPASTRWSPSSPAPSG

SEQ ID NO: 224968 - protein, 328 aa, Zea Mays
MCKVRLVTEKDTSKPRGYAFIEYVHTRDMKNAYKQADGRKVDNRRVLVDVERGRTVPNWRPRRLGGGLGSSRMGGTDTDKKDSTREQQQGGRPRSEEPRRDDRRADRDREKSRERVRERDREERTRERSHDRTRDRDLRDEKHHHRDRERTRDRERGKDRERDHGRDRERDRRDRDKDRGRDYDRERDRGRSHDRHRERGRDRGERDYERTSHERDRGHMHERDADYGNGGTKHDKNLSSYGQDYGYGQYEQHKGHDAYGYSQDVRGHETEHSKRHEHEYYRVDSYGKMEANYQMPPNNAEPEGPEEGEAYEEGDYQYHRSGEHMKEA

SEQ ID NO: 224969 - protein, 263 aa, Zea Mays
MALLTLQPAIPFLLLLLLPAASAGLPGGRTLVFILAGQSNMSGRGGATNGTWDGIVPPECAPSDRIVRLSPALRWEEAREPLHAGVDVGNVLGVGPGMPFAHAVLASEGAAAEPPVVVGLVPCAQGGTPIANWSRGTELYERMVTRARAAVAECSGRGHLAALLWYQGEADTMRRQDAELYQRRMETLVRDVRCDLGRPDLLVIQYNGKFLGVVREAQKAVKLPNVKYVDAMGLPIASDHTHLTTEAQVQLGNKLAESYLETL

SEQ ID NO: 224970 - protein, 422 aa, Zea Mays
MATSSAGSMTPRSPITTPRSNHIDMLLAGKNAINESDDLPQIVELADIARCIANTPLDEESALSQMVTCIEDLQEIVNCRKHESLTVQTFGTRIEKLHREKYLQLCDSVDMDKVDSASTIMDEEDNVVRSLRASPVHPIKDRTSIDDFEIIKPISRGAFGRVFLAKKRTTGDLFAIKVLRKADMIRKNAVESILAERDILITVRNPFVVRFFYSFTSRDNLYLVMEYLNGGDLYSLLRNLGCLDEDVVRVYLAEVVLALEYLHSMHIVHRDLKPDNLLIAHDGHIKLTDFGLSKVGLINNTYDLSRPVVSGASLYGDDEPQMNEFEQMDHRARRQNRSAVGTPDYLAPEILLGTGHGCSADWWSVGVILFELIVGIPPFNAEHPQTIFDNILNCKIPWPHVPEEMSFDAQDLIDKLLASQTL

SEQ ID NO: 224971 - protein, 92 aa, Zea Mays
MFTAFLMAMGYSILLNVSSVPQNLGHYKNRNRLRLVLFVSTESTGTVMQLANGDNCQRNKNALCLVQLWERSIQIVAAETESLATVFQNIDD

SEQ ID NO: 224972 - protein, 212 aa, Zea Mays
MVEKILLFCKIVHGNQSCTGHVFSFLLQAYGRAVPVYVPVYLVPALVVHRQHLMKRPYSIIGKSFLGVARSSLFLSVYCASAWAWTCLLFRIFRRANTPLVILGTFPTGLALLIEKKSRRIEISLYCLARAIESFFTWMTDAGLCPPILQIKRADVVVFSIATSIIMHCYAQEREVFRSKYLNVLDWVFGVPPPPDSEDKNCYLPDEAKKCQ

SEQ ID NO: 224973 - protein, 258 aa, Zea Mays
MHQDAHEFLNFLLNELVDILEKEHNAARESLQNLSLQKNSNGPIDGQPNGSHKELAVTWVHKCFQGILTNETRCLRCETVTDRDETFFDLSLDIEQNSSLTSCLKNFSSTETLNAEDKFFCDKCCSLQEAQKRMKIKKPPNILVIHLKRFKYIEQLQRYKKLSYRVVFPLELKLLNTVDNSDLEYSLFAVVVHVGSGPNHGHYISLVKSHNHWLFFDDENVEMTDESMVQAFFGSPQEFSGNTDNGYILFYESLAERS

SEQ ID NO: 224974 - protein, 377 aa, Zea Mays
MQKIDSDYYPETLHQMFVVNAGSGFKWIWNSVKGFLDPKTSSKIHVLGSNYQSRLLEVMDSSELPEFLGGSCTCSDKGGCLGSNKGPWNDPYILKLIHNLEAGCAREIKPVSEGEERNSSSFRLEQMKWQGLLSDTSNAESGSDVDDFGASFVHKVSDYGCLTPVHEEVKGTDRVTYFSYDDQSHPDMAPESYHGARRATGMEHHKPMADFSQYSANRRPGDSALNVNGTAAQSGWENVVKLVVTTLVKLFYFIRLFLSTAERRLESIHRPAPPAAPAAAEEPRPRAISDEEVCACLQRLDNLESMCSHLAAKPPQIPEDKELILLSSFERIRSVEADLERTKRVLNATVVKQKALVETLESVQESSSRVKKRMFCS

SEQ ID NO: 224975 - protein, 750 aa, Zea Mays
MEDDEYEEGMEMGYGGHHQHGGGHAGYGAEEDDEVGYGGGGGEEMDEDADGDAEQQEDITQDDAWAVISAYFEEKGLVRQQLDSFDEFIQNTMQEIVDESADIEIRPESQHNPGRQAEFAETLHRISFGQIYLSKPMMTEADGETATLFPKSARLRNLTYSAPLYVDVSYRVMKKGHDCEEVTETAEYPKVFIGKVPIMLRSSYCTLYQQSEKDLTELGECPYDQGGYFIINGSEKVLIAQEKMSTNHVYVFKKRQPNKFAYVAEVRSMAENQNRPASGMFVRMLSRAGAKGGSSGQYIRATLPYIRADIPIIIVFRALGFVADKDILEHICYDFSDTQMMELLRPSLEEAFVIQNQQVALDYIGKRGATVGVTREKRIKYAKEILQKEMLPHVGVGEFCETKKAYYFGRRAEDDRDHYGNKRLDLAGPLLGGLFRMLFRKLTRDVRSYVQKCVDNGKEVNLQFAIKAKTVTSGLKYSLATGNWGQANQAGTRAGVSQVLNRLTYASTLSHLRRLNSPIGREGKLAKPRQLHNSHWGMMCPAETPEGQACGLVKNLALMVYITVGSAANPILEFLEEWGTENFEEISPAVIPQAAKIFVNGCWVGIHRNPDLLVKTLRRLRRQIDVNTEVGVVRDIRLKELRLYTDYGRCSRPLFIVEGQRLLIKKAHIRALQQRETPDEGWHELVSKGYIEYIDTEEEETTMISMTINDLQNARHNPEEAYSETYTHCEIHPSLILGVCASIIPFPDHN

SEQ ID NO: 224976 - protein, 199 aa, Zea Mays
MQSGSGSGRRRRSRSFLPVNARERRKRQGGGVGSTLESRQRPTSEGNFDPSSTSTGGPARPRLPACLPVPGASHPIFAWPRNSVGRTPIPEVGRFLNGPQILPRLLSSCLPLNVARRFSLFLGERVFQFLPCRPPRWWDRGRRQTDGGQRHAGHAAFGAAAISASAVAVHPLDTVKHSSSFQMEGRTTMSIILRLCWLA

SEQ ID NO: 224977 - protein, 1565 aa, Zea Mays
MEALNELCDLVAAHPDLLLADKLAWLSSRCAAAPGAAAPQRASRAHLHSLLALARLLPAGGAGAGAEGDAAPPAPLLFFLASHAFLSPAFWPQSFAPAPFLARLLPLLAAAPSSPALSSALSAALLAALDVADPTSAPLARAFLSAAAAAAPLPLLPADAAPIAARLLLEFLGSEEEPIRAKGKGEDTLGEENGGAKEVVRRFEEEEVDELERKEVAFRLTVHMLGGEGGLETEQIGKVRNAAARQVRSLTDFLKIRKRDWREQGTQLRARINTKLMCCQAAVGVLVRSVSTMDTDIKSSKDMLQQTLAWFIEATKSCILSSWRKLKICEELFCTLLNGISQITVSRGGQLLPVLLIPLKPLVVSTCSQADMAGSSPGALFEAVVKLSCEIIEFGWTKDRALVDTFVMRLAAYVRERNDYEEEDGKGKEAVPVIRLNVIRLLAELCVCLKKWEVVDMILPLFIEHLEEGDASSPSSLRLRLLDAISRVACLGFEKSYRESIVLMTRSYLDKVKALGASENNTVPSEATTERTETLPAGFLLVASNLTSTKLRSDYRHRLLSLCSDVGLVAESKSGRSGADLMGPLLPAVADICSDFDPVSTVEPSLLKLFRNLWFYVVLFGLAPPIQNNEAPTKPVSTSLGTAESSSAIALQAVAGPYMWNSQWSVAVQRIAQGTPPLVVSSVKWLEDELELNTLHNPGSRGGNGNENSAVGQRAALSAALGGRVEVAAMNTISGVKATYLLAVAFLEILRFSCNGGILSATSTLNRSNSAFSCVFEYLLTPNLTPAVTQCLTAVAHRAFETVLSWLDDRISDIGEGADVRESVLSVHACFLIKSMSQRDEHVRDVSVKLLTQLKEKFPQVLWNSSCLDLLLISVHNELTSGPVSDPAWVATVRSLYQKIAREWLTSALSYAPCTTQGLIQENFCKPSGVQRTQHTADVVSLLSEIRICSGKNDWNGIRTANVPAVMDSAAAASGAKKEAPDFTLEVLSTAVVSATVKCNHAGEIAGMRRLFSTMGGINMGMSPPGTQSLHPHQSFDEVFVSKFVSLLQNFVVAAEKQPIDNSQFRETCSQATALLLDHMVSDSRANLEGFSQLIRLLCWCPAYISTPDAMETGIYIWTWLVSAAPSLGPLVLAELVDAWLWTIDTKRGLFASDMNYCGPDAKLRPHLIAGEPEAPPEKDPVEAIIAHRLWLGFFIDRFEVVRHDSIEQLLLLGRMLQGTMKSPAHFSHHPAATGTFFTAMLLGLKFCSCQSQSNLQKCNMGLQLLEDRVYRAALGWFSYAPEWYESPNKTYAQREAQSVSVFVHFLQNERTSGPVDSVSKLQGREGEPSMADHIHPVWGCVDNYTNAREKRKQLLLTLSQNEADRLEVWAQPIHTKDTTTFRGKISSDKWIDHVRTAFAVDPRIALSMPLRFPTNATMQSEITQLVQTRLLELRTIPEALPFFITPKAVDENSVLLQQLPHWAPCSVTQALEFLTPPYKGHPRVMAYVLRVLETYPPETVTFFMPQLVQSLRYDEGKLVEGYLLGATRRSNIFAHILIWHLQGEYVDESEKDAAALKVTSINAD

SEQ ID NO: 224978 - protein, 1960 aa, Zea Mays
MEALNELCDLVAAHPDLLLADKLAWLSSRCAAAPGAAAPQRASRAHLHSLLALARLLPAGGAGAGAEGDAAPPAPLLFFLASHAFLSPAFWPQSFAPAPFLARLLPLLAAAPSSPALSSALSAALLAALDVADPTSAPLARAFLSAAAAAAPLPLLPADAAPIAARLLLEFLGSEEEPIRAKGKGEDTLGEENGGAKEVVRRFEEEEVDELERKEVAFRLTVHMLGGEGGLETEQIGKVRNAAARQVRSLTDFLKIRKRDWREQGTQLRARINTKLMCCQAAVGVLVRSVSTMDTDIKSSKDMLQQTLAWFIEATKSCILSSWRKLKICEELFCTLLNGISQITVSRGGQLLPVLLIPLKPLVVSTCSQADMAGSSPGALFEAVVKLSCEIIEFGWTKDRALVDTFVMRLAAYVRERNDYEEEDGKGKEAVPVIRLNVIRLLAELCVCLKKWEVVDMILPLFIEHLEEGDASSPSSLRLRLLDAISRVACLGFEKSYRESIVLMTRSYLDKVKALGASENNTVPSEATTERTETLPAGFLLVASNLTSTKLRSDYRHRLLSLCSDVGLVAESKSGRSGADLMGPLLPAVADICSDFDPVSTVEPSLLKLFRNLWFYVVLFGLAPPIQNNEAPTKPVSTSLGTAESSSAIALQAVAGPYMWNSQWSVAVQRIAQGTPPLVVSSVKWLEDELELNTLHNPGSRGGNGNENSAVGQRAALSAALGGRVEVAAMNTISGVKATYLLAVAFLEILRFSCNGGILSATSTLNRSNSAFSCVFEYLLTPNLTPAVTQCLTAVAHRAFETVLSWLDDRISDIGEGADVRESVLSVHACFLIKSMSQRDEHVRDVSVKLLTQLKEKFPQVLWNSSCLDLLLISVHNELTSGPVSDPAWVATVRSLYQKIAREWLTSALSYAPCTTQGLIQMVTVLSMLRLPIACLVEVKLAYHENFCKPSGVQRTQHTADVVSLLSEIRICSGKNDWNGIRTANVPAVMDSAAAASGAKKEAPDFTLEVLSTAVVSATVKCNHAGEIAGMRRLFSTMGGINMGMSPPGTQSLHPHQSFDEVFVSKFVSLLQNFVVAAEKQPIDNSQFRETCSQATALLLDHMVSDSRANLEGFSQLIRLLCWCPAYISTPDAMETGIYIWTWLVSAAPSLGPLVLAELVDAWLWTIDTKRGLFASDMNYCGPDAKLRPHLIAGEPEAPPEKDPVEAIIAHRLWLGFFIDRFEVVRHDSIEQLLLLGRMLQGTMKSPAHFSHHPAATGTFFTAMLLGLKFCSCQSQSNLQKCNMGLQLLEDRVYRAALGWFSYAPEWYESPNKTYAQREAQSVSVFVHFLQNERTSGPVDSVSKLQGREGEPSMADHIHPVWGCVDNYTNAREKRKQLLLTLSQNEADRLEVWAQPIHTKDTTTFRGKISSDKWIDHVRTAFAVDPRIALSMPLRFPTNATMQSEITQLVQTRLLELRTIPEALPFFITPKAVDENSVLLQQLPHWAPCSVTQALEFLTPPYKGHPRVMAYVLRVLETYPPETVTFFMPQLVQSLRYDEGKLVEGYLLGATRRSNIFAHILIWHLQGEYVDESEKDAAALKGSAFQSLLPAVKDKIIESFTPEARDMFEREFDFFDKVTSISGVLFPLPKDERRAGIRRELEKISIPGDDLYLPTATNKLVRGIQLDSGIPLQSAAKVPIMITFNVVDRDGDPNDVKPQACIFKVGDDCRQDVLALQVIALLRDVFQAVGLNLYLFPYGVLPTGPGRGIIEVVPDTRSRNQMGETTDGGLLEIFQQDYGPVGSPSFETAREMFMISSAGYAVASLLLQPKDRHNGNLLFDSHGRLVHIDFGFILEISPGGNMGFESAHFKLSHEMTQLLDPSGTMKSDTWNQFLRLCVKGYLAARRHMNGILSTVNLMVDSGLPCFSRGDPINNLRKRFHPEMNEREAANFMVRTCADAYNKWTTAGYDLIQYLQQGIEK

SEQ ID NO: 224979 - protein, 525 aa, Zea Mays
MTEVHSRGIELQSAAESRNAEIEAQLQEALEAVGQKEAESRNLNEKLVALESEIESSMHVNEALKQEINAKLVMVDELQEKCSFISSEKEEVAEKLSIHEEKLEHLTEEHSRGLELLSVAESRNKETESQLREVLEKLAQKEAEVTDLTEKLALLEAENEKMTCLNEALKEVDAKLVMFDELQERFSSTLAEKEEAAEKLAVHERTISQLTEVHTRTLELHSVAESKNEEIGAQFLEALETISQKEGEVKESSSQKIKILEEQLAETHSKVEHFLTEKESLVQETSSLNKEFEVHQNKLNDLQLALAAALAEKEAAFEEIHSLCKTLDGMIEHKAELEIQVSSTIQEHEELKSKYQNTMEEKQMLSDKYETAKKELEDAIAKLEEEMNVDKSEKESHISKLERQITLSEIKYMEEIKTMQVETTEKNEALTAKMQEHTDLQHEKHELEQQLLEVRKELDGAYHTIVNQEEQASLREIKWDTFRIYSEDRLEAEQQRAEELELQVAALKQQLQEAEVHYKQKNKFL

SEQ ID NO: 224980 - protein, 1292 aa, Zea Mays
MEAEVSAPADLKAPDKTTVHGDDKENIPNGNANLQVKEADNDEDDGTRSDGFELIDVKQNFDSARVEEEMAAPRSTTVDTSPVTEESETQEDKTTAHEEQSVATNTRHLESSMLNQQTEQLEKLTMRIEELESENDKLVKDLTEAENKQSLHYSCLQEAQCSLAMKDKELAEVTESLKDLGSELGTSKKRIQEIEAELDSSADKLCKLEELKDERSLHAAQEAKRASELDKMLELAQSNMKEMEKHIGSLQEEVKGYQDKAADHQQIEESLRNTISELKVVQEALELSKSQVENLKQKLASQDTDFSKLTEELNLHCSSEESLKEKSLKLETELTTVLEELQAKGGLDKLKDENKTLQGSLVDLNSKLSEKDSILHQAEDELSKAQLVLLEALSQKEELELNLNSLSEQHGKSKAFGENANQKILDLEAQIQAMHAAEQALKFELKEAEASVQAAEKKGSDLEQQLSEIENKFVKSSEEIELLKERIQQEAAVSAERGMQLQETVTSVEGYKEKIIELQSSLGSSVSKNQLLEQEVMELTDKCSEHQEQAHSVRQRSLELEDLLHTSKTHAEGVYSRTQELEQELNNTYEMFKGVEEELEQYRSKASQLSDDLEAYQTKAASLEAVVEAASEKEKEFMESLSQITEEKKKTESRNAEIEAQLQEALEAVGQKEAESRNLNEKLVALESEIESSMHVNEALKQEINAKLVMVDELQEKCSFISSEKEEVAEKLSIHEEKLEHLTEEHSRGLELLSVAESRNKETESQLREVLEKLAQKEAEVTDLTEKLALLEAENEKMTCLNEALKEVDAKLVMFDELQERFSSTLAEKEEAAEKLAVHERTISQLTEVHTRTLELHSVAESKNEEIGAQFLEALETISQKEGEVKESSSQKIKILEEQLAETHSKVEHFLTEKESLVQETSSLNKEFEVHQNKLNDLQLALAAALAEKEAAFEEIHSLCKTLDGMIEHKAELEIQVSSTIQEHEELKSKYQNTMEEKQMLSDKYETAKKELEDAIAKLEEEMNVDKSEKESHISKLERQITLSEIKYMEEIKTMQVETTEKNEALTAKMQEHTDLQHEKHELEQQLLEVRKELDGAYHTIVNQEEQASLREIKWDTFRIYSEDRLEAEQQRAEELELQVAALKQQLQEAEKQIEDLTQKLRSADAHYKQKATEERDKLAEITTEFSKLTHKVSKSVELEKKVQDLEQKLQLAYSKSDEQATDVLESRSREFSLDSLSSLVKQQDRTQAADKASPSPTLQEVQEPSGTMAFKFILGVALLSVLAGVFLGKRY

SEQ ID NO: 224981 - protein, 118 aa, Zea Mays
MSYLEAWSHIEKHHSSALSAAIKALKASTLRLPVVDGAKADAQAVKEAVNSAVDVMHTMTSSICNLLSKVEGTSSVVSELAKVATQEQMLLDQSKDLLSTVAAIHVWTSPTIILTQSP

SEQ ID NO: 224982 - protein, 462 aa, Zea Mays
MAPFQMRFGLQISPARSDDDEEEDDDDDNEEEYDEMASEGTASPPMMLRPGRGGGGLVSAVVGALRRSLVMCSAGAVDIDDDDDEEEGGIEIGRPTDVHHVSHVTFDRFGGFLGLPADLEPEVPRRTPSASVSVFGVSPTSLQCSYDPRGNSVPTILLMMQRKLYDRGGLKVEGIFRINAENSQEVYVRDQLNSGVVPNEVDLHCLAGLIKAWFRELPSGVLDALTPEQVMHCNTEGGCALLASMLPPVEAALLDWAINLMADVVEQENYNKMNARNIAMVFAPNMTQVMNFLKTLILKTLKERNKKDEALEALQPCSSSPNDQDEHQVSEHLEKPSVLPNQKGFGFHMNDSATPVQVLGAEKTLHHHSQIRSHEPKKFGTDMDHKKRQSDASSLLGSDSSNRFNSSGREFGSRNGASDRFSFRKGVERLCRHPVFQLNRSMKKSTDAVVFDAPRETRQAWV

SEQ ID NO: 224983 - protein, 775 aa, Zea Mays
MTTCRWDECEFVQQSPWPVVLAWESFSLPQHVDWSNISSISEWWEKTETLFPQDRKREFNGLVHQDMNAPLSHYFIYTGHNSYLTGNQLSSDCSDVPIIKALQLGVRVIELDIWPNSCKDDIDVLHGRTLTAPVSLIKCLRSIKEYAFVASPYPVIITLEDHLTPDLQERVAKMVLEVFGDILYYPESKHLQEFPSPEALKGRVMLSTKPPKEYLEAKGDTMKEKEIEARIKRGEREAAAWGVEVPDIQDEMQVADKDEDELLYRERGADGDDGKETKHVAAEYKHLITIKAGKPKGPLVDAIKNDPDKVRRLSLSEQELAKVAAHHGPNIVSFTHRNMLRIYPKGTRFNSSNYNPFLGWVHGAQMVAFNMQGYGRALWLMHGFYKANGGCGYVKKPDFLMQTCPDGKVFDSKADLPVKATLKVKVYMGEGWQKDFKQTHFDSYSPPDFYVKVGIAGVPLDSVMRKTKAVEDSWVPVWEEEFAFPLTVPEIAVLRVEVHEQDVNEDDFGGQTALPVAELRPGIRAVPLFDHKGLKFKSVKIRVTWKRTRLSEASIDKQQVEVGMAMGAAAAASTCTRPASPGLARRRVRAQATSSWAGGAEALVRSGAVRAVRPRDAAEALGGEGFRLLDVRPEWERARASVRGSVHVPLFVGDDDMGPVTLLKKWVHLGYIGLWTGQAFTKMNERFVDDVAAAVDGSKDAKLLVACGEGLRSLIAVRMLHDDGYRNLAWLAGGFSKCADGDFADVEGESKLQYATIGGASYIFLQILLFLGVVK

SEQ ID NO: 224984 - protein, 491 aa, Zea Mays
MTTCRWDECEFVQQSPWPVVLAWESFSLPQHVDWSNISSISEWWEKTETLFPQDRKREFNGLVHQDMNAPLSHYFIYTGHNSYLTGNQLSSDCSDVPIIKALQLGVRVIELDIWPNSCKDDIDVLHGRTLTAPVSLIKCLRSIKEYAFVASPYPVIITLEDHLTPDLQERVAKMVLEVFGDILYYPESKHLQEFPSPEALKGRVMLSTKPPKEYLEAKGDTMKEKEIEARIKRGEREAAAWGVEVPDIQDEMQVADKDEDELLYRERGADGDDGKETKHVAAEYKHLITIKAGKPKGPLVDAIKNDPDKVRRLSLSEQELAKVAAHHGPNIVSFTHRNMLRIYPKGTRFNSSNYNPFLGWVHGAQMVAFNMQGYGRALWLMHGFYKANGGCGYVKKPDFLMQTCPDGKVFDSKADLPVKATLKVDGQGVHGGRLAKGLQADTFRLILTSRFLCKGWHRRSSIRLGDEKDESRGGQLGAGVGGRVRLPADRT

SEQ ID NO: 224985 - protein, 192 aa, Zea Mays
MSWLEQPRLCSVWSTGLSGGAPDSVRCARLARANWPLSGIHRRRTAIIHRTVRCAPDCPVSQRSVGPTVGRAICVGHVAEPTARRRHRTVRCAPDMSGAPTALWLPTVDCAIYGKKSGTGHVRCAPDCPVRQSTEGKISLPRLLSMAPSFLGAIKGTPRRMEEHTKHSYNIPKHQDIDSAPLILCDSNWSSS

SEQ ID NO: 224986 - protein, 251 aa, Zea Mays
MAGALLSSPHYLWSPTSQPSLRPRGPLGTGAVRVLPPRRRARVLASCSREPAAMNRGLEVERRRLLMSGLVSSFTIVLPISGAYAVMETNEDVKMNTQVDEINAYSFLYPVELPGKKFSFKWVESRKPERYSSAAPLSPDARQRIVSERVDMIHNVVISVSKVTTGQRMTESSVLDAHATEVDGEPYWYYEYLVRKSPTKSASEPNLFRHNVTCTAERDGITSSFQFLSSTIHSLTFEAFFVHSPFFISFF

SEQ ID NO: 224987 - protein, 674 aa, Zea Mays
MHVCCSAFRQQWHNGGGPACVLSVGTANPGNCVQQDEYTDWYFSITKNDHLTHTKAIMKKMCEKMMVKKRYLQVNEELFREHPEFLDPAAPSLEGKLAVVASVMPGLVAAAAEKAIAEWGRPAEDITHLVFATSSSAQLPHIDLRIASLLGLSTTVQRTVIGFHGCSGSSAALRVAKDIAENNRSARVLVACADMLSVMDGYLVPNVVAHRYGIIGHAIFGDGAGAVVVGSRPQEPVERPIFEMVSASQATLPGSELAVAAELTNFGMEYRLEFGELAAGVGDNIERCLIDALSPLGIGSVGWNNLFWAVHPGGPKSDHLTHTKAIMRKTCEKMMVKKRYLQVNEELFSVHPEFLDPAAPSLQGKLAVVAGAMPGLVAAAAEKAIADWGRPAGDITHLVFATSSSAQLPHIDLRIAALLGLSTTVQRTVIGFHACSGSSAALRVAKYIAENNRSARVLVACADMWSVMDSYVVPNVDHRYGIIGHAFIGDGAGAVVVGSRPQEPVERPIFEMVSASQATVPGSERAVAVELTNCGLEYRLEFGDVAAEVGGNIERCLLDALSPLGIGSVGWNNLFWVVHPGGPRIMDTFTAALKLQPEKLSASRRVLREYGNMTGPTLIFVLDEAIRRRQLDHEEGSCEWGLMVGLGPGFTIDVMALRACSGKSTPTPRIKSSL

SEQ ID NO: 224988 - protein, 274 aa, Zea Mays
MAIRITVSYSGYLAQNLAASFGLRCTAAAAAGAGAAPGPGCRFLQDALSRPFCLFASSRHVDPHHDAEDQNHPKPGPKALSPAVAARGDGYSLLLPRSCSAKAPPPVDDPPASLAVGLLSVFASGMGSTGGIAGASSLVASPSISTGLNPASLLPFLQASKWLPCSDIVAAATTSRSSGRPAGATAAPTPRTAAPSPRPAPRAAAPSPRPAPCAAVPSPRHVPVPSPAVAAPSKGWEGRPVGSQGQCSQHLMLVIGSLLRRFRTFSGNRKFWTL

SEQ ID NO: 224989 - protein, 324 aa, Zea Mays
MESSFSSSLGNNSSRILVIGGTGMMGQHLVKASLAAGHPTAVLVRPASSSKLELLETIKGDIYDHESLVAAFHQVDVVISAVGHHGPHDLEDGQLRIVAAIKEAGGSVKRFVPSEYGCDVEQAARSAAVLEPARSIVLAKVRVRQAIRAAGIPHTFVCSYWAHGFVLPRLGDPHADGLPATRATVFGDDATRAIFVHEADMAAVTVRAVDDPRALDKTLYLRPPANTCSLAHLVRLWEDKTGRALDKYYMPDEELVNRIRDSPLPLNFQLAMVHATVVAGVCDQTVDAEAGGVEATELYPDVNYVTVHDYLDGLKESLTRNVNS

SEQ ID NO: 224990 - protein, 82 aa, Zea Mays
MLTIFVHPAVSSIAHVNCGQCQTVLMYPYGAPSVKCAVCNFITNVGGVTPMIPLPPPALTASSGTSYIIPSISVVCLFYDLP

SEQ ID NO: 224991 - protein, 61 aa, Zea Mays
MKFLEIESVSNLCILRFLGEPQAMPVPPEELLISVWTQLEMKAFLLKHTIVYSTILRLFYP

SEQ ID NO: 224992 - protein, 631 aa, Zea Mays
MDRARGSAFLLGVLLAGSLFAFSVAKEETKKLGTVIGIDLGTTYSCVGVYKNGHVEIIANDQGNRITPSWVAFTDSERLIGEAAKNQAAVNPERTIFDVKRLIGRKFADKEVQRDMKLVPYKIINKDGKPYIQVKIKDGENKVFSPEEISAMILGKMKDTAEAYLGKKINDAVVTVPAYFNDAQRQATKDAGVIAGLNVARIINEPTAAAIAYGLDKKGGEKNILVFDLGGGTFDVSILTIDNGVFEVLATNGDTHLGGEDFDQRIMEYFIKLIKKKYSKDISKDNRALGKLRREAERAKRALSNQHQVRVEIESLFDGTDFSEPLTRARFEELNNDLFRKTMGPVKKAMEDAGLEKSQIHEIVLVGGSTRIPKVQQLLRDYFDGKEPNKGVNPDEAVAFGAAVQGSILSGEGGDETKDILLLDVAPLTLGIETVGGVMTKLIPRNTVIPTKKSQVFTTYQDQQTTVSIQVFEGERSMTKDCRLLGKFDLNGIAPAPRGTPQIEVTFEVDANGILNVKAEEFAEEDKKVKERIDARNQLETYVYNMKNTVGDKDKLADKLEAEEKEKVEEALKEALEWLDDNQSAEKEDYEEKLKEVEAVCNPIVSAVYQRSGGAPGGDADGGVDDDHDEL

SEQ ID NO: 224993 - protein, 414 aa, Zea Mays
MGYNKATPRRNVLSALNNAEANGGTPSVPADGGGGGGAAEAAPVIEFSGREDVERLLAEKMKGKSKNDFKGRVDQMSDYIKKLRACIRWYMELEDGYLAEQEKLLGAMDSENTRHTELEAQLSTAIEELKATNLDLTRRCESLEESFNKEKSEKLIAVESYEKEKQERESAESSRDVLTVDLERVTHDAKRFSEQLKMVQDTNKRLQEYNTSLQQYNSNLQADASKSGETISKLQKEKSAMMETMATLRECNSSMGNQLESSRVSQQEAIRVKEELRKEVECLRVELKQVRDDRDHSAIQLNSLNIELGNYKEQIGKTSKECERFRTKVSELEETCSTQQEQIRTFQKQLAVATEKLKLADVTAIEAMTGYEEQKEKIKYLEERLAQAESQIVEGDELRKKLHNTILSSTTSSI

SEQ ID NO: 224994 - protein, 165 aa, Zea Mays
MIQGAELEDVDEEFNDVKERDDILIDKLDAIEKKIEGKLELLDHTFGKKGRALEEEIKDLVEERNSLSEKSRRPMYRKGFDVKVIDVNRTCKVTKGGQIAKFTALLATGNYNGVVGFAKAKGPTAKIAIQRAYEKCFQNLHYMERYEDHTIAHAIQAKYEKTKDC

SEQ ID NO: 224995 - protein, 377 aa, Zea Mays
MAAAPASVGCGGAYSCETAERTREWMQALATFLGRHRPLLEAHVVNFFKDRLWELVDAEWMECLRREPVESLLKLPSGCVQEHWPATLREFVLTARSLVIPREQKAPQSLVSDIHVAPVGTVLAQGMNSKKKHEIENLAAVVHAIAKRCGAKTVVDVGSGQGYLAQALSFEYQLRVVAIDASSHHASVTIARAERIKKHYAAKCVEKQLLMVPRAVTCHVLSSDTLAAVTLDACKDDNGEHVRDTKTSTKKITQIQESTQGTPPLILAGLHACGDLSVNMLRVFVSCEQVKALVSIGCCYNLLSEDTYEDTDTCPGFPMSKAAKHSELVLGKSIRDLACQRDGEISPWTLHCKILMYMPSELHFKWYLRNIFQKCQG

SEQ ID NO: 224996 - protein, 88 aa, Zea Mays
MMNHAFNRFLPNDVGWRNLFEMVIVSARKPEFFQLSHPLYEVVTDDGLMCPCFKAVELMLVDALIEANDYLGISLHAHDPEDFWKFCN

SEQ ID NO: 224997 - protein, 275 aa, Zea Mays
MAAAGPGLYSEIGKKARDLLYKDYHTDQKFTLTTYAANGAAITAASTRKDEAIFNEIQSQLKHNNVTVDVKATSESNVITTITVHELGTPGLKAILCVPFPYQKSAKAELQYLHHHAGVAASVGLNANPVVNLSGVFGTKAIAVGADAAFDTSSGDLTKYNAGLSYTTPDFVAAATLNNKGDNIAASYYHSVSPTTAVGGELSHSFSTNGNTITFGTQHALDPLTTVKARFNNYGMASALIQHEWRPKSLVTISTEVDTKAIEKSSKEAERGGVE

SEQ ID NO: 224998 - protein, 432 aa, Zea Mays
MMQVISTIMVGHLGEVPLAGAAIAGSLTNVSGFSVLMGLACGLETICGQAFGAEQYHKVALYTYRSIVVLLIASVPMAILWVFLPDVLPLIGQDPQIAIEAGRYALWLIPGLFAFSVAQCLSKFLQSQSLIFPLVLSSLTTLAVFIPLCWFMVYKVGMGNAGAAFAVSICDWVEVTVLGLYIKFSPSCEKTRAPFTWEAFQGIGSFMRLAVPSALMVCLEWWSYELLVLLSGMLPNAALETSVLSICISTVILVYNLPYGIGTAASVRVSNELGAGNPDSARLVVVVALSIIIFTAVLVSVTLLSLRHFIGIAFSNEEEVVNYVTRMVPLLSISVITDNLQGVLSGISRGCGWQHLGAYVNLGAFYLVGIPVALVAGFALHLGGAGFWIGMIAGGATQVTLLTIITAMTNWRKMADKARDRVYEGSLPIQAN

SEQ ID NO: 224999 - protein, 231 aa, Zea Mays
MLMDMFYGATEGVIKHRRRFHFHEAMLEIHDHMHDVWKRRDDDKSIHSSAFSWISSLPFDTKIKEWLIGEEKYKQQTQEKHILLAVADKFLVDRQANKTGASILCFDEIQTIDVFAVVALSGILSRLLSTGTVLVATSNKAPEDLNQDGMQRDIFLELLSKLDESCNEILVGTEKDYRRLIPTEGSTEEARGSRRLVGAAAVMFSCWKIRTYTCQVKTQVVRRCCIVFYCC

SEQ ID NO: 225000 - protein, 207 aa, Zea Mays
MARAAGHLVSQPLPGARPRRGSGHPARAVRLRRLSGPCTGAVPRRRAAPWSCAGPARRAATDGALLSRRCRRAPRCARARARGTRGRKARRLSAVSTARLRRSHPVAGGSRPQRLGRGSGCSAMAAQVRGPLSGRARSPAALAVRALTRRSQCGFVPAGAWYRPWCPVEARARTWYSHGGNQTVERIIMVQNTPCIGVGRKCSPVQV

SEQ ID NO: 225001 - protein, 266 aa, Zea Mays
MADGGGEGGPPAASAALKDQGNEQFKAGSYLKAAALYTQAIKLDPDNATLYSNRAAAFLQLVKLSKALADAETTVRLKPQWEKGHFRKGCVLEAMERYEEATKYGDAETGQSVFSFIVNVVESAVKVWHDTGKVDPRVHFLLDDQKTDTEKYAPVVNIDKAFESPNTHAECFTYLRQYAENCSAKAACMVAPKSIISYPQVWKGQGSRKWKLDQSDGFFVQFEAPALRKIWFVPSTKEKGRTLCRSPEALDIGIHEVLPRIFKEAA

SEQ ID NO: 225002 - protein, 228 aa, Zea Mays
MKARYVYAVLFLLANLCAWLMRENRISYYLAQRGNARCHGDQGCLAAQSVLTISQTFCMFFVGMLISTVTTTKLNDRRNSWHCGWWPVKVALIIGCFFFSQVVPSGWIETYGKVAQVGAGVFLVLQLMSTIRFITQLNYKLCETNFEERYIRVIAISGTAILTFLGLIVFLSLKFVQCWHNMELIVITMVLFFIMCGVSLMSKANKFFMEPALIGGYATFICLLAITR

SEQ ID NO: 225003 - protein, 390 aa, Zea Mays
MKKEPPKFVLKRTLICSYAIFMGNYYSLNSKLSRHEEMVMADMQIRPGEGWEYCPRNTLRKVTKVLLDEFNVTMKAGFENEFFLRRKLVSNGVEMWIPYDNTNYCSTSAFDGASSILQEVYSSLKDSGIVVEQLHAEAGKGQFEIALKYILCTVAADKLIYARETIKSIARKHGLVATFLPKPDLDDFGSGSHVHLSLWENDQNVFMGSSKDNFHGMSKTGEQFLAGVYHHLPSILAFTAPHPNSYDRIQPDTWSGAYLCWGKENREAPLRTACPPGVPLDLVSNFEIKSFDGCANPHLGLAAIVAAGIDGLRRHLKLPEPIESNPSDHSSKLKRLPQNLQESVESLSADKVLHELIGDKLVTTAIAIRKAEINHFAKNPGALKDLIDRY

SEQ ID NO: 225004 - protein, 479 aa, Zea Mays
MLIAAYRSGLEINPNVSKTDAEDGLRKELTGPRPFRITNKNLIDYLFTCSLGIAVSLSLPVQIHTGFGDKDLDLRKCNPLHLRAVLEDERFAKCQIVLLHASYPFSKEASYLASVYSQVYLDFGLAIPKLSVHGMTSSLKELLELAPIKKVMFSTDGYAFPETYYLGAKRARDVVYRVLSAACEDGDLSIQEAIEAIEDIFRRNALNLYKLNVVNGSINHETAIVGKRVSLSSVEEDVLFVRIIWCDASGQHRCRVVPAGRFYEITRNKGVGLTFAAMGMTSFCDGPADGSNLTGVGEIRLVPDMPTLVRLPCSYAIFMGNYYSLNSKLSRHEEMVMADMQIRPGEGWEYCPRNTLRKVTKVLLDEFNVTMKAGFENEFFLRRKLVSNGVEMWIPYDNTNYCSTSAFDGASSILQEVYSSLKDSGIVVEQLHAEAGKGQFEIALKYILCTVAADKLIYARETIKSIARKHGLVATFLPK

SEQ ID NO: 225005 - protein, 661 aa, Zea Mays
MAAARHGGYRSFDVARRREFDLERSRRSKEYRHSSRHRDSDRHRDGSRGREVPNGYIRHRSPYAPPKSRPSKRKDDKEPGEVSSDSGSESGGRPPVLREDGGLGVCRDGGALPASKKRKHSPGFHDTNVSKLRARDEVWSRRGPDAIAAELPLPSPPPMSAVGGCSPMDPEVLVVPNDAERMDAITEGEEDCATRNIFTSRWADAAEEEEVVIVPKKKKSVPPAHLPEQKSTKKIMGSELGEAMGSKTSRSSSSSSNSMGSENWNIEVDEGDGIDSSVGCSLDTHSRSNMRRSGSPEVVRTPRRCFNMLQGCRSIDDFERINTINEGTYGVVFRVRDKKTGEIVALKKVKVDKENGREGFPLTSLREINILLSFDHPSIVDVKEVVVGGHDDDTFMVMEYMEHDLKGVMEAMKQPYSQSEVKCLMLQLLEGVKYLHDNWVLHRDLKTSNLLLNNRGELKICDFGLSRQYGSLLKPYTQPVVTLWYRAPELLLGAKEYSTAIDMWSLGCIMAELLSKEPLFTGKSEIDQLDKIFRILGTPNEERWHGCSKLPGFKGNFVKRPLRDKFPAVSFTGGLTLSEAGFDLLNRLLAYDPEKRISAADALNHEWFREVPLPKMKEFMPTFPALNEQDRRIKRYMKSPDPLVEQQMKEQGSIGDHGLFD

SEQ ID NO: 225006 - protein, 203 aa, Zea Mays
MSTIAANCDVPVSVKCRIGVDDRDSYEELCEFVDKVISKSPTRHFIIHARKALLSGLSPAENRKIPPLKYEYYFALLRDFPEIKFTLNGGITNVSQVSASMRQGAHGVMVGRAAYNNPWNMLGHVDGEIYGKQTRYISRRQILENYQAYGDSIIDQYGPSRPNVRQLVKPLLNLFHSEPGNSLWKRKADSALRHCKECYTSFL

SEQ ID NO: 225007 - protein, 2292 aa, Zea Mays
MDLAGMKRRELQALCKRHGLPAGGTNADLVGRLDAVLSGPAVVEEEVAGVPARKGCLKQTGGGATEAKKVTFGAEVGKARRLRSRVIWSPVVAKTRGKSARAGTDSAAEDGISADVGADVPVRRSRRNSFNPAEAEEAGEAVAVDRKPKRKNQENDEGVAVIAQARVTRRSNLEWSATVLPPAVEKKRGRQNAAESDVQKSALVEVTARTTRSRSIVPVVVPPTVVENKRRKTGDPQTTVELTMLSDVPRSDFPATRSLRNKIVHVNNSVVDETHTTRQLENKMRPSTRRHQQVASSPEDKGQKIPATSKSPLLRWSRRNYSEANSANSVNIKLAKDSSTAQPLAHHNSHSEDLEKQPAVKEPIKRSTRKSIALAALEKEKDVIEGKNPEAHVRRSTRKSVVQVKDTKSIVEETQYANSEDVAKQPATKGPARGLRRKSVITELHEKEKSLIAEKNMETDEAILTRKPVIPVKNIKAVGEGIQIGKGKDVDKQFVVKQPTRRSSRKSVLPDMLENNSGLLAPKMNAEMNVRRSTRKSVLPDMHNEKQDHHKMARNENLQSGKYQDGEKQQKVKDSIRQSRRSIATVLLEGQNNDEGKKFKNPTRRTTHKSHALNAVEEVSMDHIEVGEEGLKLRKRSRFLLEISSSANVSWKHQNAQISNEKDNTEGSQQASNCTTSKRRSSKKRRTTAPEEVMPFKVANDDIVIMEETKDTLEYNNESSSKVQEICQVNAAREEFSSGPLLVTVAPSDEICTVQSVAVVIPGSESGDDANQSSDKSKQPQEHSVTQTVDDHLSETRSGKLDQSTCITGLVSDNCVVSEDKTLMSEDREEQSPVSGEQRVSLEANANEPEEKNLANVTSTDLHTKSLQHDIDRIAKETDKEVLAQENCNDQPVPAQTDQEIKLNDELADPDVLAQENCNDQPVPAQTDLEIKLHDELADPDHEEQSPVSGERRVSLEANANEPEEKNLANVISIDLHTKSLQHDNGRIAEETDKDVLSFVFPIEEHEEKYAVSPIAVEKSFRQEASAIESAGKPLTVIFSNDLHTKHLQHDCDVLIKETGEEVLAQENCNDQPVPAQTDLEIKLNDELADPDVLAQENCNDQPVPANEPEEKNLANVISTDLHTKTLQHDNDRIAEETDKDHEEQSNVFGERRVSLEANANEPEEKNLANVISTDLHTKTLQHDNDRIAEETDKDHEEQSNVSGERRVSLEANANEPEEKNLANVISTDLHTKTLQHDNDRIAEETDKDVSSLVFPIEEHEEKYAVSPIAVEKSVSREASACESAGKPLTVIFSNDLHTKHLQHDCDVLIKETGEDVLAQENCNDQPVPAQTDLEMKLNDELADPEVLAQENCNDQPVLAQTDLETKLNDELADLAMESGCSITERNEGLVAHNLDQEGFLEATPECKQECGLPEETVISSKETGSLLCADQSPIGLESLFSQESIVESVGHCALASATTHTENGFDDSKDCHNKSALENVHVPEPCSHNDTKGGIFKNVDCMHTSQRDDRMEGVPEANTDEEHVLSAFLLDANHLNVVINSEEVVCEGEDSKELLHSEDCKASSEKTDVNDGNVYGISDAVVRCALHAPADDNYEIFLGPNTDVPRQVYNDGCSDVKEDRFASKPWTIDIIEDASVKERSNLKDWQLDSKLEGTEIVESGLYFNKDIGNILHSGSIGEITPSGSGLSKDSSVDYRGEVLDGFSMEASLERSSTRGEQNGCRLDAIENPSITLATSGYKHEGALSEEAVYTKKNYAGTCLSNPRELIMELQSHFSKENINESDPHDSLVFPTAENSADEQLVKVHHGSNLSQLGLTDLLDGPIGCSNTDVLCQCDNHKNQSNEDKVEEVEAVSAAKYIESEVVLLPSQERSNLNNEQLNTKLESPNIMGSCLNCDNDVCNTSDNGSVFVIGKRTPSASGLPEDYPKDSDLQQPVLDSFSVVSSFQDNISGKKTVSGVAGSEILSLSLATPDYKHEDGFSEEAVCRTKNYTGTSSVDPRHLDMEGHSIYSEGDTYQGPCQDLGRHEEQESCMSIPMQAKESGGVLRSSHTKGSVTAAQIDLAGDAHLIVSDNAAAKQVFSEEKEETKSISSSDIDILHEKSYSSGHDDHAACAAETQFYHPQKASISDGLHLGPSSLQVESLDALDSDILYVNTGVLEQHHKEGYYEPSVYQITSGICTMSEAEPFEVLETGKDVKTPSKLDEQLNPGLDGDEAEKHSLDCGTDTSPVMSKRTLSSPGSGPCQQYVNESTTSTQSTDNHPNDLPAPRSPEQSACFQNDNDSGSAFVKAAGEEV

SEQ ID NO: 225008 - protein, 1979 aa, Zea Mays
MDLAGMKRRELQALCKRHGLPAGGTNADLVGRLDAVLSGPAVVEEEVAGVPARKGCLKQTGGGATEAKKVTFGAEVGKARRLRSRVIWSPVVAKTRGKSARAGTDSAAEDGISADVGADVPVRRSRRNSFNPAEAEEAGEAVAVDRKPKRKNQENDEGVAVIAQARVTRRSNLEWSATVLPPAVEKKRGRQNAAESDVQKSALVEVTARTTRSRSIVPVVVPPTVVENKRRKTGDPQTTVELTMLSDVPRSDFPATRSLRNKIVHVNNSVVDETHTTRQLENKMRPSTRRHQQVASSPEDKGQKIPATSKSPLLRWSRRNYSEANSANSVNIKLAKDSSTAQPLAHHNSHSEDLEKQPAVKEPIKRSTRKSIALAALEKEKDVIEGKNPEAHVRRSTRKSVVQVKDTKSIVEETQYANSEDVAKQPATKGPARGLRRKSVITELHEKEKSLIAEKNMETDEAILTRKPVIPVKNIKAVGEGIQIGKGKDVDKQFVVKQPTRRSSRKSVLPDMLENNSGLLAPKMNAEMNVRRSTRKSVLPDMHNEKQDHHKMARNENLQSGKYQDGEKQQKVKDSIRQSRRSIATVLLEGQNNDEGKKFKNPTRRTTHKSHALNAVEEVSMDHIEVGEEGLKLRKRSRFLLEISSSANVSWKHQNAQISNEKDNTEGSQQASNCTTSKRRSSKKRRTTAPEEVMPFKVANDDIVIMEETKDTLEYNNESSSKVQEICQVNAAREEFSSGPLLVTVAPSDEICTVQSVAVVIPGSESGDDANQSSDKSKQPQEHSVTQTVDDHLSETRSGKLDQSTCITGLVSDNCVVSEDKTLMSEDREEQSPVSGEQRVSLEANANEPEEKNLANVTSTDLHTKSLQHDIDRIAKETDKDVLAQENCNDQPVPAQTDLEMKLNDELADPEVLAQENCNDQPVLAQTDLETKLNDELADLAMESGCSITERNEGLVAHNLDQEGFLEATPECKQECGLPEETVISSKETGSLLCADQSPIGLESLFSQESIVESVGHCALASATTHTENGFDDSKDCHNKSALENVHVPEPCSHNDTKGGIFKNVDCMHTSQRDDRMEGVPEANTDEEHVLSAFLLDANHLNVVINSEEVVCEGEDSKELLHSEDCKASSEKTDVNDGNVYGISDAVVRCALHAPADDNYEIFLGPNTDVPRQVYNDGCSDVKEDRFASKPWTIDIIEDASVKERSNLKDWQLDSKLEGTEIVESGLYFNKDIGNILHSGSIGEITPSGSGLSKDSSVDYRGEVLDGFSMEASLERSSTRGEQNGCRLDAIENPSITLATSGYKHEGALSEEAVYTKKNYAGTCLSNPRELIMELQSHFSKENINESDPHDSLVFPTAENSADEQLVKVHHGSNLSQLGLTDLLDGPIGCSNTDVLCQCDNHKNQSNEDKVEEVEAVSAAKYIESEVVLLPSQERSNLNNEQLNTKLESPNIMGSCLNCDNDVCNTSDNGSVFVIGKRTPSASGLPEDYPKDSDLQQPVLDSFSVVSSFQDNISGKKTVSGVAGSEILSLSLATPDYKHEDGFSEEAVCRTKNYTGTSSVDPRHLDMEGHSIYSEGGTEKSNLQDNLAFLSAESGKDEPIICHVEKLVDAHASSDTYQGPCQDLGRHEEQESCMSIPMQAKESGGVLRSSHTKGSVTAAQIDLAGDAHLIVSDNAAAKQVFSEEKEETKSISSSDIDILHEKSYSSGHDDHAACAAETQFYHPQKASISDGLHLGPSSLQVESLDALDSDILYVNTGVLEQHHKEGYYEPSVYQITSGICTMSEAEPFEVLETGKDVKTPSKLDEQLNPGLDGDEAEKHSLDCGTDTSPVMSKRTLSSPGSGPCQQYVNESTTSTQSTDNHPNDLPAPRSPEQSACFQNDNDSGSVGICQSSRRRGIDELCGKLQSFKVSSAVKGSYVAMGAPRPKPGDSTSRSAAALLRNIENTTAVKAGRPPVKPNADGKDSSRRALQPISGRPDSR

SEQ ID NO: 225009 - protein, 1395 aa, Zea Mays
MYSFPFSEVLAQENCNDQPVPAQTDQEIKLNDELADPDVLAQENCNDQPVPAQTDLEIKLHDELADPDHEEQSPVSGERRVSLEANANEPEEKNLANVISIDLHTKSLQHDNGRIAEETDKDVLSFVFPIEEHEEKYAVSPIAVEKSFRQEASAIESAGKPLTVIFSNDLHTKHLQHDCDVLIKETGEEVLAQENCNDQPVPAQTDLEIKLNDELADPDVLAQENCNDQPVPANEPEEKNLANVISTDLHTKTLQHDNDRIAEETDKDVSSLVFPIEEHEEKYAVSPIAVEKSVSREASACESAGKPLTVIFSNDLHTKHLQHDCDVLIKETGEDVLAQENCNDQPVPAQTDLEMKLNDELADPEVLAQENCNDQPVLAQTDLETKLNDELADLAMESGCSITERNEGLVAHNLDQEGFLEATPECKQECGLPEETVISSKETGSLLCADQSPIGLESLFSQESIVESVGHCALASATTHTENGFDDSKDCHNKSALENVHVPEPCSHNDTKGGIFKNVDCMHTSQRDDRMEGVPEANTDEEHVLSAFLLDANHLNVVINSEEVVCEGEDSKELLHSEDCKASSEKTDVNDGNVYGISDAVVRCALHAPADDNYEIFLGPNTDVPRQVYNDGCSDVKEDRFASKPWTIDIIEDASVKERSNLKDWQLDSKLEGTEIVESGLYFNKDIGNILHSGSIGEITPSGSGLSKDSSVDYRGEVLDGFSMEASLERSSTRGEQNGCRLDAIENPSITLATSGYKHEGALSEEAVYTKKNYAGTCLSNPRELIMELQSHFSKENINESDPHDSLVFPTAENSADEQLVKVHHGSNLSQLGLTDLLDGPIGCSNTDVLCQCDNHKNQSNEDKVEEVEAVSAAKYIESEVVLLPSQERSNLNNEQLNTKLESPNIMGSCLNCDNDVCNTSDNGSVFVIGKRTPSASGLPEDYPKDSDLQQPVLDSFSVVSSFQDNISGKKTVSGVAGSEILSLSLATPDYKHEDGFSEEAVCRTKNYTGTSSVDPRHLDMEGHSIYSEGDTYQGPCQDLGRHEEQESCMSIPMQAKESGGVLRSSHTKGSVTAAQIDLAGDAHLIVSDNAAAKQVFSEEKEETKSISSSDIDILHEKSYSSGHDDHAACAAETQFYHPQKASISDGLHLGPSSLQVESLDALDSDILYVNTGVLEQHHKEGYYEPSVYQITSGICTMSEAEPFEVLETGKDVKTPSKLDEQLNPGLDGDEAEKHSLDCGTDTSPVMSKRTLSSPGSGPCQQYVNESTTSTQSTDNHPNDLPAPRSPEQSACFQNDNDSGSVGICQSSRRRGIDELCGKLQSFKVSSAVKGSYVAMGAPRPKPGDSTSRSAAALLRNIENTTAVKAGRPPVKPNADGKDSSRRALQPISGRPDSR

SEQ ID NO: 225010 - protein, 827 aa, Zea Mays
MSSAPVAGAAFERYQQRGGGGPAAANGNTVFKSGPLFISSKGIGWKSWKKRWFILTRTSLVFFKSDPSTLPQRGGEVNVTLGGIDLNNSGSVVVREDKKLLTVLFPDGRDGRAFTLKAETSEDLFEWKTALEEALAQAPNAALVMGHNGIFRNDTADTYEGAIPNWREKRPIKSLVTGRPILLALEDIDGSPSFLEKALRFLEKHGIKVEGILRQSADVEEVDRRLQEYEQGRTEFSADEDAHVVGDCVKHVLRELPSSPVPASCCTALLEAFRLETKDARINAMRSAISETFPEPNRRILKMMHTVASHTSENRMTASAVAACMAPLLLRPLLAGECEMDEVFDMDGDDSAQLLAAANAANSAQGIVATLLEEYEGIFHDEHLRCSLSPESQIEDSGTEASTDDGNLEAKGNGFHDAENDVDQEMDDDNGVERILSGKLSESSGYAGSDLYDYKAVNAEESDAERPVKMLEGNLNLSKVQNSLSTENGSANVDSLLSENNPSNPTVGHETLSMGEILSSFDPGISVPTHSPEYSVERQTNKTNGSHPHVKRSNFWGRNNARKGQNSESVDSSGEEELAIQRLEIAKNDLQNRIAKEARGNAILQASLERRKQALHERRLALEQDVSRLQEQLQAERDLRAALEVGLSMSSGQFSSARSMDVKTKAELEEIALAEADVARLKQKVAELHLQLNQQRQHQYGSVVDANDRHHRLPGHFSQQNFVQQGFDMNLAFCNQEKQRNEESSVESSQWRNIKQHVLPYGSSRPLTRKLSFDASSSESRGTEPSTSMSTENTSVSINVPKLAEGIEFGRQPMVTSSTLEPPEVGG

SEQ ID NO: 225011 - protein, 389 aa, Zea Mays
MRERARHATRVSPMPPPTGGEDPEADAAPSCSGSADEADPHEQVLPNGDIYTGQWRGAVPHGAGKYLWADGCMYEGEWRRGKATGRGRFSWPSGATYEGEFLDGFMHGAGTYVGASGDTYRGVWAKNLEHGAGEKRYANGDCYDGEWRAGLPDGCGRYAWRDGTEYAGGWRAGLIHGRGTLVWANGNRYDGGWEGGRPRGQGTFRWADGSLYVGFWGREAPSGAVHQKGVYYPSPAAMGNSPRARDPREVFARDLPECVRSGTEAQSALTSLRSLKWLMRSVSGRGSSSSGWSNGSGGSLVHFWGSDGEVKCDLGDDWRRRSVREGRGLPPPSPALVPYLPNGAPLRLSKKQGVTIAKGHKNYELMLNLQLGISRKARSSFIRSEIISI

SEQ ID NO: 225012 - protein, 264 aa, Zea Mays
MLITKYCLYVQMTKLAIIPCTVILETLFFRKKFSRNIKLSLSVLLLGVGVATVTDLQLNVMGSVLSLLAIITTCIAQIMTNTIQKKFKVSSTQLLYQSCPYQALTLFLVGPFLDGFLTNQNVFAFDYTTQVLFFIVLSCLISVSVNFSTFLVIGKTSPVTYQVLGHLKTCLVLTFGYVLLHDPFSWRNILGILIAVIGMVLYSYFCTRETQQKPAEASPQAVQAKEGESNPLISDSLSAAENGGSATDDEPLKVPMWSSKYSKA

SEQ ID NO: 225013 - protein, 477 aa, Zea Mays
MPTKAFAGDLKLLTLNLRNHSEYAVKGIKMKLSNPRFLIPGDSSDIGLKFPHCLKRHVQSESSVVSAKTMKDNFKSLLFAFPQDIEIQAGAALSWPIWFHAATPGNVSLYISLYYEMGSSSDIKYRTLRMHFNLEVLPSLDVSFSVSTSSSRLQEYIVRMDVMNKTPSESFVLHQLSCVGDKWAVSALAACSSINSVETVSENQAVSYFFKIKDCEADSCKEAESDSCTSDMALCPGSSTDLFDIARSPFVDFHHQERCRQVKMAKGPCSLLDFVLISKAVDNSSKPTPDFELLSHHTCHCSALSQNPIWWLMEGPRTISHDFSKSYCEANLQLVIHNSEAHKILVRVVTFDVIPEKTVHPHDSTSAQGGWYDVSLESDVKAISSSKSTHQEKRSSKSIPPYVWCSLSCAQIELQPDSCARVPLKVCIFAPGTYNFSNYELQWKVHLSEGPHVGENENRLSGGGLGYPFYVTVLQGV

SEQ ID NO: 225014 - protein, 754 aa, Zea Mays
MPASSVSGGSGPGGVSPDAIIEWLQDEMGYPSAPPAPDQLRKICRGNMIPVWSFLLRRVRSERTVATARRNILVHGVAARRAREGGAMGAGAGDAAAREAEARERDLAAEEAERLRGIVRRQRKELRARIAEVAREEAERKRVLGERSNARHKQVMLQAYEQQCDEAHKIFAEYQRRLHQFVNQARDVRRSSIGVAGATGERSIRKACETLAADMIETIRSSFPAFEGCGINSSCQLDAEKLGIDLVGEIPTYVKLVALDSLKNPFMLLQSIITYTSRMKTLIHRETDKIDIRADAELLRYKYENEQVIDAASTDASSPLPYQVYGNGKTGSQLSTRGTYDQLLERQKEHVQQFLATEDALNKAAEAKALSQKLLQRLYGTADMAGNKKLPTGNTTQNVTNSRHLELDVWAKEREVAGLKASLSTLTSEVQRLYKLCAEWKEAEDSLKKKWKKIEEFDARRSELEFIYSALQRANMDSSAFWEQQPLSARGYASTTIIPACHAVVDMSTNSRDLIERELAAFSQSLDNSLCRLPATPQALLEAVGSNGVTGSEALAAAEKHAALLTARAGARDPSAVPSICRISAALQYNFVSPGTEGTDSGLASVLNSLEFCLKPCGSEASILEDLSKSINLVHTRRNLVENDRVLLNRAHRAQQEYERVANYCLKLAGEQEKVVSERWLPELRNAVQEARRCFDDCQRVRGLVDEWYEQPAATIVDWVTIDGQSVGAWINLVKQLHMEISRRTLAMSSVGDD

SEQ ID NO: 225015 - protein, 416 aa, Zea Mays
MTSELMPGGVNSPVRAFKSVGGQPVVFDSVKGSRMWDVDGNEYIDYVGSWGPAIIGHADDKVNAALIETLKKGTSFGAPCLLENVLAEMVISAVPSIEMVRFVNSGTEACMGALRLVRAFTGREKIIKFEGCYHGHADSFLVKAGSGVATLGLPDSPGVPKGATYETLTAPYNDVEAVKKLFEDNAGEIAAVFLEPVVGNAGFIPPQPGFLNALRDLTRQDGALLVFDEVMTGFRLSYGGAQEYFGITPDVTTLGKIIGGGLPVGAYGGRRDIMEMVAPAGPMYQAGTLSGNPLAMTAGIHTLKRLTEPGTYEYLDKITGELVRGILDVGAKAGHEMCGGHIRGMFGFFFTGGPVHNFGDAKKSDTEKFGRFYRGMLEEGVYFAPSQFEAGFTSLAHTSQDIEKTVEAAEKVLKRI

SEQ ID NO: 225016 - protein, 121 aa, Zea Mays
MVDVWIEVEANQYTAALNPILFQVLISPMLGGTTDQKVVDENLEKLKKVLEVYEARLTKCKYLAGDFLSLADLNHVSVTLCLFATPYASVLDAYPHVKAWWSGLMERPSVQKVAALMKPSA

SEQ ID NO: 225017 - protein, 121 aa, Zea Mays; identical to SEQ ID NO: 225016

SEQ ID NO: 225018 - protein, 619 aa, Zea Mays
MEYGGEDYMKPDTESYNWVIQAFTRATSYDRAADVAELLGMMVEDHKRIQPNARTYALLVECFTKYCMVNESIRHFRALQRIPGGTEVLYNEGNCGDPLSLYLRSLCLDGRPVELLEALEAMANDNQSIAPRAMILNRKYRTLVSSWIEPLQEEADVGFEIDYVARYIEEGGLTGERKRWVPRRGKTPLDPDEFGFAYSNPIETSFKQRCFEELKLYHRKLLITLRNEGPGILGDVSEEDVRRVIERLKKLVVGPKKNVVKPKAASKMVVSELKTELEAQGLPTDGTRQVLYQRVQKARRINRSRGVPLWVPPVEDEEEVDEDLDELISRIKPEDGNTEFWKRRFLGETRNYLCEEDSKEDGQDLDDELEDDDDNDDDEDDDESVKEAEEDEIDDEEVVEQTENQVGDDTKDKPAKEPNHHLQMIGVQLLKDIERTPVSSKKLKRMPEIDDDEDWFPEDPIEAFKVMREERMFDVSDMYTTADAWGWTWEREIKNKMPRKWSQEWEVELAIKIMHKVIELGGTPTIGDCAIILRAAMRAPLPSAFIPILQTTHSLGYKFGSPLYDEVVLLCLDLEEIDAAIAVVAEMETCGVKVPDETLDKVLASKRSGNSALPPPTEE

SEQ ID NO: 225019 - protein, 160 aa, Zea Mays
MNVDHSAPGLCMFRKPCSAPKWKEMTGSGIFAAGGEGEEDESANVSATSVRTAPKNYQAISTISHISFAEEESISPKKPTSISEVAKQRELSGTLLSEDDSKMKRQISDLKSKELSGHDIFAPPEDPRPRNSENGSTSQTPGKNAHVLTSDSELTLIIIT

SEQ ID NO: 225020 - protein, 174 aa, Zea Mays
MSSAQIAPADHVCYVHCSFCNTVLAVSVPGNSMLNIVTVRCGHCANLLSVNLRALMHSLPEQDHQLQENIKVHGINGTLHDDHQYCGHLDQLGSSSSSRFRRLPVMCSPQNEQHLLQEQTLNNNARRKAPFHLQRRGSGFRRRITDSSRKRYAGSKRTTPTLTTGKPSARQPRM

SEQ ID NO: 225021 - protein, 756 aa, Zea Mays
MSFGGMFDGAGSGVFSYDATGGGTGMHNPGRLVPAPPLPKPGGFGATGLSLGLQTNMEGAQLGDLGRMGLIGGGGSGSGGDGDSLGRGREDEIDSRSGSDNVDGASGDEIDPDNSNPRRKKKRYHRHTPQQIQELEAVFKECPHPDEKQRMELSKRLNLESRQVKFWFQNRRTQMKTQIERHENALLRQENDKLRAENMTIREAMRNPICANCGGAAVLGEVSLEEQHLRIENARLKDELDRVCALAGKFLGRPISSGSSMSSSLQGCSGLELAVGSNNGYGPGPLGASALQPLPDLLGAGLPGPVGSAAMRLPMGIGALDVALHGAAADGIDRTVLLELALAAMEELMKVAQMDEPLWLRSPDGSGLEALNLDEYHRAFARVFGPSPAGYVTEATREAGVAITSSVDLVDSLMDAARWSEMFPCIVARASTTDIISSGMGGTRSGSIQLMHAELQVLSPLVPIREVVFLRFCKQHAEGLWAVVDVSVDAILRPDGGHHHAQNGGGAGYMGCRLLPTGCIVQDMNNGYSKVTWVVHAEYDEAVVHQLYRPLLQSGQALGARRWLASLQRQCQYLAILCSNSLPARDHAAITPVGRRSMLKLAQRMTDNFCAGVCASAAQKWRRLDEWRSGEGGDAAGNGGSAAAGEGEEKVRMMARHSVGAPGDPPGVVLSATTSVRLPATSPQRVFDYLRDEQRRGEWDILANGEAMQEMDHIAKGQHHGNAVSLLRPNVSTTTALLLTSIFTAVFTVAINESSL

SEQ ID NO: 225022 - protein, 159 aa, Zea Mays
MPGYYDIDDILMEDEPISVVFQVTANGVGLLDPGAESNCVEKGAKVDLPFWLAHGLLSLEQAVSINPPPCFTQKTWKEIQADAACVDLRVRCPYFYELGCKIVPLVSDKSIGLFLRYAFTSRYKEVLSKSHSSSMMTVPKFVPRLTKEETRAELFFCLC

SEQ ID NO: 225023 - protein, 225 aa, Zea Mays
MLAKGRKVAGRREEMSANYAFGPQDDDAIIKHRLLTRTTTTRGEPPLKKLQKKFMSFATEIEKDADNISDCERLYKAFLHEINTFELPLLKSKAVVDANIREKESFNELQVEIERQILHAKTDIEDLKKQLEQSKIERQHKEECEAIRKLISLQPPRSETEKLIADLEKEITDLKAENVACIRTLELRKKQFALLLHVDYLQHQFSFVKSTMKCLDSAFIWYLDN

SEQ ID NO: 225024 - protein, 429 aa, Zea Mays
MILILQWQVIVRDIVSKLLIVQFRAHTSPISALCFDPSGTLLVTASVHGQNMNVFRIIPPHGTSEAGQIGTYVHLYKLQRGITNAIIKDISFSDDSDWIMISSSRGTSHLFSISPYCGSTRFRYSDNNPVENDYTVDSSVNHTAHWSQNSATSLSLSQKTLFVSGPPVTLSVVSRIRNGSNVFKGAVHGAAAFATGASTPISGAIASTFHNRMAGDIDSDGSLRMKYYLLVFSPSGSIIQYALHLSAEQDSGLDFRTSPISYGPERETDTKFVIEALQKWDVCYKRNRRDSAESFAYSDFENGENNKLLLKAMWKGTSIYPFDCSVERQKLSADENRNLYISQSELQTHVVQTPLWSKSRIHFQVMEGETLEADNADVISGEVEVEKVQTHNIESRSKNLIPVFDSLHTSRFQQTRYIQIVHLSTFVSG

SEQ ID NO: 225025 - protein, 774 aa, Zea Mays
MRDGAPAPRAGGGFFSARSLSNCMRIVSSGASTAASTLRSAGASLVNSMASHEEDASRDQVQWAGFDKLECGGGLLRQVLLLAYKSGFQVWDVEHADDVRQLESRHDGAVSFIQVLKDPIFTTESGDRFADTRPLLALACEGTHTGSGKNHDTNVPVFDGTNGAFHSIGGENLPTVLLFYSLRTHEYVHTLRFRSAVYSIRCSPRVVAISQATQIHCFDAATMEREYTVLTSPTVAQVSGYGPLGLGPRWIAYSGNPVPVPDTGRVSPQLLSLSPSVPPPGSNGSVVAYYAKESSKQLAAGIATLGEVGYNKLSKYYADFIPNGNGTIKQRSSVYKANGVTNGHLIDSEYAGTVIVRDIVSKLLIVQFRAHTSPISALCFDPSGTLLVTASVHGQNMNVFRIIPPHGTSEAGQIGTYVHLYKLQRGITNAIIKDISFSDDSDWIMISSSRGTSHLFSISPYCGSTRFRYSDNNPVENDYTVDSSVNHTAHWSQNSATSLSLSQKTLFVSGPPVTLSVVSRIRNGSNVFKGAVHGAAAFATGASTPISGAIASTFHNRMAGDIDSDGSLRMKYYLLVFSPSGSIIQYALHLSAEQDSGLDFRTSPISYGPERETDTKFVIEALQKWDVCYKRNRRDSAESFAYSDFENGENNKLLLKAMWKGTSIYPFDCSVERQKLSADENRNLYISQSELQTHVVQTPLWSKSRIHFQVMEGETLEADNADVISGEVEVEKVQTHNIESRSKNLIPVFDSLHTSRFQQTRYIQIVHLSTFVSG

SEQ ID NO: 225026 - protein, 163 aa, Zea Mays
MMPPPPPWCSPSSPSALPRPCFLFPVRPLFCSNRSPRRVPPWLPLPLRSALARTVQQHTGAKPVSATLAKCSMKYRSELHLDLCSPNPRRRNTLGEASPPLLFLCSACLINCLNCVSVINRSPPSMSRFAHCSSTKSQNRGRHACAIRTNFTWLFALCDCGLL

SEQ ID NO: 225027 - protein, 426 aa, Zea Mays
MLRRLRLRSPVCAVAGAAAAMASLTNVAYADGLFRRQSPPSNPGDEDNLGASAFGRDPETLERMARALREINNSPLAKQVFGLMRKQEETRLTELEAEKVQYAIYEKLRDMERMEKKAEDYRNSLQQEAQVKAQALRFEDELARKRMQTEHAAQRQQDAELVKMQEASALRREEARRATEQKILEEMIRTEKEKAEIDQEVNRAKALAEAEARVHEEKQSEEVTKRMMLERMKGEKEKWLAAINTTFSHIEGGFKALLTDRSKLIMGIGGVTALAAGVYTTREGARVTWSYINRILGQPSLIRESSMPKFPLPMSRLLKPSSASLSGGAGFENVILHPSLKRRIEHLARATANTKSHGAPFRNMLFYGPPGTGKTLVAREMARKSGLDYAMMTGGDVAPLGSEAVTKIHQIFDWAKKSKKGVTVPI

SEQ ID NO: 225028 - protein, 632 aa, Zea Mays
MAMMSRTRDLLMEGFEGLVRDGSFKWGLPRRGDTAMDDGGDDDGSLSVQRSSIAGLSFKANAVVARCSRILGVSTNDLQNNFDKQASDSIKQPKSYARNFLEYCCFLALAQISQVTGYLADKSFRRLSFDMMLAWEVPYSSSQLTVKAEVDSTVSSEAFTRIAPAIPTIADVVTCANLFDVLSCSSGGRLSFSVYEKYLSELDRAVKKMKTQSESSLLSNFRSQRGERILEVDGTLTTQPVLEHVGISTWPGRLILTDHALYFEALRVVTYDKPKVYELAEDLKQVVKPELTGPWGSRLFDKAVMYKSTTLTEPVIIEFPELAGHSRRDYWLAIISEVLYAHRFVRKFDISGIDKEETILKAVLGIMRLQAIEELHFEVPNRYESLLLFSQCDKLPGGDVILETLASSIASRTSDRTNQPGTSRGMHAVLSNLGMVSPVNSGERLFVGEIVVGEISALQKAVTDSMNNYKKVELAQASVDGVKVDGLDTNLAVMKELLSPVSELWRVLLLLTSWDEPMKSMLFCFLFSYIIIRGWVIYFIVTVLLFSATFMFLTRLTNQGKQMSEVKVVSPPPLNTMEQLLAVQNAISKIEELVQDANIVLLKIRALLLAFPSQLFLLCGSFITTFEGRLLW

SEQ ID NO: 225029 - protein, 347 aa, Zea Mays
MQIREGPARRQAPSAAGALRSPMSAMMLAMFATMASFYVAGRLWQDAQNRLHLIKELDRRTGQGQSAISVDDTLKVVACRQQGKRLASLEMELAAAKHKGFVGKYTPETNGTHSGKKPLIVIGIMSSFGRKNYRDAVRKSWLPTGSMLKKLEEEKGIVVRFVVGRSANRGDTFDREIDDENRSTKDFLILDDHIESDEELPKKTKSFFANAAETFNAAFYAKVNDDIYINVDTLSAMLETHWDRPRVYIGCMKSGEVFSDLTHKWYESDWWKFGDGKSYFRHASGEMFVISRAIAQFISINKSALRTYAHDDVSVGSWMIGLAVNHVNEAKLCCSSWPSVALRSEPQ

SEQ ID NO: 225030 - protein, 394 aa, Zea Mays
MLSPWHPLLSPVAPPAMELRSPLNSHNCSLTSSIRPPPPRSLARAPPTLSATAAAVSSLSATSAAISSPSCPKKKGGMPGSVRLRDSDILQRITVRQAEEKRLYGAICAAPAVVLVPWGLHRRKKITCHPSFIGDLPAFRAVESNVQVSGELTTSRGPGTTFQFALSFVEQLFGLRAAEDMDKILMAQTHDGLERSAEVNELEWSCGRNPDVLIPIANGCEELEIIILVDILRRAKINVVLASVEKYPAVLGSQRMKIVADKSIMSASDSIYDLIILPGGPAGAEQLHRSRILKKLLKQQMQAGRMYGGVCSALKVLQQEGLLEDKTVTAHHAVASELTCQVIDQPNVVIDGNLITGKGLGTVVDFALAIIRKFFGHGRAKAVANGIVFEYPKS

SEQ ID NO: 225031 - protein, 762 aa, Zea Mays
MNRCDISEDETTGALNALFAIPATATTLSSGSPHTAVTGGIMERNKAYPKLKTKIRIDQDEQKSYKKTKIEAWHQIDRGQDHRCDSDGVEVPDEHKALLAKAKAMKGSHETDDMSLCKKNIASGYDSSENVNNVNALDVPFHSEKKEHPSDVDILDLSCKKNAVKKLEIQLNSLHCISNGPQKNLKEKKSNKLKSKEMASKEDSRHGKVQHADAVLSSLGHLNYELGADNKFVTGKESLSEQLETLPAKQVLDLAEAPGRDVAYLQSSTTVSSSSSKISSSRRNTNSQEANDSPIKSASSLPLRDFSIKMISGNRKDGTVDASLGNTHNLARYQNSEVIALNYGQQAGNFEGDQVAGEPNFHGSLQGISDSNIKEIPQSAGAQVSNITGFGRSLDNSLPEASCREDLTVNDTVVGRGDHQLCSGEQKDFNMEVRLPLPDQHCFGRINTESGSVRHESKNIEVRQGGKQKVCPTSVKSESLKMKAKLVRFNVETGVQHGSVKQVTSSTLDTSPMRKDGSMITFALKEARDLKHKANDLKNKGQELESTGLYFEAALKFLHVAFLLETPSFDISRQGGGGRSMKMYSETAKLCNFCAYEYERCKKMASAALAYKCVEVAYLKAAYYKHRTATKDQQELQAAVQITRGEPPSPSALDIDNLNSHGSSNASSLKGDNSPHVPGNHLPLAIHNQAQLLRLLAYTNDMNLAFDATRKAESVIASATGCPERGVVGDGLASVKAVLDLNFNNVNELLRLVRVSMESISS

SEQ ID NO: 225032 - protein, 760 aa, Zea Mays
MERNKAYPKLKTKIRIDQDEQKSYKKTKIEAWHQIDRGQDHRCDSDGVEVPDEHKALLAKAKAMKGSHETDDMSLCKKNIASGYDSSENVNNVNALDVPFHSEKKEHPSDVDILDLSCKKNAVKKLEIQLNSLHCISNGPQKNLKEKKSNKLKSKEMASKEDSRHGKVQHADAVLSSLGHLNYELGADNKFVTGKESLSEQLETLPAKQVLDLAEAPGRDVAYLQSSTTVSSSSSKISSSRRNTNSQEANDSPIKSASSLPLRDFSIKMISGNRKDGTVDASLGNTHNLARYQNSEVIALNYGQQAGNFEGDQVAGEPNFHGSLQGISDSNIKEIPQSAGAQVSNITGFGRSLDNSLPEASCREDLTVNDTVVGRGDHQLCSGEQKDFNMEVRLPLPDQHCFGRINTESGSVRHESKNIEVRQGSGTAQRLGMLFKKEKSHLRILNRDIQNHVNQVVNFPLKGGKQKVCPTSVKSESLKMKAKLVRFNVETGVQHGSVKQVTSSTLDTSPMRKDGSMITFALKEARDLKHKANDLKNKGQELESTGLYFEAALKFLHVAFLLETPSFDISRQGGGGRSMKMYSETAKLCNFCAYEYERCKKMASAALAYKCVEVAYLKAAYYKHRTATKDQQELQAAVQITRGEPPSPSALDIDNLNSHGSSNASSLKGDNSPHVPGNHLPLAIHNQAQLLRLLAYTNDMNLAFDATRKAESVIASATGCPERGVVGDGLASVKAVLDLNFNNVNELLRLVRVSMESISS

SEQ ID NO: 225033 - protein, 1117 aa, Zea Mays
MDQNPSTVAVEPISRNNGFGAPSASDSIKKKKFLSTNDEESIAGSDSLDTSLSGSDSKSLKFQTKVCLSNDLPRENAVIYSGLGLDISPRSSMEESPNGLGGLSPECSNVPFESPRTILQVMTCLPVPGGFLLSPLHGNLLQLRNKVAPVLKNLETHLDMENVSRALEGRSQSFHPLGLIRGNVTKQMRPCSKKKVAVDTKTSKYKGDASATMNNEVNIQVPASQKEKMNTNNKNEFEVGSARKEIPASVKHGELYMQPASSVSTMNAYHVPAPVVIEDHWVRCDICHKLRLLPYGMNPSMLPKKWKCTMLHWLPGMNRCDISEDETTGALNALFAIPATATTLSSGSPHTAVTGGIMERNKAYPKLKTKIRIDQDEQKSYKKTKIEAWHQIDRGQDHRCDSDGVEVPDEHKALLAKAKAMKGSHETDDMSLCKKNIASGYDSSENVNNVNALDVPFHSEKKEHPSDVDILDLSCKKNAVKKLEIQLNSLHCISNGPQKNLKEKKSNKLKSKEMASKEDSRHGKVQHADAVLSSLGHLNYELGADNKFVTGKESLSEQLETLPAKQVLDLAEAPGRDVAYLQSSTTVSSSSSKISSSRRNTNSQEANDSPIKSASSLPLRDFSIKMISGNRKDGTVDASLGNTHNLARYQNSEVIALNYGQQAGNFEGDQVAGEPNFHGSLQGISDSNIKEIPQSAGAQVSNITGFGRSLDNSLPEASCREDLTVNDTVVGRGDHQLCSGEQKDFNMEVRLPLPDQHCFGRINTESGSVRHESKNIEVRQGSGTAQRLGMLFKKEKSHLRILNRDIQNHVNQVVNFPLKGGKQKVCPTSVKSESLKMKAKLVRFNVETGVQHGSVKQVTSSTLDTSPMRKDGSMITFALKEARDLKHKANDLKNKGQELESTGLYFEAALKFLHVAFLLETPSFDISRQGGGGRSMKMYSETAKLCNFCAYEYERCKKMASAALAYKCVEVAYLKAAYYKHRTATKDQQELQAAVQITRGEPPSPSALDIDNLNSHGSSNASSLKGDNSPHVPGNHLPLAIHNQAQLLRLLAYTNDMNLAFDATRKAESVIASATGCPERGVVGDGLASVKAVLDLNFNNVNELLRLVRVSMESISS

SEQ ID NO: 225034 - protein, 380 aa, Zea Mays
MASHPAHRSSKAADEELPKASSTFHPSLWGSFFLTYQPPTAPQRANMKERAEVLRERVRKVLKGSTTDQLPETVNLILTLQRLGLGYYYENEIDKLLHQIYSNSDYNVKDLNLVSQRFYLLRKNGYDVPSDVFLSFKTEEGGFACAAADTRSLLSLYNAAYLRKHGEEVLDEAISSTRLRLQDLLGRLLPESPFAKEVSSSLRTPLFRRVGILEARNYIPIYETEATRNEAVLELAKLNFNLQQLDFCEELKHCSAWWNEMIAKSKLTFVRDRIVEEYFWMNGACYDPPYSLSRIILTKITGLITIIDDMFDTHGTTEDCMKFAEAFGRWDESAIHLLPEYMKDFYILMLETFQSFEDALGPEKSYRVLYLKQAANGAFS

SEQ ID NO: 225035 - protein, 380 aa, Zea Mays
MASHPAHRSSKAADEELPKASSTFHPSLWGSFFLTYQPPTAPQRANMKERAEVLRERVRKVLKGSTTDQLPETVNLILTLQRLGLGYYYENEIDKLLHQIYSNSDYNVKDLNLVSQRFYLLRKNGYDVPSDVFLSFKTEEGGFACAAADTRSLLSLYNAAYLRKHGEEVLDEAISSTRLRLQDLLGRLLPESPFAKEVSSSLRTPLFRRVGILEARNYIPIYETEATRNEAVLELAKLNFNLQQLDFCEELKHCSAWWNEMIAKSKLTFVRDRIVEEYFWMNGACYDPPYSLSRIILTKITGLITIIDDMFDTHGTTEDCMKFAEAFGRWDESAIHLLPEYMKDFYILMLETFQSFEDALGPEKSYRVLYLKQAASRWSV

SEQ ID NO: 225036 - protein, 161 aa, Zea Mays
MSDYLNKHSPKIYSTSRAFLQDLELMSILQRAPAARQRRRLFREDLLPAPVYGRWNFTEQRNGRSRSVEPVQGAAAADGGLPVRVGRAGRLARHRAVRDGVPGHLLPQRRRAAGRRGAAGVVEGGTRGRHADLKPQGRTLVAQDAHHGGAGQGLRHHRLDR

SEQ ID NO: 225037 - protein, 312 aa, Zea Mays
MPLDLGAKGSCHIGGNISTNAGGLRFIRYGSLHGNVLGLEVVLADGTILDMLTTLRKDNTGYDLKHLFIGSEGSLGVVTKISVLTPAKLSSTNVAFLSCNDYTSCQKLLLAARRSLGEILSAFEFMDHHCIDLAMQHLEGVQNPLPASPYKFYVLVETTGSDESSDKTKLEAFLLRSMEDGLVADGVIAQDISQASNFWRIREGISEASVKVGAVYKYDLSITVEKLYDIVEEMRCRLGDNAEVLGYGHLGDGNLHLNIVSSKYDDNILAQIEPFVYEWTSAQRGSISAEHGLGLMKAEKIHYSKSPEAVSV

SEQ ID NO: 225038 - protein, 312 aa, Zea Mays; identical to SEQ ID NO: 225037

SEQ ID NO: 225039 - protein, 344 aa, Zea Mays
MDEEYDVIVLGTGLKECILSGLLSVDGLKVLHMDRNDYYGGDSTSLNLNQLWKRFRGEDKPPAHLGASRDYNVDMVPKFMMANGTLVRTLIHTDVTKYLSFKAVDGSYVFSKGKIYKVPATDMEALKSPLMGLFEKRRARNFFIYVQDYNEADPRTHQGLDLTRVTTRELIAKYGLSDDTVDFVGHALALHRDDRYLDEPALDTVKRMKLYADSLARFQGGSPYIYPLYGLGELPQGFARLSAVYGGTYMLNKPDCKVEFDMEGKVCGVTSEGETAKCKKVVCDPSYLQNKVRKIGRVVRAIAIMSHPIPNTNESHSVQIILPQKQLGRRSDIAMMPPHILRQL

SEQ ID NO: 225040 - protein, 308 aa, Zea Mays
MDRNDYYGGDSTSLNLNQLWKRFRGEDKPPAHLGASRDYNVDMVPKFMMANGTLVRTLIHTDVTKYLSFKAVDGSYVFSKGKIYKVPATDMEALKSPLMGLFEKRRARNFFIYVQDYNEADPRTHQGLDLTRVTTRELIAKYGLSDDTVDFVGHALALHRDDRYLDEPALDTVKRMKLYADSLARFQGGSPYIYPLYGLGELPQGFARLSAVYGGTYMLNKPDCKVEFDMEGKVCGVTSEGETAKCKKVVCDPSYLQNKVRKIGRVVRAIAIMSHPIPNTNESHSVQIILPQKQLGRRSDISLCLTQL

SEQ ID NO: 225041 - protein, 340 aa, Zea Mays
MDEEYDVIVLGTGLKECILSGLLSVDGLKVLHMDRNDYYGGDSTSLNLNQLWKRFRGEDKPPAHLGASRDYNVDMVPKFMMANGTLVRTLIHTDVTKYLSFKAVDGSYVFSKGKIYKVPATDMEALKSPLMGLFEKRRARNFFIYVQDYNEADPRTHQGLDLTRVTTRELIAKYGLSDDTVDFVGHALALHRDDRYLDEPALDTVKRMKLYADSLARFQGGSPYIYPLYGLGELPQGFARLSAVYGGTYMLNKPDCKVEFDMEGKVCGVTSEGETAKCKKVVCDPSYLQNKVRKIGRVVRAIAIMSHPIPNTNESHSVQIILPQKQLGRRSDISLCLTQL

SEQ ID NO: 225042 - protein, 298 aa, Zea Mays
MTKHTAFAGADGGTTAAAAVTLCAPPRARGARRVAAGSLPELVRRHADLDDWMEKHPSALAGFESVLAAAEGKQVVMFLDYDGTLSPIVKDPDSAVMSEEMRDAVRGVAEHFPTAIVSGRCRDKVFNFVKLAELYYAGSHGMDIKGPTAQSKHTKAKAEAVLCQPASAFLPVIDEAYRALTARTAPIPGATVENNKFCLSVHFRCVQEEKWRALEEQVRSVLKEYPDLRLTKGRKVLEVRPSIKWDKGNAIQFLLECLGFADSNNVFPIYIGDDRTDEDAFKVKEFLHMLVRSKQRRD

SEQ ID NO: 225043 - protein, 319 aa, Zea Mays
MAEADETAALQYTPTWIVAAVCSIIVLISLAAERGLHHLGKTLKKNHQRPLYEALLKVKEELMLLGFISLLLTVLQGTIQRTCIPPSWTDYMLPCQRPGHDEAPAAAASMAARFVAADILGGISWARVLSEGEGAAAQAGLCEKEGKVPLLSLEALHQLHIFIFVLAVSHVFFCASTMLPGCAKIRKWKKWEEEIQKIAAENGPKKVLPMHQVSFIRERYKGIGTDSKTLCWLHSFRKQFYGSVAKSDYAAMRLGFIMTHCRGNLKFDFHRYMLALVDLRGDISAAQCQRLNGLHAYFWIAFLPLVVSADSEVLYRLKF

SEQ ID NO: 225044 - protein, 91 aa, Zea Mays
MVYSSMEGSMNPPANNDALHGIPDGYSLAISDYLGADMSCYQSIQTELQGGMNLNGSEGITVMDDSIYSSLGDIGFMEVWDQQPQDYEKFF

SEQ ID NO: 225045 - protein, 414 aa, Zea Mays
MALATNSAAAAAAAVSGGAASQPHRAATFLPLKRRTISAIHAADPSKNNGPAVPAAAAAKSSASAVATPEKNPAAPVKWAVDSWKSKKALQLPEYPNQEELDTVLKTIETFPPVVFAGEARHLEERMAEAAMGRAFILQGGDCAESFKEFHANNIRDTFRILLQMGAVLMFGGQVPVVKVGRMAGQFAKPRSEPLEERDGVKLPSYRGDNVNGDDFTEKSRVPDPQRMIRAYSQSVATLNLLRALATGGYAAMQRVTQWNLDFMDHSEQGDRYRELAHRVDEALGFMTAAGLTVDHPIMTTTDFWTSHECLLLPYEQSLTRKDSTSGLFYDCSAHMLWVGERTRQLDGAHVEFLRGVANPLGIKVSDKMNPSDLVKLIEILNPSNKPGRITIITRMGAENMRVKLPHLIRAAVV

SEQ ID NO: 225046 - protein, 481 aa, Zea Mays
MMTRVVADDLGVVKKIVEEGKGWETPREPYEITARITARTADGKEIIPSKEEAYFFTIGKSEVPKGLEMGIGTMSHKEKAIIFVSSTYLTKSSLMPQLEGLEEVHFYIELVQFIQVRDMLGDGRLIKRRVFDGKGEFPMDCPLHDSLLRVHYKGMLLDEPKSVFYDTRADNDGEPLEFCSGEGLVPEGFEMCVRLMLPGEKSIVTCPPDFAYDKFPRPANVPEGAHVQWEIELLGFEMPKDWTGLTFEEIMDEADKIKNTGNRLFKEGKFELAKAKYDKVLREYNHVHPHDDEEGKIFANSRSSLHLNVAFCYQKMGEYRKSIETCNKVLDANPVHVKALYRRGTSFMLLGDFNDARNDFEKMITIDKSSEQDATAALLKLKQKEQEAEKKARKQFKGLFDKKPGEISEVGVESDGGKDAGDARVNGGEATSADRGVNTNDSPTSESEYAFEEERPGLLGSLWPSARMIFSSLGMNRCAIL

SEQ ID NO: 225047 - protein, 184 aa, Zea Mays
MLIIIRASVPKMNLDDAFEQKNEIAKAVENELEKAMSMYGYEIVQTLIVDIEPDEHVKRAMNEINAAARLRLAASEKAEAEKILQIKRAEGDAESKYLAGLGIARQRQAIVDGLRDSVLAFSENVPGTSAKDVMDMVLVTQYFDTMKEIGASSKSSSVFIPHGPGAVRDIAAQIRDGQLQASLL

SEQ ID NO: 225048 - protein, 226 aa, Zea Mays
MAHAAAAAAVPLRRPLLFLKEARLLSTLATPLPGLRHPRALRPTGPLPSDAEDTDDPDAGDGAAVSFKKSRNELKREARRAVKWGMDLAKFSPPQIKRILSAASLEREVFDALMLVKKFGPDVREGRRRQFNYIGSLLRDAQPELMDTLIQASKDGDERKLYTLLSEGKLLVEEEEEEEEDLPDGEEENQEYMKIADRWFDGLLCKDISVTNEVYSVHSVEFDRQA

SEQ ID NO: 225049 - protein, 125 aa, Zea Mays
MDTLIQASKDGDERKLYTLLSEGKLLVEEEEEEEEDLPDGEEENQEYMKIADRWFDGLLCKDISVTNEVYSVHSVEFDRQLVKRAHMFQESTQNKDGEESNAKLSGAKKPLMRFLRSLAKEAYAP

SEQ ID NO: 225050 - protein, 115 aa, Zea Mays
MEVMHFKAVNCLFLFTNLVQLNSWFDPQFGGVNKEARTVNLAIQEALAGTEIQLLNLTYMSEFRADAHPAIWLGKKDAVAVYGQDCMHWCLPGVPDTWVDILAAQIMHHFKQEKG

SEQ ID NO: 225051 - protein, 119 aa, Zea Mays
MGADSEDAVKQLSLLMEQVEAPLKRSFQNMHQGYPKETLVRFLKAREWNVPKAHKMIVDSLDWRIENEIDSVLERPIVPVDLYRSIRDSQLIGLSGYTKEWQYRRLCPRVSAAHAQRNS

SEQ ID NO: 225052 - protein, 157 aa, Zea Mays
MGHDEAVVTQNSVKAPSPPKDQPAIYPCFDWSTVQAYYGPGVLPPAFFNPGIAPGHAPPPYVWGPQTMPPAAFGKSYAAIYPHAGGFLHPLMPLVVNPLSAEPAKSGNSKDNSLNKKLKEIDGSAVSSGNSEKTRTTRNRSVKGGSSQTGNLPGAQG

SEQ ID NO: 225053 - protein, 119 aa, Zea Mays
MQMEVQKRLHEQLEVQRQLQLRIEAQGRYLQMIIEEQQKLGGSIKASEDQKLSDSPPSLDDYPESMQPSPKKPRIDALSPDSERDTTQPEFESHLIGPWDHGIAFPVEEFKAGPAMSKS

SEQ ID NO: 225054 - protein, 480 aa, Zea Mays
MAKQYSPSAVERSWYAWWESSGYFGADSASTKPPFVIVLPPPNVTGALHIGHALTVAIEDAMIRWRRMSGYNALWVPGVDHAGIATQVVVEKKLMRERKLTRHDIGREKFVSEVLKWKDQYGGTILNQLRRLGASLDWSREAFTMDEQRSKAVTEAFVRLHKEGLIYRDYRLVNWDCTLRTAISDIEVDHIDLKEETMLKVPGYANPVQFGVLISFAYPLEEGLGEIVVATTRIETMLGDTAIAVHPEDERYKHLHGRYAVHPFNGRRLKIICDAELVDPTFGTGAVKITPAHDPNDFEVGKRHNLEFINIFTDDGKINSNGGAKFDGMPRFTARVAVIEALKEKGLYKDTKKNEMSLGVCSRTNDVVEPMIKPQWFVNCNHMAKAGLDAVRSKKIEIIPQQYEQDWYRWLENIRDWCVSRQLWWGHRVPAWYVTLEDDLDKNLGSANDRWIVARNESDANLEAQKNTCKDGDDGNATWW

SEQ ID NO: 225055 - protein, 251 aa, Zea Mays
MIRDAHGRKMSKSLGNVVDPLEVINGMSLDGLLKRLEEGNLDPNELNIARDGKKKDFPDGIAECGTDALRFALISYTSQSDRINLDIKRVVGYRQWCNKLWNAIRFAMGKLGDHYIPPATVDVSLMPPICKWILSVLSKAVGKTVSSLEAYKLSDATSAIYSWWQYQLCDVFIEAIKPYFFNDSQELESARAASRDTLWICLDTGLRLLHPFMPFVTEELWQRLPQPKDSCRKGSIMISQYPSLVEVIPMS

SEQ ID NO: 225056 - protein, 300 aa, Zea Mays
MASCVAAMALVGARPPSHAAGPAAASCSGRAQLSFHRLGARARARVIRAYRRRPHHPSYVPEDGVVLEWLRSAAAALAIVTQISVSLPANAVLYSPDTKVPRTGELALRRAIPANPNMKAIQESLEDISYLLRIPQRKPYGSMEGDVKKSMKIAMDNKEAILASIPEEHKEEGAKLYTSLLEEKGGLQTLLKYIKENNPDKLSIALASSLDTVAELELLQAPGLSFLLPQQYIEYPRLTGRGVVEFTVEKGDGSTFFPTGGGEPKSVATIQVVIDGYSAPLTAGNFAKLEKKSKTCFEDD

SEQ ID NO: 225057 - protein, 194 aa, Zea Mays
MQDLVKERLPRFTPEQAKLVKGSADYIGINEYTSSYMKGQKLVQLAPSSYSADWQVQYVFARNGKPIGPQANSKWLYIAPTGMYGCVNYLKEKYGNPTIYITENGMDQPGNLTRDQYLRDATRVRFYRSYIGQLKKAIDQGANVAGYFAWSLLDNFEWLAGYSSKFGIVYVDFNTLERHPKASAYWFRDMLQKH

SEQ ID NO: 225058 - protein, 826 aa, Zea Mays
MNIEECTSQKPTVKNLMEDELGKVKLLKKNPNDEIQRRLVDLGNDVSLGRSSEHTNKSIDRSYHQAGISTPSIPPMDSGVLNYAEEYDLESVLMNFLGEIYSCHDECPHSDCKNKNELCPSLKSLIHKKVNELNNLPRNIGCAQSQEGNDAKLSDQNNLSNTMAARSKQFKDALEILGSNNELFMKLLQKPNQHIVDSIQKHENSKVAAGLEPNKIHGQTNFLVGRGGSRQHPLATKEQAKERKYMFFWRKGKSNRRQMLEATDTDQTVTKIVILKPNPERGFNQKAATARTLHQQPCTSHAPECGGIDNSKFSIKEVKTRFRFVNSESRRESNLAPAEDLQGYPRKFKDSFVAINKDFRHFPEGSLANKSGSDIKNAIKPFISSKQNGSISGNSGHIVAPKGASIFYEEARRHLSEMLKDNDCSVNYPAVQISKSLEGILSLPHGNVSTPRSSLWGKDYLGPSPGETDVFVACEVQREECTQERSQSQEDFGSIARCTSAAVDDQVTVRDGYYTNEAQEGSRHAQNEPGLLYTEGIHKFICGKNICDEQSVPAEQSRHDVCQEILEEIKQGKEHIKMSPTSAEGIVETLGQQEPETPEPRASTELISDGSPEQSDEKQERPSPVSVLESFFEDIDNPDCINKKECELHGLQRTLYFPDNEPDVSLLGEDRSVRVDYIKLVLELSELCAEQNLEVWYLEDELISPCLFEELQSQGDQTDDLKLLFDCICEALTEIQERYFRLSWLTFLKQDIRTPPIGENLITEVDRYVYGYIQHSLPITLEQIIKRDLEVQTWMNIRSKTEGIIMEMWEFVLDELIDETVFDLWI

SEQ ID NO: 225059 - protein, 222 aa, Zea Mays
MRTAPPPPPPPPPFSRLLPLSSRFPRLAALYLCGALPLSYNPRAGSGEIRPNSMGLEMVEVMSETVPTVVPAAARENGVDIYPLSRYYFGARDAAGVPRGLETAADRALRLKANFAAHGLRTSVHGVLLVELFDHPHVLLLQVRNSSFLLPGGRLRPGEEEVRGLKRKLSSKLSVVDDVEAVEEEDWQCIGMWWRSEFEAIPFPYMPPRFRAAKVQSCGKFC

SEQ ID NO: 225060 - protein, 285 aa, Zea Mays
MTSVKYMISLDQKHTSVKRQVVTLEGRVFLGVTHLVTSLVISLIMHTEVAKMSRFLLNYHSWKLSKVAEKPLHGSGVPPGTVPKTCKTCKGSGAIYMQKGIFTVECTCSLCNGSGKIVKSFCKTCKGEQVVKGKTSVKLDIAAGSDDNDIMKVFGKGGADVDRNKPGDLYVTIKVREDPTFRREGIHVHVDSVLSIAQAVLGGTVTVPTLTGNVTVKVRQGTQPGEKVVLRGKGIKARNSPVFGNQYVHFNIRVPTDVTQRQRELIDEFDKEECADRERPAVASG

SEQ ID NO: 225061 - protein, 1175 aa, Zea Mays
MTKKHKIRKSKHLLESKKDVDENVENILRMIEEENEQTENEQDDSGNPVRKSKLSSLVKGFHEDYQYLHKHYKQLISKLETAGHSSSGSDSSDSDVEGDRLENNVTTPKAVLNEENGLNHKLDEVHSMEAEIEMLKQSTEEHTKEISDLKQLLEKAIKDKEATRGEFTLEVANLSSENENLKSLVETAKREEGDLLNIIKSKENEVKTLSSEKQTIEEERDNLKMSVVDMKKEMEDLSNQLKDTVDKCSVMASELEKSLKAEKEVQTLFEENQNLKNHNLMLSVEHDNLKALHHNLDIECCQLKATIAETKAENESLTTENHSAERKLQQLRVEIDGLMAETTVIMNNLDKERSTAAEEKERLTSENSVYMSELEEAQSNVKDLEKELESTKSVLNNRIAELCKEKNSTTSEIERLEASLMNHQNDLSQQLDRISDMQKTTENLELANSNLHNEIVKVQGQKNEAVASIVNLESMLEQQVQEIANLQEANKELKAAKTDLHNEVMLLQQEKIVALTQLQEYEAQIKNLRIDLEQQCNQISVMQQANEETQDKNSSLHKQLEETRIHLQEEIIALQGEKEEAISSLQQSNDSLKTLEVQLEQQREQISVLQLAHEDLQNSNSNLEMQLEEAKVSHHAEILALQDEKNKIISELQQSDGCIKNLRFELEQGKEQTSILLHANEDMKNNISVLDKQLEEVRSSLHAEIAEVRAEKETALSELHMSQTSIRNLESVVEKQTENILTLEKANDKLNNKICILTEQVEQAKAELHKEVAAIQEEKDTALTQLRQSEFSIQDLENEVTRLKDELSIQLEKNSTLDKQFEEFKSKLHAEILDLRAEKDTSLLELQTSQDSVRNLEILVEKQTENISTLHQANDELQKNIYTLTEQSQQAKEEMQDELKAIQEEKDTVLTQLKQSETSVQNLEDEVTRLKEELSVQLENNSTLDKQFAEARSNLHAEISDLRAEKGTSLLELQMSQASVRNLEILVGKQTENISTLQQANEELQKNIYTLTEQSQQVKVEMQSDLKAIQEEKNAVLSQLKQSETSVQNLENEVIRLKEELSVQLENNSTLDKQFEEARSNLHAEISELRADKNTSLLKLQTSQDSVRNLEIVVEKQTENISTLQQANDELQKNIYTLTEQSQRDKAEILWLKSKLRTFQLYSKLMMNYRRMSIL

SEQ ID NO: 225062 - protein, 53 aa, Zea Mays
MIRGGSWESLGLARRDQLTTVIRRLLYIADSTQPQFRRKVIVLHVYDEHRHFW

SEQ ID NO: 225063 - protein, 553 aa, Zea Mays
MTSSTLLCSLSSPPPEGIVALFLSSAAPVRPLPPRRAAPLPPRCPLSPCLCLLAAGSQHPAIDSSHPLCSLFWYCLSGSSDSMIRLWDLGQQRCVHSYAVHTDSVWALATTHSFGHVYSGGRDQSVYLTDLSTRESVLLCTNECPILQLSLQDDTIWVATTDSSVYGWPAEGLTPQKVFQKGGSFLAGNLSFSRARASLEGSAPVPVYKEPSFVVPGVPAIVQHEIMNNRRHVLTKDTTGSVKLWEITRGAVIEDFGKVSFEDKKKELFEMVSIPAWFTMDARLGCLSVHLDTPQCFSAEIYAVDLNVSGAQEDLKINLAHDTLCGLLVHWSKRKQKSSSHGLPNGDSSIGKDVPSKDSHRSRTEVDDTTENHTTHVLPSFEFSTVSPPSIITEGSSGGPWRKRITDLDGTEGDLPWWCVDCVTHNRYPKENTKCGFYLHPAEGSPAPNITQGKLSAPRILRIHKVANYVVEKLVLDKPLDGGSDSTFVMGLSSAQSQLSQLDSSSRLGLKPWQKTKPCIEVLSPDMSLATVRTYIWKKPEDLILHYRVVQSR

SEQ ID NO: 225064 - protein, 346 aa, Zea Mays
MIRLWDLGQQRCVHSYAVHTDSVWALATTHSFGHVYSGGRDQSVYLTDLSTRESVLLCTNECPILQLSLQDDTIWVATTDSSVYGWPAEGLTPQKVFQKGGSFLAGNLSFSRARASLEGSAPVPVYKEPSFVVPGVPAIVQHEIMNNRRHVLTKDTTGSVKLWEITRGAVIEDFGKVSFEDKKKELFEMVSIPAWFTMDARLGCLSVHLDTPQCFSAEIYAVDLNVSGAQEDLKINLAHDTLCGLLVHWSKRKQKSSSHGLPNGDSSIGKDVPSKDSHRSRTEVDDTTENHTTHVLPSFEFSTVSPPSIITEGSSGGPWRKRITDLDGTEGVAFIYILLKVRLRQT

SEQ ID NO: 225065 - protein, 96 aa, Zea Mays
MKVKQADELENILAKKFLRFLSMRAEAFQVLRRKPVQGYDISFLITNYHCEDMHKHKLIDFIVQFMEDIDKEISELKLSVNTRGRLVATEFLKQFL

SEQ ID NO: 225066 - protein, 126 aa, Zea Mays
MSTHQANTLRLYLTCIRNTLEAAMCLQNFPCQEVERHNKPEVELKTSPELLLNPVLICRNEAEKCLIETSINSIRISMKVKQADELENILAKKFLRFLSMRAEAFQVLRRKPVQAQGYIIVDSWMM

SEQ ID NO: 225067 - protein, 225 aa, Zea Mays
MEYSFDRDWKKIEAFVGSKTVIQIRSHAQKYFLKVQKNGTSEHVPPPRPKRKAAHPYPQKASKNDSSSIHRNSGMNVSVSSWPHRSIPQAVASSMVKEDLGAGTLGPNNFCSSSTEGPPRTWQPGETNGPINQIPSLRLMPDFAGVYSFLGSVFDPSTSDHLQKLKEMNPIDVETALLLMRNLSINLTSPDFEDQRKLLSLYSASDGPELGSSRSSALATSAPFM

SEQ ID NO: 225068 - protein, 229 aa, Zea Mays
MEYSFDRDWKKIEAFVGSKTVIQIRSHAQKYFLKVQKNGTSEHVPPPRPKRKAAHPYPQKASKNDSSSIHRNSGMNVSVSSWPHRSIPQAVASSMVKEDLGAGTLGPNNFCSSSTEGPPRTWQPGETNGPINQIPSLRLMPDFAGVYSFLGSVFDPSTSDHLQKLKEMNPIDVETALLLMRNLSINLTSPDFEDQRKLLSLYSASDGPELGSSRSSALATSAPFMIKGG

SEQ ID NO: 225069 - protein, 148 aa, Zea Mays
MEYSFDRDWKKIEAFVGSKTVIQIRSHAQKYFLKVQKNGTSEHVPPPRPKRKAAHPYPQKASKNEPNYGLKTDSSSIHRNSGMNVSVSSWPHRSIPQAVASSMVKEDLGAGTLGPNNFCSSSTEGPPRTWQPGETNGPINQIPSLRPS

SEQ ID NO: 225070 - protein, 540 aa, Zea Mays
MNAVEPSAAAIAEDPITPAASAAPYPGRLREALTALSEACESGNFNASETASFTISDILDTAAGVSGELDDGSDDSQDASRSGASEVLLREVLEFLSRPSSISNQMALDALSLVLPKPVAKLGARMGRCRDVAAAILKFFVTNCNPRDMLSILCEALDAPMELPNGLSSFVLLLDALAKVFTLIQRRHIEQVKVALPVVLKVMHATVSECVEEHGSAAVDLFNAAHGVGKAIQEMCISMFNKNKDLCAILGLYSLQNIALVSRSRQQDILSACGSVVFQSFRFLKTSGFTYRGLLTGSDVTAATVELSKEEDADFMEHFSFAMDGAALSVVWTLMHDDKDMSKYAGEELELAVKEVQGNHMEKWEAINMLKYVLSSIHYPWIIKSHSLNLMLILSGEDHVEEINNHVDFTCFAHRIFETLKAIESVMIAAPMALVRKKAFAALKKVISMVPSSQRFDILHGLVNNSTSPALTAILLDLVRQEVSRESRQADNDCIEDEGFRGNGLPRWASHALELVELILRPPEGGPPCLPDHSEQDLRT

SEQ ID NO: 225071 - protein, 647 aa, Zea Mays
MASVSVVLLQRSSSRVRGYIRLQRIASSSVTLVLEGEGHWWWSNSRGRDERFGARTVHHMAGSVEGENGGVPVGGQVAMAPGVVTGGVEDAYGEDRATEDQTVTPWAVCIASGHSLLRDPRHNKGLSFTEKERDTHYLRGLLPPVVLSQDLQEKRMLQNVRQFQVPLQRYTALMDLQERNERLFYKLLIDNVEELLPVVYTPTVGEACQKYGSIFRRPQGLYISLKEKGRILEVLRNWTEKSIQVIVVTDGERILGLGDLGCQGMGIPVGKLALYTALGGCLPITIDVGTNNEDLLKDEFYIGLKQRRATGQEYSEFLDEFMAAVRQNYGQKVLVQFEDFANHNAFTLLEKYRTNHLVFNDDIQGTAAVVLAGIIAALKSVGGTLADHTFLFFGAGEAGTGIAELVALEISRQANVSVEEARKKIWLVDSKGLIVASREETLQPFKKRYAHEHEPVKDLLGAVKAIRPTALIGSAGVGQSFTKEVIEVMSSINERPIVLALSNPTSQSECTAEQAYTWSQGRAIFGSGSPFDPVKYNDKLFVPAQANNAYIFPGFGLGVVISGAVRVSDDMVLAAAEALAEQVTPEHIEKGLIYPPFSIIRKISANIAAHVAAKAYDLGMATQLPRPKDLVKYAESCMYSPVYRSYR

SEQ ID NO: 225072 - protein, 1022 aa, Zea Mays
MDKMESYLNENFGGVKAKHSSDEALGRWRSVVGVVKNPTRRFRFTANLGKRSEAAAMKRSNQEKLRVAVLVSKAALQFIHGLPPQGDYAVPADVKAAGFGICAEELSFIVESHDVKKLKSHGGVDGLLSRLSTSASDGLDGSKLMAARQELFGVNRFAEAEPRSFWVFVWEALQDMTLMILAACALVSLVVGIATEGWPHGAHDGLGIVASILLVVFVTATSDYRQSLQFKDLDKEKKKITVQVTRSGYRQKLSIYDLLAGDIVHLAIGDQVPADGLFVSGFSLLINESSLTGESEPVAVSAENPFLLSGTKVQDGACKMLVTTVGMRTQWGKLMATLSEGGDDETPLQVKLNGVATIIGKIGLAFAVVTFAVLTQGLFWRKLADGSYFSWTGDDALELLEVFAIAVTIVVVAVPEGLPLAVTLSLAFAMKKMMNDKALVRHLAACETMGSATTICSDKTGTLTTNHMTVVKACICGKVKDVNSSAETKTLPSDLPASVVAMLLQSIFNNTGGDVVLNQDSRREILGTPTEAAILEFGLALGGDFATVRKASTLLKVEPFNSAKKRMGVVIQLPGGALRAHCKGASEIVLASCARYLDEHGNVAALDGATADHLRATIDSFANEALRTLCLAYVDVGDGFSPSDQIPTDGYTCIGVVGIKDPVRPGVKESVAICRSAGITVRMVTGDNINTAKAIARECGILTEGGVAIEGPDFRVKSEEELQDLIPKIQVMARSSPLDKHTLVKHLRTTFDEVVAVTGDGTNDAPALHEADIGLAMGIAGTEVAKESADVIILDDNFSTIVTVAKWGRSVYINIQKFVQFQLTVNVVALIVNFSSACLIGSAPLTAVQLLWVNMIMDTLGALALATEPPNDELMKRTPVGRKGNFISNTMWRNIMGQALYQFLVIWYLQSRGKRLFWIDEGAADADLVLNTVIFNCFVFCQVFNEVNSREMERVNVFRGILDNNVFVMVLGSTVVFQFVIVQCLGSFANTTPLSLAQWVACVAIGFVGMPIAVAVKMVPVE

SEQ ID NO: 225073 - protein, 241 aa, Zea Mays
MEVAKESADVIILDDNFSTIVTVAKWGRSVYINIQKFVQFQLTVNVVALIVNFSSACLIGSAPLTAVQLLWVNMIMDTLGALALATEPPNDELMKRTPVGRKGNFISNTMWRNIMGQALYQFLVIWYLQSRGKRLFWIDEGAADADLVLNTVIFNCFVFCQVFNEVNSREMERVNVFRGILDNNVFVMVLGSTVVFQFVIVQCLGSFANTTPLSLAQWVACVAIGFVGMPIAVAVKMVPVE

SEQ ID NO: 225074 - protein, 231 aa, Zea Mays
MAVPEVVVDGVVFPPAARPPGSAGSHFLGGAGAWPRDRRQLRQVHGHRRVPGGRGRAGAGEEVGRQDGRRARVRRRLLPRRRHGRLREVSRGVTMIRPLTGEQYAGKVAENCVAYWKAAGLYTDAEGVAVEKFKQVFKPHTFPPGASIHFTHSPAGVLTVAFSRDSSVPVAGGVAIDNKLLCEAVLESIIGEHGVSPAAKLSLAARVSELLTKGTAAAAAALRAEPVSVTA

SEQ ID NO: 225075 - protein, 68 aa, Zea Mays
MKQRGDDGADGAAAFAGCLDCRSSDHCFLREATPPPPPTVTTLLPPSVSNSFDHRFSELCTTKYHLWI

SEQ ID NO: 225076 - protein, 152 aa, Zea Mays
MADSSAPTRVMMAVNESSLKGYPHPSISCRTAFDWTLSKLVRSNPGGFHFLFVHVQVPDEDGFDDMDSIYASPEDFHQMKQRDKIRGLHLLEYFVNQCHQLGIKCEAWIRHGDPKEVICSEVKRVQPDLLVVGSRGLGPFQSGESYLAKSPG

SEQ ID NO: 225077 - protein, 588 aa, Zea Mays
MSKSDFILMESADVPGSGGSNWTDHETLLLLEALEIFKGKEWHEIAEHVATKTKEQCMLHFLQMPISEPFLDGDDFNETPQKITKQDSAETGPSDVPDKMDVDGNAEGKESTDEKAYKKADSSSAETRTKLADQNISAKEDTMKLGDDDLVASIVDEPNKSSLVDPAHKKNSANADVSGEHPSNFITNILRSTFEAVDHFLGKEDMGSFAEAGNPVMALAAFLASLVERDDAVSSCCSSLRAISEMSPALQLATEHCFILPDPPSDLKDPASTFSPCAGGESQEGADTTQNVNDTDKNNSEREDSDLALEKESATFTSQKQHLEELSDAKETFIGGPEAEAKSNSTKDSDNPIAKVGSSVASDKMRDGCNANAIPCPATSNHTTEPSSVASQEASPASTKDTAIPEQVERPSSEELLADVSLPQGKVEPKKTEPAPAASSSIQQHGCKQAGNGNTEPKSKENAAADDDPITRLQRAAGTAISAAAVKAKFLVEQEEGYIRQLAALVIEKQFQKMETKMSFLTEVGNLVLRSRDLTERMRKKLLLERSMIIASRMGAAAASRTIQHGAPVTTRLPVGHVHALNPQLRRP

SEQ ID NO: 225078 - protein, 70 aa, Zea Mays
MKGSLSHELETGLPAADVWEVYGGLLVGDLIPQLLPQVFSKVELVEGDGGVGTVLLVTLPPEAFKEKFVK

SEQ ID NO: 225079 - protein, 83 aa, Zea Mays
MEYERIEKPFPVQGGGFSPKRLRAMLLGVDKRRKGQDGAAEEDEDGGGDYGALPKAHARSGAGDDSSEKRSRSRLGRTIRKPR

SEQ ID NO: 225080 - protein, 321 aa, Zea Mays
MEYERIEKPFPVQGGGFSPKRLRAMLLGVDKRRKGQDGAAEEDEDGGGDYGALPKAHARSGAGDVNFNRHDASTTLQSAATCIPPPTTVRSVSMRDMGTEMTPIASQEPSRTGTPVRATSPNCSQPTTPRRTLGGPSAVGSFISHGGECSSSELSEQELQTKTRREIMLLGTQLGKTSIAAWASKKEEEKDASLSLKPVPMDQSTQNITAIRAAAWEEAEKAKYLARFKREEIKIQAWEDHQKAQIEAEMRKIEVEVERMRARAQDKLMTKLASARHSADEKRATAELKRNRAAARTAEQAEHIRRTGRVPPSFGCWNWCS

SEQ ID NO: 225081 - protein, 141 aa, Zea Mays
MHQGYPKETLVRFLKAREWNVAKAHKMIVECLNWRIQNEIDSVLEILLYNFDGGTICSVVILKEWLGIHRVAAAEISKGLPIFGIGVGHSTYDKASVITLMLAICLVGYSYSQNHKSAWFEAISTKPNKGFRLSSSDSPSC

SEQ ID NO: 225082 - protein, 239 aa, Zea Mays
MFISCALLFFLPGARSLLSGLHAHRVQLPPPAVSAARPSLELRSASNSGARPSSLNMHQGYPKETLVRFLKAREWNVAKAHKMIVECLNWRIQNEIDSVLERPIAPVDLYKSIRDSQLIGLSRYTKEILLYNFDGGTICSVVILKEWLGIHRVAAAEISKVCGLPIFGIGVGHSTYDKASAIATAKIIKVPGLKLSALSQIKDSGSHQVTPPHVDFADVSILVVELRTTIRCPDRERWS

SEQ ID NO: 225083 - protein, 236 aa, Zea Mays
MFISCALLFFLPGARSLLSGLHAHRVQLPPPAVSAARPSLELRSASNSGARPSSLLPLFITLYGWSLENMHQGYPKETLVRFLKAREWNVAKAHKMIVECLNWRIQNEIDSVLERPIAPVDLYKSIRDSQLIGLSRYTKEILLYNFDGGTICSVVILKEWLGIHRVAAAEISKGLPIFGIGVGHSTYDKASVITLMLAICLVGYSYSQNHKSAWFEAISTKPNKGFRLSSSDSPSC

SEQ ID NO: 225084 - protein, 63 aa, Zea Mays
MFISCALLFFLPGARSLLSGLHAHRVQLPPPAVSAARPSLELRSASNSGARPSSLLNVVRGSA

SEQ ID NO: 225085 - protein, 89 aa, Zea Mays
MFISCALLFFLPGARSLLSGLHAHRVQLPPPAVSAARPSLELRSASNSGARPSSLRPIAPVDLYKSIRDSQLIGLSRYTKELNVVRGSA

SEQ ID NO: 225086 - protein, 276 aa, Zea Mays
MQTYFSCISHTACLDYHRRAYMINDLFWQSASIATLRQLGWADDELFLREGARLALRGELRARLGRDVGGDPLDVGAVPLQLLGVRREAGGHVGYADPGVGVLRDALHPAGHGHVLGEHVAVVDAGDLGHGVGVGRVVGVLPVVAGHPEHPLHGVEAEAAHEDVPDEAAPPGAGLDPDGRLRVDGHAVLGAHVADAAGHLAAQRDHGARGGDAGQPPDDDVLARHVEPDAVLVPPALHGHAVVAGDDVAVLDLDTRGRICTHAQAMKFRIRNMCFS

SEQ ID NO: 225087 - protein, 67 aa, Zea Mays
MHLRITCIAWRYYFGREFAKWHPFCFSAMCKANCFIEGKSSDGSYAKGYRCDSHGFHSMCICLLCKS

SEQ ID NO: 225088 - protein, 78 aa, Zea Mays
MMHSFGYQAPDLCLYLCSCVVTDKLRFAQRSLTVVFLYEEKHCFINYGRVKLWIEPVEPHVYSTWSNCRMKVCLTSDL

SEQ ID NO: 225089 - protein, 100 aa, Zea Mays
MCPVCLCSYKLAPIELSVFLHMKVVNKSVCCPRKVRLVDIIVFRLLANLYDNHDALHLHFRWIDCFCGYMKGLRLALWLVIKMVILMEATGYSGPTLPQY

SEQ ID NO: 225090 - protein, 210 aa, Zea Mays
MASWLLLPFSSFPWPPPPPPGSSSGRGGDGGGDGGDWRPTVVAAFAGVQVGRALRRRFAGLLRSPFNCFSLNSIGPMVEMLSGPRRYLAVYFSSALAGSLMSYRFSASPAVGASGAIFGLVGAYAVYMWRHRRFFGNSRESLEHIGRVVVLNMVLLHFFLLILFCLRFKNFLCSMCNIFFFHRVWASFQGELITGAIWEACLGELPWHGS

SEQ ID NO: 225091 - protein, 330 aa, Zea Mays
MPFPRSKGRRKLKRSPRFLWSTHARRRRWCPWLRGCCSPSPPSRGLPRPHQAPPPAAAAMAAETAAIGGRPSSQPSQACKSAALSAAASPASSAHRSALFSGNGSGGRYISNGKLLSRRPRGIDSKKRLWTNVLLALNVLAYVAQVASQGKLLMWGAKINSLIDRGQFWRLATSSLLHANLTHLAFNCFSLNSIGPMVEMLSGPRRYLAVYFSSALAGSLMSYRFSASPAVGASGAIFGLVGAYAVYMWRHRRFFGNSRESLEHIGRVVVLNMGMGLLSRGIDNWGHLGGLLGGVAMAWFLGPAWQYQYVAKDGRAVFKDRAPVLRLIKG

SEQ ID NO: 225092 - protein, 265 aa, Zea Mays
MEDGVFCGVFDGHGRCGQFISKLVRDYLPFMILSHRNALLMGSDDDDDDPAQLLEEWREACANAFEAMDKELKLQANVDCNFSGTTAVCAIKQGKDLIVANLGDSRAVLATMSDTGYLKAVQLTTDQKPNVPQEAERIKRCNGRVFALKDEPSVLRVWLPDEDCPGLAMARSLGDYRLKRHGVVSEPEVTHRRVAPGDLFIILATDGVWDVLSNEEVVSIVCATPRKQHASKAVAEAAAQRWRTRYPTSRVDDSRSDDKPADGDP

SEQ ID NO: 225093 - protein, 153 aa, Zea Mays
MEGSADSFGSLTAPLAWHDFLERMRQPSAAEFVKSIKSFIVTFSNRAPDPEKDSTAIQEFLENMEGAFRAHTPWAGSSEEELESAGEGLEKYVMTKLFNRVFASVPEDVKSDEELFEKMSLLQQFVRPENLDIKPEYQNETSWLEEGDAFAFL

SEQ ID NO: 225094 - protein, 407 aa, Zea Mays
MLEKDRISYFYDGDVGNVYFGPNHPMKPHRLSYPIELAQFHSADYVEFLHRITPDSQHLYASELTRYNLGEDCPVFDNLFEFCQIYAGGTLDAARRLNHKICDIAINWAGGLHHAKKCEASGFCYINDLVLGILELLKYHARVLYIDIDVHHGDGVEEAFYFTDRVMTVSFHKYGDLFFPGTGDIKDIGEREGKYYAINIPLKDGIDDTSFTRLFKTIIAKVVETYLPGAIVLQCGADSLARDRLGCFNLSIEGHAECVKFVKKFNIPLLVTGGGGYTKENVARCWAVETGVLLDTELPNEIPKNEYIEYFAPDYTLKVPNLNMDNLNSKTYLSSIKVQVMESLRYIQHAPGVQMQEVPPDFYIPDFDEDELDPDERVDQHTQDKQIHRDDEYYEGDNDNDHDDGTR

SEQ ID NO: 225095 - protein, 103 aa, Zea Mays
MDLDLWISKVKEGQHLAEHELQSLCEYVKEILIEESNVQPVNSPVTVCGDIHGQFHDLMKLFATGGHVPETNYIFMGDFVDRGFNSLEVFTILLLLKARYPAP

SEQ ID NO: 225096 - protein, 285 aa, Zea Mays
MVKDSAYYDVLGVSVDASSAEIKKAYYIKAKLVHPDKNPGNPDAALKFQELGEAYQVLSDPGKKEAYDKYGKEGIPQDNMVDPAAVFGMIFGSDYFEDYVGQLALASIASVEVDENSNSQEARAKVQEKIKELQREREQKLTQSLKDRLQPYVDERKDEFVSYASTEARRLSEAGAISLIQLQEGMKKMEGSENSEEQLMKSFEEKKDAMLSSLWKINVVDIESTLSRVCQAVLRDNTVSKDVLKLRAKALKKLGTIFQGAKSMYRRENSLRVETSTNQQANPSH

SEQ ID NO: 225097 - protein, 341 aa, Zea Mays
MASLFVLPARGQEAVDIALKADLVILNTAVAGKWLDPVLKDHVPKVLPKILWWIHEMRGHYFKVEYVKHLPFVAGAMIDSHTTAEYWNSRTSDRLKIQMPQTYVVHLGNSKELMEVAEDNVARRVLREHIRESLGVRSEDLLFAIINSVSRGKGQDLFLQAFYQALQLIQHEKLKVPRIHAVVVGSDVNAQTKFETQLRDFVVKNTIHDRVHFVNKTLAVAPYLAAIDVLVQNSQGRGECFGRITIEAMAFKLPVLGTAAGGTTEIVLDGSTGLLHPAGKEGVAPLAKNIVRLASHAEQRVSMGEKGYGRVKEMFMEHHMAERIAAVLKDVLRKSQEHSRS

SEQ ID NO: 225098 - protein, 141 aa, Zea Mays
MRNTVQGVIMDSFEGSDHITQRKVVPAKHIALVDGKNEPAVEGLPNGWLKECRPRKNRYGSRVKSDTFYIDPINGYEFHSLKDVHRYLESGDISKCIRLPNKRKIEDLHTKEDQSHHVSFIFKFWPTSEFALDLVLAATLD

SEQ ID NO: 225099 - protein, 381 aa, Zea Mays
MEAGGNDRLNAFLTARGVPKETPHVAKYNSNAAAAYRDRIAALAEGKPWTDPPVVKETPGSGAPAPARKPPVHTSAASGGGGWDDWDDDFRPDMRRNQSVGSFAAAGAQSGRQPPRSKSTQDMYTRQQLEASAANKEDFFARRMAENESKPDGIPPSQGGKYVGFGSSPPPSANRNGGAAQGDVMQVVSQGFGRLSLVAASAAQSAASAVQVGTKEIQSKMRDGGYDQKVNETVSVVANKTAEIGSRTWGIMRGVMALASQKVEEYAKEGGVGGWGEDWQHSEQKSEPYQRFEHETNGNSWNSSQNSSSKNNSSSWDDWDDPGKKDEPAKPHQSSDSWAGWDDGKDDGFDSPSYNNHSTSNKGSNQNGTSGGTFWTEGGFR

SEQ ID NO: 225100 - protein, 60 aa, Zea Mays
MSSCPLSLTTTRSTGADSPVFPHTRIRGQRRRRRSSREAGEEISEHVVKDGQSESESNPN

SEQ ID NO: 225101 - protein, 304 aa, Zea Mays
MASARPPQAQRTAWCGRCGARLSVAPGARSVRCALCHAVTRVERRPHGLHRAAVGFIRGLIGGLTPPQRPAAALQELPPSSFPRVRGCKKRALLVGISYAGTRGGHGAWPGADAGEPDARPAVARGRRQRRGLPGVPLLGPRRAEAGQGRRRGGRLRRGAVPRGLRGPPRRRRRHPGRRDQRHHRAPARQGREAARHRRHLPQRHHTRPPLPLPPVQDRVLAVGEPTDGPPRRVRRDQVHQRRPRHLDQRLRRQPDVAGHHGALRVRLHRRHDVQLHQGGGVGAGHHLRPPADGDESHHPRQRR

SEQ ID NO: 225102 - protein, 251 aa, Zea Mays
MRQPPARVTHEAISNPARIRSTAYATSRSRPSFQRPTRRARHKTRQHITQLVKDTSDKLKQASEADHRVEVSATKKIADAKLAKDFQAVLKEFQKAQRLAVEREAAYAPFITQAGLPQSYNSSEVNNGADKLAEQRTQLLESRRQELVFLDNEIVFNEAIIEERDQGIQEIQHQITEVNEIFKDLAVLVHDQGAMIDDIDSHIENAVVATSQAKGQLSKAAKTQKSNSSLICLLLVIFGVVLLIVIIVLAA

SEQ ID NO: 225103 - protein, 96 aa, Zea Mays
MEFLSQQNIMLDLENKALKQRVESLAQEQLIKRFQQEMFEREIGRLRTIYQQQQQQQAPALVRSNSRDLDVQFANLSLKHKDPNTGRDALSGPLRT

SEQ ID NO: 225104 - protein, 105 aa, Zea Mays
MAPTTTLIVTVNLECCRCSSKIQKILCGIQQEGEFTIEKIVYEKDKVLVTGPFDADKLSCKLWCKAGRIIKDIQVAKPKDEKPKNPSCKLEYGTQQGQLQGTLEV

SEQ ID NO: 225105 - protein, 160 aa, Zea Mays
MAALIDDKILCMHGGLSPELTSLDQIKDIERPTEIPDYGLLCDLLWSDPSHDTEGWGESDRGVSCTFGADKLVEFLEKNDLDLVCRAHQVVEDGYEFFAERRLVTIFSAPNYCGEFDNAGALLSIDESLMCSFQILKPNETGAPHSRKPLPSKAPKGENV

SEQ ID NO: 225106 - protein, 252 aa, Zea Mays
MMAAPSGGGCSGCLDCLHDIVHALSMGSCLTVEQRPAMATGGAHKGRDVKERKEKVEGRIIGNGVGNLACMFTRQGKKGTNQDAMVVWENFNGRSDTIFCGVFDGHGPHGHIVARKVRDTLPSKLRALIYDDFGESPICNSDGSILEETLSPYADEEDKSPVSVEKGERQESFLSMKDSFRKAFRVTDKELKLNRNIDSICSGSTAVTLIKQGQDLIVANLGDSRAVLGTRDQNGRLVAHQLTVDLKPDHPR

SEQ ID NO: 225107 - protein, 495 aa, Zea Mays
MFMVLISGNDFYAFPRIDQNKKRIAWIEWSHPNMPWDKSELWVGYFAESGDLTKRVCIAGGNRLLIESPSEPKWSPKGELFFVTDRGSGFWNIYKWVEQTNEIVPVYSLDAEFTRPLWVFGISSYDFLGNSDHIVFSYRQQGKSHLGVLDCDSGSISLLDIPFSDLSDVVAADDYFYIEGASASIPRSIAKVTLNESKTKVVNFSIAWSSSPDLVQYRPFFSTPELVEFPTSKSGQKAYAYFYPPSNPNFQGLPDEKPPLLVKTHGGPTAETRAILDLSVQYWTSRGWAYVDVNYGGSTGYGREYRERLLNKWGIVDVDDCCGCARFLVESGKVDGQRLCITGRSAGGYTTLASLAFRDTFKAGASLYGVGDLTLLRAETHKFESHYMDNLVGNERAYYERSPINFVNQFTCPVILFQGLEDKVVPPDQARKIYSALKEKGLPVALVEYEGEQHGFRKAENIKFTLEQQMLFFARLVGKFEVADDITPIKIENFD

SEQ ID NO: 225108 - protein, 312 aa, Zea Mays
MALVKSDAEEEWSDSDFDDASDSEVAEALDWLDAVEGPDGSARPHVAFSASGGGAAARRPNAHGGVLSRPLQPLSNRTQKLASHISATPLEEWEGRMNVAMSNSVTTAIRDSIRDTAIGKIRNTEKADRATVEQAIDPRTRMVLFKMLNRGVFNNINGCISTGKEANVYHATKTDGQELAIKVYKTSVLVFKDRDRYVQGDYRFRHGYCKHNPRKMVKTWAEKEMRNLLRVRAAGIRCPAPLLLRLHVLVMEFIGKGGWAAPRLKDAALSDDKLHESYFEIITTMRTLYQTCKLVHGDLSEYNILYFELWIF

SEQ ID NO: 225109 - protein, 391 aa, Zea Mays
MVLFKMLNRGVFNNINGCISTGKEANVYHATKTDGQELAIKVYKTSVLVFKDRDRYVQGDYRFRHGYCKHNPRKMVKTWAEKEMRNLLRVRAAGIRCPAPLLLRLHVLVMEFIGKGGWAAPRLKDAALSDDKLHESYFEIITTMRTLYQTCKLVHGDLSEYNILYFEGHLYIIDVSQSVDLDHPSALDFLKEDCLHVSDFFKKRGVPVMTVTDLFNFVIDQSISDEDVDDYLEKAQQKILENGGAVPNDDEITPTVMVQTLDYVKQCEADIVNMSIMQRSSSGYEPTADKLYDQPLLGFVRTKNTNTEKEQGQPARNLVEVEEDESESCLSSDEDDSWHEDDPKVGPEERKAARKENKKKVKEEKREARKTKIPKAEKKKRKKMAKAKCKR

SEQ ID NO: 225110 - protein, 879 aa, Zea Mays
MFKSMVYYVNTSIGEVEVWPKGEASAGLTMAAWAREIRVERISPPSERCPPLAVMHTVAVGARCLVMESRPPVVADVVPPLVVMHTACLRENKTAVVPLGDEELHLVAMTSRRNLTNHACFWGYKLPFGLYNSCLTMLNLRCLGIVFDLDETLIVANTSRSFEDRIDALQRKLSNETDPQRRNGMLSEIKRYQDDKSILKQYIEGDQVYDDGKVYKAQPEIVPPLSDNQQPMTRPVIRLQDKNIILTRINPLIRDTSVLVCLRPAWEDLRSYLIARGRKRFEVYVCTMAERDYALEMWRLLDPDSRLINSVQLHDRMVCVKSGLKKSLLNVFHDGSCHPGMALVIDDRLKVWDEKDQLRVHVVPAFTPYYAPQAEANCSIPVLCVARNVACNVRGGFFKDFDEGLLPRISNVHYEDEVNEISAPDVGNYLITDDENVALVNGNRDSLPFDGMADAEVERRMKEANAQSFHQTAGDFVMPVAPAQNFVSTSVASLAPPLGMMPSPFSQPVAPPGFSDSLQGSPAREEGEVPESELDPDTRRRLLILQHGQDTRDPTSPLPAIPPVQVPVPPVQPHGNWFPTEDGINQSNLNRGSAGFTVESDSIVYEKKQPPHPSFFHGGDSPMPSDRFGYQNQRFPSQLPHEDHPMMQNHAPPKYRSFSGEELASWHVPSSQRNNQIESGRHFAQYAGTSAGILEGIALKCGSKVEYKSALCDTAELQFSIEVWIVGEKVGEGIGRTRREAQRQAAEMSLRNLANKYLSSDPNKLSDMKENDFSSNRNVFGYSGNTRDDMLPLSSTSEESRFMKMENNNSRKTGSSVAALKELCTVEGYNLVFQACPSSADGLVGKESYAQVQVGGQILGKGVGLTWEEAKLQVIGTKF

SEQ ID NO: 225111 - protein, 185 aa, Zea Mays
MSLRNLANKYLSSDPNKLSDMKENDFSSNRNVFGYSGNTRDDMLPLSSTSEESRFMKMENNNSRKTGSSVAALKELCTVEGYNLVFQACPSSADGLVGKESYAQVQVGGQILGKGVGLTWEEAKLQAAAEALGTLRSMLGQLGHKRSGSPRSLAPNFNKRFKPDFPRTVQRVPYGTYSRIEGHVP

SEQ ID NO: 225112 - protein, 143 aa, Zea Mays
MIVSVISDGYPKPVRNPMGTGMDINFYPRVRSRADIGSNRGYGCGRIFAISDPNPIRCHPYSRVDACPLRAVRISVDIFVPCISLAPPWILLAVDSDPDAYIGESVGMESGGTTAAFMDSSFGTETLMLTAMDSHVGRNDARQ

SEQ ID NO: 225113 - protein, 578 aa, Zea Mays
MVSTVAETSCAISLKELCTLSPKYVCHRELLRRQEEPANQRTSSTASSSWRRQESPLSRALVLGKRKGCSTFGPLSFQRRKTSLPSCRASRSSTTRSWNSTRATPGCEQEEKQEITDLKKRLLIGSLLVIAEVKGQLAFAAPMVATSMAYYAIPLVSVMFAGRLGDLQLAAATLGNSWGTVTGIALMTGLSGSLETLCGQGYGAKAYRTMGVHLQASLLTSALASAVVSLLWIYSEPLLVFLRQDPETSRLAADFLRHSVPALFAYGFIQCALRFLQAQSVVAPLVAFSLLPLAAHVGVAHALVNVLGMGFAGAAVATSASLWLSFLMLAAYVMLSARFRETWPGFTTEAFRHVLPGMKLAIPSAVMVCFEYWSFEILVLFAGLMPDSQLSTSIIAMCQNTEAISYMITYGFAAVISTRVSNELGARNIANAKKALTVSLTLSLMLGVAFLLLLGLGHDLWVRLFTTSEVVVSAFASMTPLLIGSVVLDSTQGVLCGVARGCGWQHLAAWTNLVAFYVIGLPLAILFGFTLGFQTKGLWMGQICGLLCQNCVLFFITLRTNWEELDLTMFNKDNDFVC

SEQ ID NO: 225114 - protein, 214 aa, Zea Mays
MERPRCYSPLALHLLLCLFSLRACSAASITAGTPDESELWGYVEVRPKAHLFWWYYKSPQKTSTPSKPWPTVLWLQGGPGASGVGLGNFLEMGPLDVDLKPRNSTWLHKADLIFVDNPVGTGYSYVEDDSLFVTSDWQQAADMTTVVRALAKEVPTLASSPLFLVAESYGGKYAATLGASIARAVRAGELNVTLGGVAVGDSWISPEDFTCSLG

SEQ ID NO: 225115 - protein, 380 aa, Zea Mays
MERPRCYSPLALHLLLCLFSLRACSAASITAGTPDESELWGYVEVRPKAHLFWWYYKSPQKTSTPSKPWPTVLWLQGGPGASGVGLGNFLEMGPLDVDLKPRNSTWLHKADLIFVDNPVGTGYSYVEDDSLFVTSDWQQAADMTTVVRALAKEVPTLASSPLFLVAESYGGKYAATLGASIARAVRAGELNVTLGGVAVGDSWISPEDFTLSYTPLLLSVSRLDDNAGDEANKKAETVKEQIVAGQWAASQKSWGSLLDFIDTKSGNVDVYNFMLDSGMDPVALPVGSSSLMSSLQAMKYSTYGQDSQPGSNTIDGIMNGVIKQKLKIIPKNFTWGEQSDSVYNALVNDFMKPKIDEIDELLSYGINVTVYNGQDFNDAS

SEQ ID NO: 225116 - protein, 243 aa, Zea Mays
MAPPSRDYWLGFFRGAGDNVFDAIDAAITVAASDHPAALRERRDGIAERLFTALLVTGAAGAGAAAGQGGSAGRTPVPSLCSSDRAEAVTDDGAPRGDDPVLAETERIKAVLLGGHDKSESELLELLRRLQELDLAFDTLDVTAIGKAVSNFRKHSSKQIRTLVRSLIEGWKRTVDMWIARRREAVVDQTPQSMGPSSLEDQEDRGAAFTHMDEGDLFATPSTTIRLSEVPSSPTQRRGMEAW

SEQ ID NO: 225117 - protein, 199 aa, Zea Mays
MTKKSTQMALRKTLQPEKVFHPLEEDSCSVTSTTTSTRAGRTKMTVPVAPSFVCANRADKRKEFYTKLEEKHKALEAEKDEAEARKKDEQDVALKQLRKSLVIRAKPMPSFYQEGPPPKAELKKVPPTRAKSPKFTSSRRRSCSDTPLTPGGENTNATSTRPHRHSIGSPRDANRVQQCSPKSGVATKTRSVKAELKAL

SEQ ID NO: 225118 - protein, 188 aa, Zea Mays
MRPKKIALPLILTLSPLILILAAEASERNGVGAGERPSSHAGSRAQARGRPSERSTKRSNQHRQQHGNTVQASNRPRTGTFLRTTQSKNRLVAEGIRTSTGFKKVHLNMCAKALNDYFKMNLTVEQVQNHLRTWKRRYAKINRLRKLSVASWNEDNYMLTLDHEHYANYVQDHKSDAEFLNKPLENYK

SEQ ID NO: 225119 - protein, 377 aa, Zea Mays
MAGWCEQAVALLQRPAVAEMAVDVLLCAVPIWAAVMIGLVVGWSWRPRWTGLLFLGLRSRLRILWVPPGLGARRLWFACTALSACSVATKLISSAFRRCRGKHQDRASPDDDAAATRDGGCRADGSRTIFEDATPELVRDFFWDGDFRLKWDPMLAYCKSLDEFPQNGATIVHWIKKFPFFCSDREYIFGGRIWESGKTYYCVTKGVPYPSLPKKEKPRRVELYFSSWRIRAVQSPKHVGQQSACEVTLVHYEDMGIPKDVARVAVRHGMWGAVKKLQSGFRAYQQMRHTETTLSHSVIMARMTTKISITASNDPLDHDLSVADKISDENDSSNAVQHGFDWKWLVVGGAVAAVCVLNTGLVGKAVLLGAARRQAKK

SEQ ID NO: 225120 - protein, 169 aa, Zea Mays
MERRRSRHALLLLSAVMASLVAGSTAGIYHIVGAGKGWRMPPNRTYYEDWAHTRQISIVFLYRSGVHNIVEVPTRELFDACSMRNITSRYQCGPTIIELTDPGERFYFCGVGEHCEAGQKLAINVLLVPPPPPDTDDDSSGAARLLGRAGAGLAAACLCLVSALLTMAV

SEQ ID NO: 225121 - protein, 501 aa, Zea Mays
MGAAVRVAGGRGARASGEWKSQALRLADLVELLGDGGPEDAGVEGGDVGADEWRDGARRAVGLHHTPQHRLLAPVELPSWVQQAHAARYGPSVHSLPRRENTKTRLVQSDDEKTKQNGNSSRPRFLAPLRLSRRPPPATAAADEMGIKGLTKLLADNAPKAMKEQKFESYFGRKIAVDASMSIYQFLIVVGRTGMETLTNEAGEVTSHLQGMFNRTIRLLEAGIKPVYVFDGKPPDMKKQELAKRYSKRDDATKDLTEAVEVGDKDAIEKLSKRTVKAPSEAEAECAALCINDKVFAVASEDMDSLTFGAPRFLRHLMDPSSKKIPVMEFDVAKVLEELELTMDQFIDLCILCGCDYCDSIKGIGGQTALKLIRQHGSIESILENLNKDRYQIPEDWPYQEARRLFKEPNVTLDIPELKWTAPDEEGLISFLVKDNGFNEDRVTKAIEKIKSAKNKSSQGRLESFFKPTATTSAPLKRKETSDKTSKAAANKKTKAGGKKK

SEQ ID NO: 225122 - protein, 193 aa, Zea Mays
MEDEEMEDGIQSVDTISSTPTGVETPDVIDLRKLQRKETDKQAERPLYQVLEQKDKRIAPGTLYGSSHTYVLGAQDKSSAPKRVDLLKNQKSDKVDVTIQPDAMDDVVAAKYEEAREEEKLRNQKEDFSDMVAEFHNTSHDVAELERSKKCYKIFIENSLRKEMMTLPKERNDDAVVWYKSYCLVQQFTYIVI

SEQ ID NO: 225123 - protein, 337 aa, Zea Mays
MQPKMGKMDIDYQVLHDAFFKYQTKPKLSSHGDLYYEGKEFEVKLREMKPGMLSHELKDALGMPDGAPPPWLINMQRYGPPPSYPQLKIPGLNAPIPPGASFGYRPGEWGKPPVDEDEPVDRSKHWGDLEEEEEEEEEEEEEEPMEDEEMEDGIQSVDTISSTPTGVETPDVIDLRKLQRKETDKQAERPLYQVLEQKDKRIAPGTLYGSSHTYVLGAQDKSSAPKRVDLLKNQKSDKVDVTIQPDAMDDVVAAKYEEAREEEKLRNQKEDFSDMVAEFHNTSHDVAELERSKKCYKIFIENSLRKEMMTLPKERNDDAVVWYKSYCLVQQFTYIVI

SEQ ID NO: 225124 - protein, 511 aa, Zea Mays
MFDYIDRLFVMVRPRRLLYMAIDGVAPRAKMNQQRSRRFRAAKDAADAAAEEERLREEFEREGRKLPPKQQSQTCDSNVITPGTEFMAVLSVALQYYIHRRLNYDPGWKQIKVILSDANVPGEGEHKIMSYIRGQRNLSGFNPNTRHCLYGLDADLIMLALATHEVHFSILREVVYTPGQQDKCFLCGQVGHLAANCEGKVKRKAGEFDEKGGAIVPKKPYQFLNIWTLREYLEYEFRMPNPPFKIDFERIVDDFIFMCFFVGNDFLPHMPTLEIREGAINLLMAVYKKEFPSMGGYLTDSCTPDLSRVEHFIQAVGSYEDKIFQKRARLHQRQAERIKREKAQAKRGDDLDPHVRDDLIVPIQRFQGSRLASGAVPVPYEQNGSHKDNKERNSRARKAARVSTSGSSIASALVEAENDLEAQECENKEELKSMLKDALREKSDIFNSDNPEEDKVKLGEPGWRERYYEEKFGARTPEQIEEIRRDVVLKYTEGLCWVMHYYYEGVCSWQW

SEQ ID NO: 225125 - protein, 499 aa, Zea Mays
MKGYAHGNGNLAAQVSQIYQIMQRFYPYHYAPFASDLSGLGQLNIKFELGTPFKPFDQLMGVFPAASAHALPLQYRRLMTDPNSPIIDFYPTDFEVDMNGKRYSWQGIAKLPFIDEDRLLAEIKKVEHTLTPEEARRNSIMCDMLFVNGSHPLSPYIYSLNSKFGHLPDKRRNEIKEKLDPSASGGMNGYITLCSGDPCPPIFRSPVDGLEDIMDNQVICSIYNLPDHHKHIAQPPVGVIMPKKIVEAGDLKPPPVLWHEDSGRRPHDNSNRQNPSGAISGRQLGEAAHRLVINSLNAQGRGQHSGTSMPYRTIMNGLHHLDVASPVSNQGMRPQVGQSAGPPGWYVPRGSVSNGQPPAYASSGSGHYQYESSGHSQYEQGNHGRQQSHPYARDGFHDTRGRVPPAYGYQQSNMYPSGPGLYGQPPSAYPGVHGGGYQPPPYGGGQQWQQQSYSSYAVRGPYGGRPPPTRADSGSQQPQNRYGALDRSNNRRPSSGYRR

SEQ ID NO: 225126 - protein, 397 aa, Zea Mays
MAAAPRSLVTCSGGGSSSSRILLAVFLAAALLASAANAAVSYDHRSLVINGRRRILISGSIHYPRSAPEMWPGLIQKAKDGGLDVVQTYVFWNGHEPAQGQYYFADRYDLVRFVKLVRQAGLYVHLRVGPYVCAEWNFGGFPVWLKYVPGIRFRTDNGPFKAAMQKFVEKIVSMMKSEGLFEWQGGPIIMAQVENEFGPMESVVGSGGKPYAHWAAQMAVGTNAGVPWVMCKQDDAPDPVINTCNGFYCDYFTPNNKHKPTMWTEAWTGWFTKFGGAAPHRPVEDLAFAVARFVQKGGSFVNYYMYHGGTNFGRTAGGPFIATSYDYDAPIDEFGMQWSAQATEMGSLEEHAQSYQAGRACVGFWRSNDTIYWKLRKGICLQVKEWSLCCVPVELPR

SEQ ID NO: 225127 - protein, 211 aa, Zea Mays
MKTVSLGASRPSTVNFRMPTRDNLVPIRVDVEVDGQRYRDAFTWNPRDPDSEIISFAKRTAKDLKLPANFVPQMLQSIQGQLAEFRSYEGQEMQIKEKIVPLKPAIAVSIREQLYEIASQSVSVMREKQMSKKGRRAPEFSSNSKAVNNAVDLFKYFGSKGSVIRKRKEWYLYEPVVDVVANDEDGKEEANNSSRPKKRADEEKAASLQSL

SEQ ID NO: 225128 - protein, 193 aa, Zea Mays
MITECFHVHYTSENVLEGKSAAKKALQQMLGLQQTDSPVVGIITRLTVQKGIHLIKHAMHRALERNGQVVLLGSAPDHRIQGDFTNLASKLHGEYHGRVKLCLTYDEPLSHLIYAGADFILVPSIFEPCGLTQLIAMRYGSIPIVRKTGGLYDTVFDVDDDKDRAQAQGLEPNGFSFEGADSSGVDYALDRQV

SEQ ID NO: 225129 - protein, 68 aa, Zea Mays
MLDLLIMKPIMTNAFICHLSVHQIICMFAAYYAKWQLKEALKHASCTSTGLVAKLAVTTFQSSLKKWT

SEQ ID NO: 225130 - protein, 123 aa, Zea Mays
MGLEAHRPRNKARTYSSAVGKEGKREQRTLARVWRVVRRRGCSCSSRRRISAPPARSLVSSPVRRGATMAGKGGPTNLEKEQMFGMAEKEMEYRVDLFNRLTKTCFEKCVEKRYKEAELNMGD

SEQ ID NO: 225131 - protein, 750 aa, Zea Mays
MSKRPKLEGFSIPRPTSYNFERSQSVQRLYRPTDDPDLDDIAFSDDAPSDAQASTAVEGKAENEEEMDPLDAFMAEIQEEIRAPPPPPKPEALRRTDSDDDEDDPVESFLRAKKDAGLTLAADVMRAGYDSDEEVYAAAKAVDAGMMEYDSDDNPIVIDKKKIEPIPALDHSTIEYDAFTKDFYEEKPSISGMSDQEVTDYMKSLSIRVSGFDVPRPIKNFEDCGFHVPLMNAIAKQAYEKPTTIQCQALPIVLSGRDIIGIAKTGSGKTAAFVLPMIVHIMDQPELEKEEGPIGVICAPTRELAHQIYLEAKKFAKPYNLRVAAIYGGVSKFDQFKELKAGCEIVIATPGRLIDLLKMKALKMFRATYLVLDEADRMFDLGFEPQIRSIVGQIRPDRQTLLFSATMPYKVERLAREILTDPIRVTVGQVGGANEDIKQVVNVLPSDVEKMPWLLGKLPGMIDDGDVLVFASKKARVDEIEKELNQRGFRIAALHGDKDQASRMETLQKFKSGTFHVLVATDVAARGLDIKSIKTVVNFDIAKEMDMHIHRIGRTGRAGDKDGTAYTLITQKEAHFAGELVHSLIAAGQDVPNELMDLAMKDGRFRAKRDSRKGGKKGGKGKGGVGGAGRGRGVRGVDFGLGIGYNAESGSQVPAARSAAVNSLKTGMLQRFKSSFVSGSSNTPSSSAPSFVRPALRGFVSGGTIGGDTRPAQAAPTFIPASRPAQPAPAVPASQPAGNNNENGNPNPER

SEQ ID NO: 225132 - protein, 791 aa, Zea Mays
MARQTSVTEADLEFMLIDENAKPKPLPYSLLEKITNGFSGAHIIGYGGSADVYEGFIGNHKIAVKRLRIPYQHEKEFSQEIECLMKVKHINVVRFIGYCSDTQGQAEKYEDNHVMADSQERLICFEFLPACLDKYIKDPSCSLEWRQRYQIINGVCQGLHQLHEHEILHLDLNPRNILLDDDMVPKISDFGISKCLKKNQGHFYTETISGTPIYMSPERGKHGPITTKSDLFSLGVTVIEIMTGNKENIDQATVEDVFASCIKIFNDKSLTAAQVRQIMVCAEIGIKCRNSEPDKRPSNTKEIIDKLEEEARTEESQESGKLLKVLPTLLLFDLHPGKLIPCSLQLTNDTDEHMAYKLSITESVDWSKYFTTKLPLYGIVQARSTYTVILTVLLECDAPVINRSCYMTLQSCTLAYEYIWKFNNTLEFEDFLEVKKTENAVKEVKLKAFLCEEGRSISKQTRPRVKLLSIVKPQTPLLSLDAHPTKPWVITGHAFGHVRIWNHETQKLLYSFKLSLGPVYSVKFIARKQWFVSSSAEGLIHVYSMETKMQKVKSYRAHDGVSISLAVHPTLPYVLSWPCSGPHEKKLWNWEKGWDCTQTFEREYVARNFVCQVAFDPKETNRFASASNYRVKVWSVDLPKCNYNLPGFFNEVNFLEFFTRDDQQYLIITVSHDKTAKIWDMRNKKYVYDSMEQNLMSPVSSVFSHPNLPILLTRSIDGTSHFWSPKDFRFEAVLDCRYGGHVWGIACLMGSKRRFVIGQETALTILDVGDQECQDMRQEGTSSEAVIMWKY

SEQ ID NO: 225133 - protein, 949 aa, Zea Mays
MQKFEREGNELRRVIEDNQKGSHPVDKDLHTSRHKHVHQKLWKQNLSHRHSGNQDLEKSADQNCLNKDVEIEEGELIEEDHNNIIYKSKLKQENVVLKSVIETSSAEQLQVNNATSKDATCNNRATRESDEKHILEAAKCFSVFMYSSLSLHTLNAIISRVLFIIMQQLCFSPIKPVTYKLQSAVSCCLTHSVRLIYLSESERRTDICPLVRRRTREQLHCQENLENAETTRSCPLPTRGVAACQRLEAGTCGEDGKPPSTPADRITEISNDVHTPAPTPSSVKSSTDSALGGGSNAEPTWRADDLQPCPHPSLPLPSLQGPSPVRHRIREGRPVSPGPSSFTPPSPLKGAPRSTIPTGDLQQTSSTRARPASMAMRLLSPSTPPPRFPSPGQKAPASISASSSSYFSVRLRRARAAAAAAAGAAAAGGSDRRSGRFEGEAMSGAFDRGLAEIARKVPLFEPTADGELAAAAGERPLPINLELWLYRVKVHTRKFEFPEAEKLLDKCISFWPEDGRPYVALGKLYSKQSRYDKARAVYERGCQATQGENPYIWQCWAVLESKGGNIRRARELFDAATVADAKHIAAWHGWAILEIKQGNIKKARTLFEQASQSNPKSCASWLAWAQVEMRAGNNTMARKLFEKAVQASPKNRFSWHVWALFEANEGNIDRARKLLKIGHAVNPRDPVILQSLALLEYNFSSANVARVLFRKASQIDPRHQPVWIAWGWMEWKERNARTARALYQRALSVNSTNECAARCLQAWGVLEQRAGNYTAARRLLRSSLSINSQSEVTWMTWAALEEEQGDPVRAEEIRNLYFQQRTEVVDDASWVIGFLDIIDPALDSVKRLLNLDQPSRPARQDDVKSTTEPCPPTAKSSETSAGNDARNNGSEAMGTLTSDFDLDAFIKKRLALDPSELDAVLEGSDPRGVVSQRRKQRLPRKPLPLLPVP

SEQ ID NO: 225134 - protein, 267 aa, Zea Mays
MDTEYRALQQGSPSPWRTADGVSSWGPAQHQKRQRCQGSSSDQAGSSSSSSLQISEPEPQQNQEEDYYVEDDCDAYDEDDYDFDEAEFNLHLADKFDDLDLPPGVEANVPWLQKIPPKEVVKQPPISITADENANKYDKFKQFDTVQTFSDHHYAKNSHEEPTRAWSKRVQHDWKLLENDLPAYIYVRVAEDRMDLLRAAIIGPKGTPYHDGLFFFDVHIPSAYPSGPPDYVILASEAPRALCRPCCWPLSGAWAHYSRSMQTLHGG

SEQ ID NO: 225135 - protein, 454 aa, Zea Mays
MSFLRSLADSFSSLLFSSGGGAVSMDAAGAAPSPAAVVGERVAVKLRGYFDLAKEEIDKAVRAEEWGLPDEATAHYRNAMRVMLEAKAARVPDAVSSSERGQVRVYQEKIAKWQAQVEERLRVLGQRSGEGATAAEVPKKVAANNPIIRTAKTASNSIQRSPLQNSPTFNRGGQASTHQKIGSGASRPVQKAGGNYDDKLVEMINTTIVDRSPSVKWDDVAGLDKAKQALMEMVILPSKRRDLFTGLRRPARGLLLFGPPGNGKTMLAKAVASESEATFFNVSASSLTSKWVGEAEKLVRTLFMVAIDRQPSVIFMDEIDSVMSTRLANENDSSRRLKSEFLIQFDGVSSNPDDLVIVIGATNKPQELDDAVLRRLVKRIYVPLPDPNVRRLLLKNQLKGQSFKLSNHDFERLAVETEGYSGSDLRALCEEAAMMPIRELGPQNILTIKANQPL

SEQ ID NO: 225136 - protein, 273 aa, Zea Mays
MKETDIVDWFIPVVKRLAAGEWFTARVSSCGLFHIAYPSALDQLKTELRTIYGQLCQDDMPMVRRAAASNLGKFAATVEQNHLKTEIMSIFDDLTQDDQDSVRLLAVEGCAALGKLLEPQDCVAHILPVIVNFSQDKSWRVRYMVANQLYELCEAVGPEPTRADLVPAYVRLLRDNEAEVRIAAAGKVTKFCRILNPQLSIQHILPCVKELSSDSSQHVRSALASVIMGMAPVLGKDATMEQLLPIFLSLLKDEFPDVRLNIISKLDQVNQPL

SEQ ID NO: 225137 - protein, 192 aa, Zea Mays
MFIPFCLFMFFCIHSGTGALAIFLRKAFEVNITTSDYDDGEIEKNISYNCRANALDVLPHIRHTWGDPFPVCTPNWDIVIASDILLYVKQYDNLVKTVSFLLNEYKQKDHKSGCITITDKSGTQISAKPPVFLMSWRRRIGKGHQSLFFDGCEKTGLQVQHLGDLVYLISNKQEADFVETKSDGGSSEGMIF

SEQ ID NO: 225138 - protein, 235 aa, Zea Mays
MDTAVFSPADLFHGVDDSDDDRDEMQICSDGEKPVALEYQERVHDFPDMKLSVREFSCHELNANLLWPGTFSFATWLVKNRSILDGRRVLELGRANALDVLPHIRHTWGDPFPVCTPNWDIVIASDILLYVKQYDNLVKTVSFLLNEYKQKDHKSGCITITDKSGTQISAKPPVFLMSWRRRIGKGHQSLFFDGCEKTGLQVQHLGDLVYLISNKQEADFVETKSDGGSSEGMIF

SEQ ID NO: 225139 - protein, 206 aa, Zea Mays
MPTQISTRQSLRFALPSNNARPISTAARMTCFAKKQHIAAVPLCTLEAKRYEPIVKMCGITSAFDAEMALKAGAKLIGMILWPKSKRSIPLSEAKEISRVAKSYGAESVGVFVDDDSSTILTASDSCNLDLIQLHGDSSRELLPLLWKNNRIIYVLNADEDGKLINAPPSEEYVLDWFLVDSAKVAKGSTGKNSKCQLLKARTGGY

SEQ ID NO: 225140 - protein, 305 aa, Zea Mays
MPQPGNIYNSSHQQQQVTLPRNEASPSYNMVSNKNALQQYAQGPSDRHIEQMDTGGTTPSNYFEEGRVDGGSQLYPSDGDALPGIEGFQIAGEPRPGCQLTACGFPTNGTTLCNFQWVRHLENGIKQSIEGATMYDYVVTADDVGTLLAVDCTPMDDNGRQGDLVTEFANNGNKITCDPEMQSHIDACISKGRAEFEVFVLQAYSPEEWELATLVLTRPNYQIKFKQTGNVVIDEKYSQSLQTKIPNGRTTQFVLITAGTTLPFNTQGISEPNNEDYDVRLRDLIVLVMRTFQKKALDAKRKGKA

SEQ ID NO: 225141 - protein, 168 aa, Zea Mays
MLVGGGRDDEEVLRKLKSMDVDKMENGGGGGEAESPRPAVKYHGWKAMPFIIGNETFEKLGTLGTSANLLVYLTQVFHMRSVDAATLLNGLNGTTSLAPIVGAFLSDAYLGRYLALAIASIASLIMAGGTWDERTRARSLTGSSWSLLLRESGRAAGVFGFAAALYYL

SEQ ID NO: 225142 - protein, 161 aa, Zea Mays
MLVGGGRDDEEVLRKLKSMDVDKMENGGGGGEAESPRPAVKYHGWKAMPFIIGNETFEKLGTLGTSANLLVYLTQVFHMRSVDAATLLNGLNGTTSLAPIVGAFLSDAYLGRYLALAIASIASLIVRSSSWPGRVAQMPTGQTGAASALRRRCGGDGDPVP

SEQ ID NO: 225143 - protein, 200 aa, Zea Mays
MAASPPSPPSPAPPSLLLHSEPSTPARQRSLPAHRPPGSSPHPLTCRVLGRHGTLILRRRLIAVLLGGGEERNSSASHTLCLTKCLNQNLSSHPQFGLIMHYGMINGVTEEGHPIQLPPVADRTFHLLKQKLVQAPVLGLPNDFSKGFVLETAVFMQSKNLVAYLNKHLCPRNQASSRSVWQSLWQLLTNGGHTCSTVKS

SEQ ID NO: 225144 - protein, 79 aa, Zea Mays
MAASPPSPPSPAPPSLLLHSEPSTPARQRSLPAHRPPGSSPHPLTCRVLGRHGTLILRRRLIAVLVEKKGTLVHHTPCA

SEQ ID NO: 225145 - protein, 194 aa, Zea Mays
MAASPPSPPSPAPPSLLLHSEPSTPARQRSLPAHRPPGRSELAHPLLGFNFGRACRPLPCSCSSPHPLTCRVLGRHGTLILRRRLIAVLLGGGEERNSSASHTLCLTKCLNQNLSSHPQFGLIMKLVQAPVLGLPNDFSKGFVLETAVFMQSKNLVAYLNKHLCPRNQASSRSVWQSLWQLLTNGGHTCSTVKS

SEQ ID NO: 225146 - protein, 97 aa, Zea Mays
MMHEELLLEMVRGALTLPHGTGKTVRVAVFAEGPGADEARAAGADVVGGDELIEEIRTGGGKLSFDKCIATPMFMPRLSKVARILGPRGLMPNPKDL

SEQ ID NO: 225147 - protein, 381 aa, Zea Mays
MGLLPFSRYSPAIDIWSIGCIFAEILTGKPLFPGKNVVHQLDLMTDLLGTPSLDTVSRIRNEKARRYLSSMRKKQPVPFTEKFPKADPAALKLLQRLLAFDPKDRPTAEEALADPYFKGLAKVEREPSCQPITKMEFEFERKKATKEDVKELIFREILEYHPQLLKDYMNGTEKTNFLYPSAVDHFRRQFANLEENGGKSGAHAASSDRKHVSLPRTTTVHSNPIPPNGTSQVPQKIPTGRPGRVVGPVIPFENAAAVDPYSQRRVSRNPVLPPTTSNMSAYAYHRKSDNSDRELQQELEKDRMQYQPAQRFMDAKVVSQMSPDLRSSYYIPKGVPKADPADRTALHSSMIHGIAPFSGIAAVGGGYNKVNAVQYGVSRMY

SEQ ID NO: 225148 - protein, 104 aa, Zea Mays
MQPVKVYADRRSQPSRAVIIFCRVNQIDFEEVTVDLFKSQHLTPEFKKINPMGQVPAIVDGRFKLFERAKIESILDWHHSNLRRGAATLVMHTALLPSLVLRQS

SEQ ID NO: 225149 - protein, 888 aa, Zea Mays
MTDAEADTEAVRAAAWEVLRLDHDGHTHEALTRARDLMLAHQDMAITHRLLGDLSYGAAARACLEEGTRKAGLAAAAPHLHVAREAFAAARRLAPDCIDIADALGDAFAASWMFREAECEYKRAQHTPQPTDPALHNAAYGMCMSGGHEHDRDPDFMSVRVEEVRARARASYSRMKTEQLLPIAIHRVLEAGMQLGAAEGRKQAKGIAEVFPDLGRAQYLAAYMDLEFVRSLDAAIDKRLFLRRTLVITERVARDYPKSPVFASFHAKLLFVLGEYDAAETECRRALEMVEPNDPQDDCIPVGSISGENRGVRLVSVACEFHELINKIVMLASDYWDSMSSERQRHSFLQVRLDVLQHEYNKVDPSHAFAMSDVRSFVKEHESWRFWICPLCHCKKFMYTGLLLSHMCTRHPRAVLPRLQSVLDQKLSDEALESDDSLHAVTFCEDSEQQDVTICFNKSSEVFKWLFYAPSSGVRPKPFLEIRQMKCDKGRMLLESIKDKMKTLPADRSSTEFAKAIPEIEEQWQNFLKCSVLDYREVILQLARSFLWRDLKKCMTEDPELAAKPISAADIDAIFTKEVVNPASNAVESSQTVGAQMVSGNCQESVHDEGDSSDNHGKNTESSDQTTDMVERETGLAAKLDKLENGPKISESNPEGNVHDKWESSNNHGKITESSHQAIGMVESETDLAAKSVMTFCNVHDEEESCDNQGKNTESSDQAICMVESETDLATKLNKLEIDPKISESNQESNVHDNGESSGNQGKNTKSLDQAIGMAESETDLAGKLDKLGTDPKISESNQESELHAEHESSDSPVSRSDVALSSKGTSEATVTDTKLPRLPTNTMEGKKQKQYTVVANKKSKTVEKQCRRRSQIQTPNLHISNGGTRKM

SEQ ID NO: 225150 - protein, 843 aa, Zea Mays; identical to SEQ ID NO: 224427

SEQ ID NO: 225151 - protein, 511 aa, Zea Mays
MGSRSKNEDDKALVLCQERKRFVREALDGRCAFAATHFAYIQSLRHTGFALRKFVEPEVPTDSSLFTSTSATPEPPTIMQKPMTISPSLSHHASDSFSPVPSPLSSGRFHVNHMKAGGNSVTTVKEKVIEPVTATLETSSPVRGQAIHDLDDSSTFEAPPGTPPWDYFGLFQPVESQMSFHDDKELGHDFENDDDIRRLREKEGIPELEEELEKSPAYPDYLKRRLGQEKPPDLKDVEKSPMNGGEDDLALSEDDFDNPTSESLVRMFKNRNDTPVAHIATDHSSTSLPKDDLVSETIDSQPERPKDDRAVDSQTERLKDVTPDDPQTEKPKDHAGVDSPTEKTKDHPGVDSPAEKPKHDMRVLDISMYESDETPVTSPPKEISSSTAAFQVNGKFKKPLHDVRNVARDLNSCIKEIEILFIKASDSGKEVPRMLEADKVNFRPLLPEEKGCILVGFFTLLFHNSRIGSFDSKRKMESRKRRDQQHQAFLQHYLLVAERKSLFLNLLLRPK

SEQ ID NO: 225152 - protein, 1797 aa, Zea Mays
MESSDDGGSGPLLLAAGMGSPGHSLVPAAVGGASSAPGASGSGGKPPVKRVMKTPYQLEVLERTYAEDSYPNETKRAELSVQLNLTDRQLQMWFCHRRLKDRKPLAKRQLRDDELPPYSRRGPDRPSVPRLSVPEIGRRYYEPPQVMLPHMAPVHLTQAEHRVINSVEALIGEPLRDDGPVLGIEFDPLPPGAFGTPIVPEPPRQPFRSYDTKMFFGHDSKPMKALAFLPATDPLLPNRGKQKSLVGSSHLGSQAVHEYQFLPEQPSDTYERASQSHFYNAPAEASNLRVAPLSTGSRFLHGLEQAPSYTFHSQSSGSSHSAHRGRSPIALALTDHEGALSNINVSPTPIHGKFSIPQVAGFESSLASSERMGYHDDDTYRVDRKRKHNEEAKTVREVEAHEKRIRKELEKQDLLNRKREEQMQRETERLGRERRKEEERLMRERQREEEKFQREQRRAHKRMEKFMQKQSIRAEKLRQKEELRREKEAAKQKAANERATARRIARESMELMEDERLELLELASRSKGLLSMVSLDSDTLQQLDSFRGMLGKFPPETVRLKVPFSIKPWADSEDIIGNLLMVWKFFVTFGDVLGLPSFTLDEFVQALHDYDSRLLGELHIALLKSIIKDIEDVARTPSVALGVNQSSSANPGGGHPQIVEGAYAWGINILNWQHHLNFLTWPEILRQFGLCAGFGPQLKKSNAEIVHHRDNNEVHNGVDVISILRNGSAAVKAAALMKERGYTNRRSRHRLTPGTVKFAAFYVLSLEGSRGLTILEVAEKIQKSGLRDLTTSKTPEASVSAALSRDTKLFERTAPSTYCVKTPYRKDPDDSEAVLSAAREKIRVFQNTLSECEEVEKDVDEAERDEDSECDDATDDADGDDVNIEGKDAKSPLVGAQYDTQITVVGDVKKESNSVMNISVPPSIQIKSSASVPLHTLDSKASSSTDPQVGDDDKDTEIDESNQGESWVQGLAEGDYCDLSVDERLNAFVALIGVATEGNSIRAILEERLEAASALKKQMWAEAQLDKRRSRDDFTSKVQYDSCVGIKVDTDQKNNAAESTLVPVDNPIRNNNGNSSLTNNDLLVDKQNQLITGDVFQQWNGVSQELSTNPESLSVQQYASSEKTRSQLKSFIGHKAEQLYVYRSLPLGQDRRRNRYWQFSASSSSYDPGSGRVFFESRDGYWRVIDSSEAFEALVSSLDTRGIRESHLHSMLQSIEPTFREAVERKKCVSLEHTTGWTDNGSNESPNCNNEFGSPCSTLSGVASDNLMAYSDTFKIEIGHNEAEKSSISKRASVFLKWMWRECYCHQSTYTMKYGKKRCPELIQSCDHCYQIYLAEEQHCSSCHKSFKPIHNFLEHLSQCEDNQRTNPSWKTQIVGLSVPVGLRLLRLLLATIEASVPAEALLPFWTDLYRKSWGVKLYSASSAEEVLQMLSVLESAIKRDYLSSNFETTTELLNSNTQDATQNSVGGSGSATILPWVPDTTAAVALRLLDLDTSISYKLHSKLVSNKEQEAGDFMKLPLRYPSINKNKQEIEQFIPIGFDQQDGTLLTNSNGRRGRGRGGRGGRGSRGGSRGGSSRGGGGRVPRGIGSSSRIQFRDDNSVPYGRAPRKNVRGGRTRGRGRGRGLRTVRPRQPSEFSATSIPKLNLLGSFSMLSKANHTGNMHSPESLGAEEWVLERREYVKDDDDNLVSRYDESEEENGEPMNEEYDEQISGYPRDNSEFSPIQMMGDVSHDEDAEGDEGEEDGEDYETEDPAGDEDDDVEMDWDDDIRDNDDGNGAANADEDEGGTSSYSSEYSE

SEQ ID NO: 225153 - protein, 1206 aa, Zea Mays
MFLGFHHSHWMSSCRLFMIDSRLLGELHIALLKSIIKDIEDVARTPSVALGVNQSSSANPGGGHPQIVEGAYAWGINILNWQHHLNFLTWPEILRQFGLCAGFGPQLKKSNAEIVHHRDNNEVHNGVDVISILRNGSAAVKAAALMKERGYTNRRSRHRLTPGTVKFAAFYVLSLEGSRGLTILEVAEKIQKSGLRDLTTSKTPEASVSAALSRDTKLFERTAPSTYCVKTPYRKDPDDSEAVLSAAREKIRVFQNTLSECEEVEKDVDEAERDEDSECDDATDDADGDDVNIEGKDAKSPLVGAQYDTQITVVGDVKKESNSVMNISVPPSIQIKSSASVPLHTLDSKASSSTDPQVGDDDKDTEIDESNQGESWVQGLAEGDYCDLSVDERLNAFVALIGVATEGNSIRAILEERLEAASALKKQMWAEAQLDKRRSRDDFTSKVQYDSCVGIKVDTDQKNNAAESTLVPVDNPIRNNNGNSSLTNNDLLVDKQNQLITGDVFQQWNGVSQELSTNPESLSVQQYASSEKTRSQLKSFIGHKAEQLYVYRSLPLGQDRRRNRYWQFSASSSSYDPGSGRVFFESRDGYWRVIDSSEAFEALVSSLDTRGIRESHLHSMLQSIEPTFREAVERKKCVSLEHTTGWTDNGSNESPNCNNEFGSPCSTLSGVASDNLMAYSDTFKIEIGHNEAEKSSISKRASVFLKWMWRECYCHQSTYTMKYGKKRCPELIQSCDHCYQIYLAEEQHCSSCHKSFKPIHNFLEHLSQCEDNQRTNPSWKTQIVGLSVPVGLRLLRLLLATIEASVPAEALLPFWTDLYRKSWGVKLYSASSAEEVLQMLSVLESAIKRDYLSSNFETTTELLNSNTQDATQNSVGGSGSATILPWVPDTTAAVALRLLDLDTSISYKLHSKLVSNKEQEAGDFMKLPLRYPSINKNKQEIEQFIPIGFDQQDGTLLTNSNGRRGRGRGGRGGRGSRGGSRGGSSRGGGGRVPRGIGSSSRIQFRDDNSVPYGRAPRKNVRGGRTRGRGRGRGLRTVRPRQPSEFSATSIPKLNLLGSFSMLSKANHTGNMHSPESLGAEEWVLERREYVKDDDDNLVSRYDESEEENGEPMNEEYDEQISGYPRDNSEFSPIQMMGDVSHDEDAEGDEGEEDGEDYETEDPAGDEDDDVEMDWDDDIRDNDDGNGAANADEDEGGTSSYSSEYSE

SEQ ID NO: 225154 - protein, 72 aa, Zea Mays
MVAFPSGHVTSILSVGIRGSALGPQFVAKPLAPDNPPLKVRFIDNIDPGGIDHQIAQLGSQLATSYSCNCHF

SEQ ID NO: 225155 - protein, 72 aa, Zea Mays; identical to SEQ ID NO: 225154

SEQ ID NO: 225156 - protein, 644 aa, Zea Mays
MKNHHERQENSQLRSENEKLRAENMRYKEALSSASCPSCGGPAALGEMSFDEHHLRVENARLREEVDRISSIAAKYVGRPMVPFPVLSSPLAGAGARAPALPPLDMAPPYGAAADMFGGGGVVAAAGAAGAGDLLLRGAAVQSDADKPMIVELAVAAMEELVRMAQLDEPLWNAPAGLDGSAEEETLNEEEYARLFPGGLGPKPYGLNSEASRDSAVVIMTHANLVEILMDVNQYAAVFSSIVSRAATLEVLSTGVAGNYNGALQVMSVEFQVPSPLVPTRESYFVRYCKQNADGTWAVVDVSLDGLRPGAVLKCRRRPSGCLIQEMPNGYSKVTWVEHVEVDDRSVHSIYKLLVSSGLAFGARRWVGTLDRQCERLASVMASNIPTSDIGVITSAEGRKSMLKLAERMVMSFCGGVTASAAHQWTTLSGSGAEDVRVMTRKSVDDPGRPPGIVLNAATSFWLPVPPKRVFDFLRDESSRSEWDILSNGGVVQEMAHIANGRDHGNCVSLLRVNSTNSNQSSMLILQESCTDMSGSYVIYAPVDVVAMNVVLNGGDPDYVALLPSGFAILPDGPSSGSSSMLQGDGGVGSGGSLLTVAFQILVDSVPTAKISLGSVATVNSLIACTVERIKAAVISGQSNPQQQ

SEQ ID NO: 225157 - protein, 335 aa, Zea Mays
MGELRRLACLGVPDGGTGVRPVVWKLLLGYLPTDRSLWTYELEKKRSQYSAYREEFLLNPSEKLRMIEETKLSRKKDTSIERIGFLSRFEVTNEEHPLSSGKSSLWNQYFQDSELLEQIDRDVKRTHPDISFFSSKSNQESLRRILIIFSKLNPSIRYVQGMNEVLAPLFYVFKNDPDPSNSASAEADAYFCFVELLSGFRDNYCKHLDNSSVGIRSTLSKLSQLLKRHDEELWRHMEVTTKVYPQYYAFRWITLLLTMEFSFNVCIHIWDAILGDPEGPSDTLMRICCAMLILVRKRLLAGDFTANVQLLQHYPATNIDHLLHIANRLRGTVPG

SEQ ID NO: 225158 - protein, 329 aa, Zea Mays
MMMDATDLLLQELSQMKDAEYKINKVEKEQNAAMKALKKQEKRTKKTAIMMMKCEEDESSESSESDCEDEATMNVEQGLVISTAVPEVVASSISAVPAMECDKAAVKAMKKMEKEQMKAMKKMEKEQKKAAKKAMKMEKEAKKMAMATLNGCRDEDDSSCSSESSESECEGQVMRMSRCVTITAPEMPPPSTGLPIIVPQIPEPLAPQPSQSQPSEPATAVQATRVSSVAVTETSTTSRIEVCMGGKCKKSGAVALLQEFEKTVGTGGAVVGCKCLGKCGLGPNVRLRSGASAEGSAKGNPLCIGVGFEDVGTIVAGLFGGADLGMTPT

SEQ ID NO: 225159 - protein, 1015 aa, Zea Mays
MSEAVAILSLSASAVVEDVLRQHGCRLSDRDLASRRAEEAAGRRNEAAGWLRRTVGAVAARDLPEEPSEEEFRLGLRNGQILCGALNRVHPGAVPKASAPCADGAALSAFQYFENVRNFLVAAQEIGLPCFEASDLEQGGKSARVVNCVLALKSYGDWKQCGGTGPWKYGGNLKPSVSGKSGHGRKNSEPFRRSQSINEGEVPYEEAGFNGDAHFDSSDMSTSRPLKMLVSAVLSDKRPDEVPQLLESMLSKLVEEFENRLNSQNELVKAALKSGIDNTKSFSKSKVLVETPPNTSGRKMDTGDIYCNHKKTKKEASREVALKQHLILQQQSKNVEELKSDLITTRAGMEYMQMKYSEDLNLLGRHLFSLAHAASGYHKVLEENRKLYNQVQDLKGSIRVYCRVRPFLPGQASPSTVGSIDEGNITIVTPSKSGKEGRKTFSFNKVFGPSATQAEVFLDTQPLIRSVLDGYNVCIFAYGQTGSGKTYTMSGPKNMTEQTQGVNYRALGDLFKLAEQRKGTFIYDIAVQMIEIYNEQVRDLLVSDGLNKKLEIRNNSQNGLNVPDASLVRVASTMDVMELMNVGQKNRAVGATALNDRSSRSHSCLTVHVQGRDLTSGTIFRGCMHLVDLAGSERVDKSEVTGERLKEAQHINKSLSALGDVIASLAQKNSHVPYRNSKLTQLLQDSLGGQAKTLMFVHISPESDAVGETISTLKFAERVSTVELGAARLNKESGEVRELKEQIARLKSALAAKNLGSEQIISHDSEAFNIKMPSPGFSNTRQGSCDLLSSQSNFRQPMEDVGNIEARANHTLRQKKPSFDLQDLLTASDSPSWPDSNLRVNFQMGDEREAIGGDWIDKVVVNNNNSASDWEGDNTALPDFFYQRYHSGMREKQYQRNNMRQKDDHEYEQQRPRFYSTNTDDSDDIDIATSDSSESDALWQLNVQSMNNSISESGSKVKKPQIKLRDGSDARTPIHSQIPSGSRKVANGSSRSVRQPLSRSDSRRLSSNGRQTGAK

SEQ ID NO: 225160 - protein, 530 aa, Zea Mays
MTLCDPYLNTDAGTMSPFEHGEVFVLDDGGEVDLDLGNYERFIDVTLTRDNNITTGKIYQSVIEKERRGDYLGKTVQVIPHVTDEIKQWIQSVSSVPVDGQTRPADVCVIELGGTVGDIESMPFIEALRQLSFSLGKENFCLIHVSLVPVLGVVGEQKTKPTQHSVRELRALGLTPDLLACRSAQPLIGSVKEKLSQFCHVPVENILNIHDVPNLWHVPLILRNQKAHEAIIKQLNLARSAGPPELRDWTDMAESYDNLNNSVKVALVGKYTNLTDSYLSVVKALLHASVACSLKPSIQWIAASDLEDATAISAPDAHAEAWETLKGSSCILIPGGFGDRGISGMILAAKYARENRVPYLGICLGMQISVIEISRHVLGLEDADSEEFNKDTPNHVVMYMPEVSKTHMGNTMRLGCRRTFFSKPDCLTSKLYGSPPHVDERHRHRYEVNPSFVPMLESAGLHFVGCDESRNRMEIVELQDHPFYVGVQFHPEFKSRPRRPSPPFTGLIMAATKQLGANSNSSNGFVGASD

SEQ ID NO: 225161 - protein, 244 aa, Zea Mays
MASPTAAATFHRFDQALSPPTPHERPGGIHNLELQLMPPRGSAASYYEGAAGAAPAAAVRCCASPHYSPAVHVPQPGADPMRLQLSIGFGGGDGETSAPAAAARLKEEAREQLRLAMAEKAAADDARAQARRQAELAEQELAAARRMRQQAQAELGRAHALRDHAVRQVDATLLQVTCYSCRCKFRARVTGGGAMSSEVASYVSSVVTAEGGDAEVDDDDPYRHHRQLTADDDAPSHARMMDIN

SEQ ID NO: 225162 - protein, 115 aa, Zea Mays
MMSDHGIYSRERLLVPISNPEILLGSTCYIEMDHNAKREVAIFYPEGRPGGKTDSVASIVSAERRNKRILESVRRSLHVDDGTAAYYLSVTEGDPRAAMTEYSEDLRWEQQRAGR

SEQ ID NO: 225163 - protein, 295 aa, Zea Mays
MSSPWLRAAGSPRSCQGLQRDRRVLPDALPGGPRDGAAHRPARPQAGRHRPGPRLARRRRARLRLLALVAAHRRHAALGLHPGGRHGGEGHGPHAGLRQGAAHLGQVGRRQPCPDRHQGLLPGDLAFPLQGPGLGRVAEEDVHGGDAAAQRHGALPGRPDPAAGDPARRAGGHGQARLPARLHLPLAAAQGRAPHQVRRRHLRRRLHALVRRRPPRHLERPLLRRAHRRAGAQLMDEYYVFSFFPFSFYRHAVLRSSISKGKEKDSRLISYSYEGAFKRFFNLNELIEEYQKRIL

SEQ ID NO: 225164 - protein, 300 aa, Zea Mays
MLSYGVAADATDDYVRIGESTAIESLRRFVSAVVEVFGEEYLRSPNEDDIARLLAIGDSRGFPGMLGSIDCMHWKWKNCPSAWQGMYTGHVHEPTIILEAVADKDLWIWHAFFGMPGSHNDINVLHRSSLFARLAEGEAPNVNYTINNNDYTMGYYLADGIYPSWATFVKTIPEPQGNKKKYFAIAQEACRKDVERAFGVLQARFAIVRGPARFWDEDTLGLIMRACIIMHNMIVEDERDDEHDIIYEGVGEKVNLSHEGTPELEEFIQNYKNIKDKEIHTQLQADIIEHLWQHHPDLYK

SEQ ID NO: 225165 - protein, 326 aa, Zea Mays
MLGRTKDQIRTTEQVNGAMASCQALKLDALVIIGGVTSNTDAAQLAETFAEAKCATKVVGVPVTLNGDLKNQFVETTVGFDTICKVNAQLISNVCTDALSAEKYYYFIRLMGRKASHVALECALQSHPNMVILGEEVAASKLTIFDITKQICDAVQARAEKDKNHGVILIPEGLVESIPELYALLQEIHGLHGKGVSVENISSQLSPWASALFEFLPPFIRKQLLLHPESDDSAQLSQIETEKLLAQLVETEMNRRLKEGTYKGKKFNAICHFFGYQARGALPSKFDCDYAYASPSPAHLIKHIDCCWFNTWVVGFRFWGMCATTS

SEQ ID NO: 225166 - protein, 308 aa, Zea Mays
MVCKLNKSLYGLKQAPRAWYSRFATFLCSQGFVEAKSDTSLFILRRGPDTAYLLYVGDIVLTASSPGLLRHIISCLQQEFAMKDLGALHHFLGVTVERRPQGMFLHQRQYTVDLLKRAGMVECKPCVTPVDTQGKVSAAGTPVADPTGYRSLAGALQYLIFTRPNIAYAVQQVCLHMHDPREPHLTALKRVLRYLRGTIDFGLLRRSPTTELRVYTDADWAGCPDTGRSTSGYAVFLGDSLVSWSSKRQPIVSRSSAKAEYRAVANDVAEATWLRQLLQELHSPLARSTLVFCDNVNAVHLSTNPVQH

SEQ ID NO: 225167 - protein, 303 aa, Zea Mays
MASGEAAEPLQYTTTALRVSIHCEGCKKKVKKVLHSIEGVYKVTVDAAQHKVTVTGSVEADALVRRLHKAGKQAALWPSSPAPVEAKKKPEEVAPAALPAAAANKDARAQEKKPAKDKKADYADAAAQPSKDKTADKGEAAAKPSQQDKKTGKCEPAPETKKGSPAPGKQQDAAEEAGADKPGGGGKKGKKDKNPNKPKDSGDCEAPAEKQASPGPESPRGHGGAFPYYAAHPVLSCYNVAHPVLSCYNVAHPSSSVAYYAPAAVVPYGGFPPMVPAEFMYGPPGMQESSMFNEDNANSCSLM

SEQ ID NO: 225168 - protein, 943 aa, Zea Mays
MAPSQAAAAAGPTFEDLERDLQAVLMDQNHMSPVDDLGMFRSGSAPPTVEGSRTAIGALFSGPPLHANSLGAGGGSGGTASGLDVLTDEEIRSHPAYLSYYYSNEHLNPRLPPPMVSKEDWRAAQWFQAVSGGIGDRRRRPAEVGSGNSLFSVQPGANEVGGEKALLSDRMERSGRNGLARQQSSEWLGRGSDGLIGLSDASALGSPRKSFADALQENISRPAVIAGHLSRSNSRNVLEGPTPIRSSDSRKPQLQNRSESMNGLRSGSTSPSLVRVQSLGSSMSHTFASAVGSSISRSTTPDPQLIRRTPSPCLPPVGVRMGSSDKKVEASVSSLNHDGADIVATLSSLSLSGNKMSNVENEVQTHAYQNFGDQADVLFNVPKEHRQFSPRNLTQKTDEDLLNAPEYAVFPNGGSNFSNLHASKVASHSNSKFPMQSPHGNANKKGSLMSSAGSVSQYQHLNGDSHDIDVSGWHTHTGGFTSSMLNNQLNPDGDYGNVLSNHGGSSYQGQPTETMYAQCLQANPDSPLGAAASMSPFQGRGFTGSGHLDSPGYQKAYLGSLFGQQKLQYGMPYLGNSGALNQNIYGNDSAFGIGMTYLTSPPSTPYISSPQGHVGQGNRLTRLPAVVRNTAGGSMGSWNSENGLMDNGYGSSLLEEFKSNKTRSFELLDIVGHVVEFSSDQYGSRFIQQKLETASTEQKNMIFPEILPQARTLMTDVFGNYVIQKFFEYGTETQTKQLATLLKGFVLQLSLQMYGCRVIQKALEVVEVEQQTQMALELDGSIMRCVRDQNGNHVIQKCIECIPQERIRFIISAFYGHVVELSMHPYGCRVIQRILEHCDDESTQNAMMEEIMQSVVTLTEDQYGNYVIQHVLQYGKPEERSTIIAQLAGQIVKMSQQKFASNVVEKCLTFGSPEQRQILINEMLGNDERPVRKLCCAEGSGDM

SEQ ID NO: 225169 - protein, 412 aa, Zea Mays
MNGLRSGSTSPSLVRVQSLGSSMSHTFASAVGSSISRSTTPDPQLIRRTPSPCLPPVGVRMGSSDKKVEASVSSLNHDGADIVATLSSLSLSGNKMSNVENEVQTHAYQNFGDQADVLFNVPKEHRQFSPRNLTQKTDEDLLNAPEYAVFPNGGSNFSNLHASKVASHSNSKFPMQSPHGNANKKGSLMSSAGSVSQYQHLNGDSHDIDVSGWHTHTDGDYGNVLSNHGGSSYQGQPTETMYAQCLQANPDSPLGAAASMSPFQGRGFTGSGHLDSPGYQKAYLGSLFGQQKLQYGMPYLGNSGALNQNIYGNDSAFGIGMTYLTSPPSTPYISSPQGHVGQGNRLTRLPAVVRNTAGGSMGSWNSENGLMDNGYGSSLLEEFKSNKTRSFELLDIVGHVVEFRYYFLEILT

SEQ ID NO: 225170 - protein, 428 aa, Zea Mays
MLDGDDGHPFSDDISSPIAAHILDFYDDDDGGCGGGGGDLFVGVNAASDMFTVPSEDVSTSSVTTPPAPCGGHGDNASSLDAAASAFSPMPFLDSTLSALLEEEDAPVLDTELLAIDDYRFAATAVAGDEPRPEQQRFAQVPMVLPVAEHPSSLQTQMSSTAFELLHAASSSSGYTDNDCFAAAMDEGGGGYVGLDEALCQQQQHQLLQPGALLSAGMMETAAQGCYFVNGGPTAQGVLFGASGSGVVMPMTAGLEEIGEYQRMMESASAALAATHSPDADSVAAAQQMAFSGNGGEMQMGGGSMSPGRLPAATEAASSLEDTDFKSARITVEERREKIHRYIKKRNERNFSKKIKYACRKTLADSRPRVRGRFAKNDDYGEPSSRVAHNHDEYDHMAAMKAQDILDPDALQAAMNSYMYNHTVESWM

SEQ ID NO: 225171 - protein, 970 aa, Zea Mays
MQEELGQRMHVPHGINLCFSTSSELFQVESSIELGTAEVNPVPSEKLSANSQAVRDDAGAVEGIDMNGKPVQKPKRKKHRPKVIKEGQSAKLQKPKTPKPPKENGNQPTGKRKYVRKKGLSTPAKQIPSEGADTHTRAKPGIAQRCLDFDVEDQHGHLDLVSQTQETEIQTGPGDTQPSISGVERSNAQVSCHWGWGGTSSSIISADPIVDIQGLQADCIPKRVNFDLNNSMASQMPTNYSSRMDSSGQFFQFGLGEKVQTNQLLDYNCNLPARRVSHLSSSVDHMRHPLANFDQYISTSQVCTENSRRHYQMPSSSRISENRTAASQYTERVSMGGNFNPGACIGEGTVIKQMAQCYRLPESPLVPPKHNERDVMNGNLNEFSVYNDYLNFSSNSNYQTGAAFGFHDSPVYSDVLAMGKKREHNAISGHQISFDIDFVNSNSTRKFCIDDLLSTSSQTSYYPEACKRMRPENHSNQLNVTTGKLSSSSAFSGSLNTNNVSTINPGIGTLADIQRLMALEKSQASQQMIDFITSQNNMAGESTELAQQNNSDKGFVALHNKKFQSLTAQNIPLPDSTVNQSGESNILRNGIHQTQPWEITSRSHHSSDNFALPNKWSGYLTAGNTQLSSITVNPSTENYIQSNAIYQYQCLENVVAKVPVLSGTHNTSSQEGHNHSTAATNEHIRTTSEEVVRSFTQRASEPTTHGNYNLNSSRVTAEANSTEKPRKRGRPRKVVKPNGEPKERGTKGKQNVSHEKPTSQKGSHTDILKTNGISYASEPSTGITPRMAIVESKSSDQDKEIHGGVIPQATAISVDLLDGIIQKIKLLSISRPDNVVAEIPKDALVPYEGEFGALVAFEGKTKKNRSRAKVNIDPVTTMMWNLLMGPDMGDGAEGLDKDKEKWLDEERKVFRGRVDSFIARMHLVQGDRRFSRWKGSVVDSVVGVFLTQNVSDHLSRICFSNYRLFKCSRN

SEQ ID NO: 225172 - protein, 437 aa, Zea Mays
MAPLPPGPEMEVMSGWLWKTALMEVPRKHHSPPKWSVILWMLVTANLWIMCSSSTQKKVLMPGFSASEMDYIDNDGKFLLSNGYVFGFGFATVSVSDSTYYVLAVVHLPTTSIVWSANANSPVSHSDNFVFDKDGNAYLQSGGSTVWTANISGKGATSMQLLDSGNLVVFGKDGSSPLWQSFSHPTDTLLSGQSFIEGMSLLSHSNAQNMTYTLEIKSGDMLLYAGFQLPQPYWSALQDNRVIIDKNGNNNIYSANLSSGSWSFYDQSGLLQSQLVIAQQQGDANTTLAAVLGNDGLINFYMLQSVNGKSALPITVPQDSCDMPAHCKPYSICNSGTGCQCPSALSSYANCDPGVISPCNSKNKFQLVQLDSAVGYVGTRFTLPVPKTNLTGCRNACMGNCSCIAVFFDQTSGNCFLFDQIGSLQQKDGGWWWFVRR

SEQ ID NO: 225173 - protein, 121 aa, Zea Mays
MLEEALQGVDLVVHTAGPFQRAEECTVLQAAISTKTPYIDVCDDTDYSWRAKGFHEQAKAAGVPAITTAGIYPGVSNVMAAELVHAARSENGEPERLRYWWCWSNNSDNKFSTSWGGCDCI

SEQ ID NO: 225174 - protein, 256 aa, Zea Mays
MLPSLAFVGFLAWQARRSFRRISYGRSHVVVVAYYALLWVVAVLNLLWCFLQAWQCMPDRAFSWNVLSLFTKSGMLFLEVSLIAFLLQGNDASGFESLARTFVISGAVVAADALLKTIYVFGFGVPLFIDADQGTGGKWGLWILHKLVLTGVYGLIVFMHHSRWRNRLPAKPAYYNYVCAMLLLNGVSLFGCFLVASGAGFGLWLYNLTIVCYHSLYLPLLYVTFLADFFQEEDMLLESVYYSEMKDAGFFDADWD

SEQ ID NO: 225175 - protein, 431 aa, Zea Mays
MAKAAPAAGGGIADILVTRDRDFLVRNSGEQVKISSIEASPVAIYFSNSWFPPSRWFTPKLIQVYKQLASEGKSFEVIFAWGDLKEKTFNEYFAKMPWLALPFSDIERREALDIRFKVTDTPHLVILDAKTGEVYTKDGVRIVSEYGVDAYPFTPDRINELKELEKEEKENQTIQIVLGTSTRDYLISNKGDKVPISELEGKYVGLFFVGVGYPPFIEFIDLLAKIYEKLKEVGEKFEVVAVSIYSEESSFNESFAKMPWLAIPHGDNKCLTLTRYFGFMSLPTLVLIGPDGKTLNNNVAEIIIDHGFDVWEGFPFSAEKLDFLAEKVKVKAATQTLESLLISGHLDFVIGKDGVKNLLGRLSFFTSHQNGVDHPVASCPHLWRHTARSKRRTVILRSSSSPMTGTRGRSMNISPKCHGSLCPGKMKGQHP

SEQ ID NO: 225176 - protein, 140 aa, Zea Mays
MLRNNECPACRTHCASRRSLRDDPNYDALIAALYPDIDKYEEEELAFNEEENDRNKQIQASIAEAFRKQSEVIGRKSTAKATAAAFMKRMETVKAVAKRPHLRRRVPQRKSRNDCQNGQHRVLHLPEHAMMRLLLMKRMM

SEQ ID NO: 225177 - protein, 156 aa, Zea Mays
MECLHRFCRECIDKSMRLGNNECPACRTHCASRRSLRDDPNYDALIAALYPDIDKYEEEELAFNEEENDRNKQIQASIAEAFRKQSEVIGRKSTAKATAAAFMKRMETVKAVAKRPHLRRRVPQRKSRNDCQNGQHRVLHLPEHAMMRLLLMKRMM

SEQ ID NO: 225178 - protein, 53 aa, Zea Mays
MSKKNNLAKRKKQYEFDLQREKEAKEKQAKKLQAKKSKMKNCNPLVAFCVWSS

SEQ ID NO: 225179 - protein, 65 aa, Zea Mays
MQWCFFIFSVSIFSRYCFSHLSYPSHTSFTLLQFFLHQILFGRLGKGRVLPAPVVPLGPSQPSSS

SEQ ID NO: 225180 - protein, 324 aa, Zea Mays
MQMQMQQQSPLQCLLGSGGGSDHHHLMPPPSGLAPLPGGPADTAASGPAGGGSSTSASVQAAAGAGAGAQPRPVVSMAERARLARVPLPEPGTLRCPRCDSTNTKFCYFNNYSLSQPRHFCKACRRYWTRGGALRNVPVGGGCRRNTKRSSKKSSRGGGAGATAATSSSSTTSTSTTATTTTTTSAAMAAAEAIAGMQAQLPHLGLPPAAAAAALEASLEGYHHYLPLQMQPQFLQQAGLHGYHFADDGTGVLAADGFPRGVVASGLLAQLAAVKMEEHGSNGGGAIAAHHEQQSYWPGSTGGGGGWPVEFLSGFSSSSSGNVL

SEQ ID NO: 225181 - protein, 587 aa, Zea Mays
MGLLVAGTKYRGEFEERLKKLMEEIKQNEDIILFIDEVHTLIGAGAAEGAIDAANILKPALARGELQCIGATTLDEYRKHIEKDPALERRFQPVKVPEPTVDETIQILRGLRERYELHHKLRYTDDALIAAAQLSYQYISDRFLPDKAIDLIDEAGSRVRLRHAQLPDEAKELDKELRQITKQKNEAVRGQDFEKAGELRDREMELKAQITAIIDKSKEMIKAETESGDVGPLVTEADIQHIVSSWTGIPVEKVSSDESDRLLKMEETLHTRIIGQDEAVKAISRAIRRARVGLKNPNRPIASFIFSGPTGVGKSELAKALAAYYFGSEEAMIRLDMSEFMERHTVSKLIGSPPGYVGYTEGGQLTEAVRRRPYTVVLFDEIEKAHPDVFNMMLQILEDGRLTDSKGRTVDFKNTLLIMTSNVGSSVIEKGGRKIGFDLDYDEKDTSYNRIKSLVTEELKQYFRPEFLNRLDEMIVFRQLTKLEVKEIADIMLKEVFDRLKAKEINLQVTEKFRDRVVDEGYNPSYGARPLRRAIMRLLEDSLAEKMLAGEVKEGDSAIVDVDSDGKVIVLNGGSGVAEPLEPALST

SEQ ID NO: 225182 - protein, 419 aa, Zea Mays
MMHPLRRILALLLVGLLPAAAWSLAPPRFPRPQPRSRPGANGVGDYEYETRYFRQRLDHFSFPGVGDEDEDEAAAFFQQRYLVGRGGGWAGPGGPIFFYCGNEGDIAWFAANSGLVWEAAPRFAALVVFAEHRYYGESMPFGSKAKAYSDSKSLAYLTAEQALADFAVLLTDLKRNLSAEGSPVVLFGGSYGGMLAAWMRLKYPHIAIGALASSAPILQFEDIVPSTIFYDLVSDDFRRESLSCFLTIKDSWKELDDQANEQDGLLKLSKTFHLCQTLKTSGDLSDWLSSAYSYLAMVDYPLPSEFLMPLPANPIKEVCRNIDSQPKGTGTLERIYAGVNVYYNYTGTVDCFDLNDDPHGMGGWDWQACTEMVMPMSYSEQRSMYPPYKFDYASYAEDCIKSYGVRPRPKWITTEFEYH

SEQ ID NO: 225183 - protein, 271 aa, Zea Mays
MNFCPLGACALAGTGLPIDRFQTAKDLKFTAPMKNSIDAVSDRDFVLEFLAANSIAAVHLSRIGEEWVLWASEEFGFLIPSDKVSTGSSIMPQKKNPDPMELVRGKSARVVGDLMTVLTLCKGLPQAYNRDLQEDKEPLFDSVKAVLGMLEVCTEFAQNISFNSKRIQSSLPAGYLDATTLADYLVKKGVPFRTSHEIVGRSVALCVSKNCQLAELELADLKSVHPVFEDDVYEYLGVENAVNKFISYGSTGSEQVKKQLEDWRIQLGVSS

SEQ ID NO: 225184 - protein, 94 aa, Zea Mays
MSLMSVNLLQEFWKQRRTLLYRQNWTVASTPGSSRGVVTLLDSFTEFTEEYELKMKEKGEQLIVRSFISATSPFLAFISATLPQSPHARRCLKI

SEQ ID NO: 225185 - protein, 299 aa, Zea Mays
MWSEVRNISGSSELDGIRWLQVSTTLIDSLIQPVFMKWIEEEQALENGQINEKLMKTISSKLKEGNKILRRFNRFGKSELYLDMLFFLRFGSARCDSYFNVKFLAEHGERILEDLVISLADVIASIYLELMSVDGDMSAEVVGSSLVLCSLSTRELQKLRNEVAINWWLHQYFKSVVSMYEDRFELYVLCSKKCEKTADNQAERANWWRIASGKPNVLTLDYVNISPFSLPARRTKELRALIGWRYYFSLFLELSDIAMPFIRVAISKVSSAVSYFWVSMIGRSLGLIFSGIRQSLGWK

SEQ ID NO: 225186 - protein, 642 aa, Zea Mays
MDGGEDRTFKANFTSEGVTMLQDRVKEKLSELMGDYSDDTLAEYVVVLLRNGRHKDEAAKELHVFLGDDNDAFVSWLWDHLSSNLHLYVQPKAASSKDDTRSSHNAARGLPVHSVISSTQVNHEPEAETQKTVITHKKKDWGHRKRDWGTIGRGQSETVPLRSVVDNVSLAKEKDLHESHADEKAFHKSHSVRRTRSPDMHNHRKRSREADVRSTKSATHPVNGAPRRLLQFAVRDAVRTVPPVTSGSESASKRLCSVVSTLASDSTLDITHIRLQKTNSDLRIPVATAALRAAAEAAEDALKDSFCGSVFSRLGRMPTINSSEQSPDRRSQDLEGKEYENIDNIQAENQVEFYGRNQHGGSDVYMRDRRTEEATGSLSNIDEYGHNSSVRYNGLGSLRSALPASGGKESLVLGYVRGASEVRSGRLIAQGPPAGSGPRSSEKILNVSGNTKTQKLRTHVTRDALAFDPQVPMEKVSGARKSIGQGPHAGSGPRPSERILNVSGNTNTQKLPTHVTRDDLAFDPQVPMEKVADARKSHVKIAHANDMSMTTDKSKDLIQSSSMLEAQKATSGAAGSNTTGQPEGGSDSRTVFVSNVHFGATKDALSRHFNKFGAILKTHIVTDGVTAQRILSSCTKNQQSRR

SEQ ID NO: 225187 - protein, 505 aa, Zea Mays
MDGGEDRTFKANFTSEGVTMLQDRVKEKLSELMGDYSDDTLAEYVVVLLRNGRHKDEAAKELHVFLGDDNDAFVSWLWDHLSSNLHLYVQPKAASSKDDTRSSHNAARGLPVHSVISSTQVNHEPEAETQKTVITHKKKDWGHRKRDWGTIGRGQSETVPLRSVVDNVSLAKEKDLHESHADEKAFHKSHSVRRTRSPDMHNHRKRSREADVRSTKSATHPVNGAPRRLLQFAVRDAVRTVPPVTSGSESASKRLCSVVSTLASDSTLDITHIRLQKTNSDLRIPVATAALRAAAEAAEDALKDSFCGSVFSRLGRMPTINSSEQSPDRRSQDLEGKEYENIDNIQAENQVEFYGRNQHGGSDVYMRDRRTEEATGSLSNIDEYGHNSSVRYNGLGSLRSALPASGGKESLVLGYVRGASEVRSGRLIAQGPPAGSGPRSSEKILNVSGNTKTQKLRTHVTRDALAFDPQVPMEKVSGARKSIGMTLHLTLKCQWRRLLMQGNHM

SEQ ID NO: 225188 - protein, 461 aa, Zea Mays
MALATNSAAAAAAVSGGAASQPRRAAAFLPLKRRTISAIHAADPSKNNGPVVPAAAGAKSSSSAVATPEKKPAAPGKWAVDSWRSKKALQLPEYPNAEELDAVLKTIEMFPPVVPVVKVGRMAGQFAKPRSEPFEEKDSVKLPSYRGGNVNGDDFTEKSRVSDPQRMIRAYAQSVATLNLLRAFATGGSDVGVEGCQVTVMSERKTYLVITMVSNKMNPSELVKLIEILNPSNKPGRITIITRMGAESMRVKLPHLIRAVRNAGLIVTWITDPIHGNTIKAPCGLKTRPFDSILVRSIKASALILQAFGLVPNKLHATILTTKEARTIAAATAKQLQLLNHLCMQSIKKEARHMMKHLKRFANMSSLYLLPRTLHFLVVVLIPNQGVVIRKETMIFVSARLKILFKEGGYDTFDPLFLNLIASMQHYNQIEAQSAASMTPMWTICNMCMIGCVMRELIYVN

SEQ ID NO: 225189 - protein, 1000 aa, Zea Mays
MELMSGLMELELKLDLHHGEKIGMSASGWEQGTNKQQREKKVIGYKHVVAKSAALSSICYSCVVVIGSFVKLCTPNLLVELQKTVNLSSLFNCLLAQKNQHVLFETLKISRILAKKDQHFFLESFTKEGVKHAIEYIVSQSKNNSHQNMKEYCLCFYMETSSTVEACSIANNSVTELAKEIKKNFLSVKGSNKSPNRFGFTLKSVRDFFARLNLYSSTHLAENPDSCKQLSDLSRRLLSDELPVTSNFEFVQSGSIKCLSVYLSNGAYCNADLNDGPVLEQLSVVHSRLHKFANLALTPFNESSANPLGILVEKLLDTLHMCYGSFPVLLSYEQMSREDMTMIPLRYPEAKKPTSLLLKFHRSQKERELYNYNGVLIVDLFSTPDSTEPILFPEVFRRTDQEPASENSNQDKNDDDGNKSSRLEFFYNGVTLQPSVTFFESILHLMYKGQSDLWIDPSFWVQEHSITYRKRIKSNKEISSQSSYYTRLSYVHEILQRAWLKDPFFTAILNGKLPGNLDVSDLSYNLLFMLKVLEGVNRFSYQLLMDEQINKFAEGIQEDINDIEVAICPVPRHQFLSSLLINKLEVQMQDVLFDDGLIPSWCVYLVENCPFLLSLDTRWKYFCLTVHRSFFPDQINRYYPQTKKYRVARSAIIEGAVSVMTNHGPSNRIIEVEFEGEIGTGRGPTFEFYSTVSHELQRAGLGMWRGDSGEHGFVHAPFGLFPKPWPPSSQGIDFTNMLQKFKLLGNLVVRAVLDGRILDIPLSKAFYKIMLEQELDMYDILSFDPELGRTVIEFQALVSRKNFLETSSEESNPTADLSYKNVKLEDLCLDFTLPGNPEYELVPGGSEKMVTLDSLDQYVSLVVYATLKSGIAKQIEAFKSGINEVFDLKALKMFTEEEMERILCGEQGAWDLKNLEDHIVFEHGYDMSSQPVIIFLEILREFGREEQRAFTQFSTGAPHLPLGGLASLDPKLTVVRKQCDGNVDDELPSVTTCRHFIKLP

SEQ ID NO: 225190 - protein, 98 aa, Zea Mays
MQAILRVNSTKSMTGHLIGAAGGIEAVASIQAIRTGWVHPNLNLENPEDTVDVGILVGSQKERCEVKVALSNSFGFGGHNSSILFAPFKELPSSSSSK

SEQ ID NO: 225191 - protein, 229 aa, Zea Mays
MAATVLFTPAQCHRATATTSGRGAPSHCALAPGHRRPGRGSVRAVPPEQSSLPQAAAAAVYGTAGDVKAALYRALDGANRGIFGMTSAKRSEIHGLVELLESRNPTPEPTAKLQDKVDGCWKLIYSTISILGKKRTKLGLRDFISLGDFLQIIDVKQRVDIKLESSTITPEQLMNIFQKNYDMLLDIFNPEGWLEITYPLISFLSLWLTSWVFNFYELIFLSLHFSSLN

SEQ ID NO: 225192 - protein, 262 aa, Zea Mays
MAATVLFTPAQCHRATATTSGRGAPSHCALAPGHRRPGRGSVRAVPPEQSSLPQAAAAAVYGTAGDVKAALYRALDGANRGIFGMTSAKRSEIHGLVELLESRNPTPEPTAKLQDKVDGCWKLIYSTISILGKKRTKLGLRDFISLGDFLQIIDVKQEKAVNVVEFSARALKILTGKLTIEASYRVTSQTRVDIKLESSTITPEQLMNIFQKNYDMLLDIFNPEGWLEITYPLISFLSLWLTSWVFNFYELIFLSLHFSSLN

SEQ ID NO: 225193 - protein, 326 aa, Zea Mays
MVIWSCSSCLHGFIPRAAWRRHYPLLSPRPPASPPPIHHFSSARRSTKKSAPKAPMGSSIPAAKALIDSSREPFYVIRKGDVIGVYKNLSDCQAQASKSVLHPSVTVYKGYSLRKETEEYLAARGFRNAVCSIGAADASDELFGDLVPCPFQQPDENTQSILKMSQGQEMETRSSEHPKVADLEPLPDSELSCILEFDGACKGNPGKSGAGVIIRRLDGSVIAVLREGLGIMTNNAAEYRALILGLNYASKKGFKYIRCQGDSKLVCNQVQGAWRARSDNMSILCDIAKELKETFLTFQINHVLRVGLSFSIVIWPCCERASSRVG

SEQ ID NO: 225194 - protein, 278 aa, Zea Mays
MVIWSCSSCLHGFIPRAAWRRHYPLLSPRPPASPPPIHHFSSARRSTKKSAPKAPMGSSIPAAKALIDSSREPFYVIRKGDVIGVYKNLSDCQAQASKSVLHPSVTVYKGYSLRKETEEYLAARGFRNAVCSIGAADASDELFGDLVPCPFQQPDENTQSILKMSQGQEMETRSSEHPKVADLEPLPDSELSCILEFDGACKGNPGKSGAGVIIRRLDGSVVQGAWRARSDNMSILCDIAKELKETFLTFQINHVLRVGLSFSIVIWPCCERASSRVG

SEQ ID NO: 225195 - protein, 301 aa, Zea Mays
MVIWSCSSCLHGFIPRAAWRRHYPLLSPRPPASPPPIHHFSSARRSTKKSAPKAPMGSSIPAAKALIDSSREPFYVIRKGDVIGVYKNLSDCQAQASKSVLHPSVTVYKGYSLRKETEEYLAARGFRNAVCSIGAADASDELFGDLVPCPFQQPDENTQSILKMSQGQEMETRSSEHPKVADLEPLPDSELSCILEFDGACKGNPGKSGAGVIIRRLDGSVKGFKYIRCQGDSKLVCNQVQGAWRARSDNMSILCDIAKELKETFLTFQINHVLREFNSDADVQANFGCQLAVDEVQELSV

SEQ ID NO: 225196 - protein, 408 aa, Zea Mays
MLVLFETPAGFALFKVLDEGKLDKVEDLWKEFTTSDSARKVVELKAFNKFENTSDALSAATLIIDSKPSKGLRKFLQKHCEGETLAVADSKLGNAIKEKLKIDCLHNSAVMELMRGLRNQLTELITGLGAQDLGPMSLGLSHSLSRYKLKFSPEKVDTMIIQAIGLLDDLDKELNTYAMRVREWYGWHFPELTKIVTDNIQYAKVVKMMGNRTNAVNLDFSEILSDEELETQLKEAAVISMGTEVSDLDLSNIRELCDQVLALSEYRAQLYDYLKSRMNTIAPNLTALVGELVGARLIAHGGSLLNLAKQPGSTIQILGAEKALFRALKTKHSTPKYGLIYHASLIGKASQKHKGKISRSLAAKTALAIRYDALGDGEDNSIGTESRLKFLRVENLGNLLVPQRGSPR

SEQ ID NO: 225197 - protein, 201 aa, Zea Mays
MVNTFTTFLSFYECHSYFLCWSLGTDGILLGAETLRGLYPVDAAETVYNQPLQFKKVMWHVGDPMPHEESVASAAVGSAIKVKAAAIVVFTFSGRAARLVAKYRPTMPILAVIFPREGSDPSKWRSYGTTQARQCFAVRGVYPLMGSTDEAETGGLTKEEYGIKLAMSYGRSVGIVKPFDRLIIFEKIGDSSVVKIIECEG

SEQ ID NO: 225198 - protein, 473 aa, Zea Mays
MSVARFDFSWMDAAYHQETLDNLRKAAQNVKKLCPVMLDTLGPEIQVHNSTGEPIELKAGNHVIITPDICKALSAEILPIKFGDLAKAVKKGDTLFMGQYLFTGSETTSVWLEVVETSGENVNCLVKNAATLDGPIFTLHASQVHINLPTLSEYDKHVISTWGSCNSVDIISLSHTRSAEDVRELRAFLQAHALPDTQIYAKIENSEGLDHFDDILNAADGIIISRGDLGIDLPPENVFMFQKTAIHKCNLEGKPVIITRVVDSMIDNLRPTRAEATDVANAVLDGTDGILLGAETLRGLYPVDAVSTVGRICAEAETVYNQPLQFKKVMWHVGDPMPHEESVASAAVGSAIKVKAAAIVVFTFSGRAARLVAKYRPTMPILAVIFPREGSDPSKWRSYGTTQARQCFAVRGVYPLMGSTDEAETGGLTKEEYGIKLAMSYGRSVGIVKPFDRLIIFEKIGDSSVVKIIECEG

SEQ ID NO: 225199 - protein, 467 aa, Zea Mays
MQGASHMLLEEPFRLASVLSPAKPKVFPSLTKIVGTLGPNSHSVEIIQECLTAGMSVARFDFSWMDAAYHQETLDNLRKAAQNVKKLCPVMLDTLGPEIQVHNSTGEPIELKAGNHVIITPDICKALSAEILPIKFGDLAKAVKKGDTLFMGQYLFTGSETTSVWLEVVETSGENVNCLVKNAATLDGPIFTLHASQVHINLPTLSEYDKHVISTWGSCNSVDIISLSHTRSAEDVRELRAFLQAHALPDTQIYAKIENSEGLDHFDDILNAADGIIISRGDLGIDLPPENVFMFQKTAIHKCNLEGKPVIITRVVDSMIDNLRPTRAEATDVANAVLDGTDGILLGAETLRGLYPVDAVSTVGRICAEAETVYNQPLQFKKVMWHVGDPMPHEESVASAAVGSAIKVKAAAIVVFTFSGRAARLVAKYRPTMPILAVIFPREGSDPSKWRSYGTTQDQQTRMCNHY

SEQ ID NO: 225200 - protein, 190 aa, Zea Mays
MAMHERIVGTPFKFMHCWLILRHEMKWNALLDSMNPTDAKETEQKGTNIMEELLPPKIARPTGRDHDKNMKSNISSSSFTACINVLQKLSMEHGAFEERQDATSREEATHMVVRSDRKLALQEEVIIIQKASLEIQQQMLKLQEEEREERVMTMDVNKMEPWVREYYINKQKKIAASSMNVETSSAREPS

SEQ ID NO: 225201 - protein, 375 aa, Zea Mays
MSYRNMLWTHQSVNPEWEQGHVQVQPRSSYYAGTVSDSSNLGMQVAVGVPVNTVNVGICDLWNHERLPVHNSYPHASVTSRFVLPTSMYNPCMPAAAVNIYIPQTQSFGLGNVLPPSLHSQVSTGTIDENNSSFNFGDSAIGSMKRKTAVVAGNHHILHGFAGSSSSVHVPQNPVYGPWNASSQSNCLPSSAASNLPEYHNSNGWPFLEESSANASNSFTSVDACPELVPHGNNLYPACHIIQCNTWVPQTASHGVPQWGYGNVMVNPPGTVDMPNGNIQDYQAGHSSIHGPLPHFCQIPLRSMQVPQIQVPHQQFIGNNVVHGLNPSAAGLPLDPRMLAFPFNDEHTFGHQVHPPLINQANNGALRILPYQMLQ

SEQ ID NO: 225202 - protein, 93 aa, Zea Mays
MASRLVAAAASSSSLSSASPLARLISRRGLAGAADGHGSAKVPLWKDPLSPSKWKEEHFVLASLSMWGVIFYGGYKLFSGKKEAKTEAASPQA

SEQ ID NO: 225203 - protein, 69 aa, Zea Mays
MIHAERSNENLVEAFKNMHVQEEMVPDDNEEYVHEVIEDGGVEESQEDAVEVDAEDDGVEESQDEAVEC

SEQ ID NO: 225204 - protein, 99 aa, Zea Mays
MIHAERSNENLVEAFKNMHVQEEMVPDDNEEYVHEVIEDGGVEESQEDAVEVDAEDDGVEESQDEAVEVEAEDSTDGAVLVNGNNSEEQWGMKNEEPSA

SEQ ID NO: 225205 - protein, 241 aa, Zea Mays
MYMPYTAIQFTVLHKLKTFASGSSKTEDHLHLSPYLSYVSGALAGCAATIGSYPFDLLRTILASQGEPKIYPNMRSAFVDIIKTRGVQGLYSGLSPTLVEIIPYAGLQFGSYDTFKRSMMTWNRYKYSHLNFGSEDDSVSSFQLFLCGFAAGTFSKAACHPLDVVKKRFQIEGLKRHPRYGARIESSTYKGMYHALKEIVAKEGFGGLYKGLFPSLVKSAPAGAVTFVAYEYISDWEQGWS

SEQ ID NO: 225206 - protein, 302 aa, Zea Mays
MLRRTVPDRAADSSGSAGGGDARPRADGSGAALFAVPRLFVGFAAKRAPDAESSRSPTSPLDPKALLLRSPRRAWGAPGLVDALAADTAAANCLLSPRLRLVRQHSSPPKECGGGGGGHSQPELGKTMSCPAPDTAAAAAATAMSVPCSRFQFRRGDLKSGPEEATRSDTGAYLVSNGNAKRNSFDFGKLPGPGSLPVPASRRFVGSVSASEIEQSEDYTRVIARGPNPKTTHIFGDCILEPHTAGASDDEAAAVESEDGAAAGRYFVVKCAAEADGFLSSCFACNKKLDGNDIYIYRYAII

SEQ ID NO: 225207 - protein, 317 aa, Zea Mays
MQGGRGGRQGLFGFGDPFVGFGSFGQPGNIMSGFFGGANPFDDPFFTNPFGGMMQPSFSTPFSGMMQPSFMNPFGSMMQPSLLGSSMFASHGNLNGGTFGSQTHLNQGMSNASGFIQQASESSRPKGPIIKELSSDDEDKPEDDKEDGKKNGNFRKHPRESREPCVEDPDEEEEEDNKRPKHRQFGRELSRSGTSRLQPQTFMFQSSTVTYGGPNGACYTSSTTRKTGANGITLEESKEADTTTGKATHRISRGIGIKGHSLTRNLNSDGRVNTLQTLHNLNEDELGGFEESWQRNARQNMPGWDTRMNMLGNAVVS

SEQ ID NO: 225208 - protein, 528 aa, Zea Mays
MLVLFETPAGFALFKVLDEGKLDKVEDLWKEFTTSDSARKVVELKAFNKFENTSDALSAATLIIDSKPSKGLRKFLQKHCEGETLAVADSKLGNAIKEKLKIDCLHNSAVMELMRGLRNQLTELITGLGAQDLGPMSLGLSHSLSRYKLKFSPEKVDTMIIQAIGLLDDLDKELNTYAMRVREWYGWHFPELTKIVTDNIQYAKVVKMMGNRVNAVNLDFSEILSDEELETQLKEAAVISMGTEVSDLDLSNIRELCDQVLALSEYRAQLYDYLRSRMNTIAPNLTALALFRALKTKHSTPKYGLIYHASLIGKASQKHKGKISRSLAAKTALAIRYDALGDGEDNSIGTESRLKLETRLQVLEGRELGKSAGSTKGKPKIEVYEKDRKKGTGALTTPAKTYNPAADLVLTEETPKKSELASKKRKHNEVETEPLAEPAEEAIQEDGDQEDRKKKKKKNKESKEAPAGEGDGEKKKKKKSKEVEEEPVVAAASEVKKKKKKSDADGEDVAMQTEESGKKEKKKKKKAC

SEQ ID NO: 225209 - protein, 448 aa, Zea Mays
MESRRGGSGAAAEDAGGAMPSFGPTQHAIRAGADVNSMQPSRVTDFGALAQSAGFRIEDLANLNANALFNLKPNSHTIDNSPLQFGNYGKSISPHINTTEATTAATRIDPQLSAQQTGAQPILVALPTGNMENWGESAMAGSPMTDTSTDPDTDERNQMFEQGLVAVPTASDSSDKSRDKLDQKTLRRLAQNREAARKSRLRKKAYIQNLESSRLKLTQLEQELQRARQQGIFISTSGDQPQSTSGNGALAFDMEYARWLEEHNKHVNELRAAVNAHAGDNDLRCIVDSIMVHYDEIFKLKGVAAKADVFHVLSGMWKTPAERCFMWLGGFRSSELLKQSSQQAEDALSQGMEALQQSLAETLASGSLGPAGPSGNVANYMGQMAMAMGKLGTLENFLRQADNLRLQTLQQMQRILTTRQSARALLAISDYFSRLRALSSLWLARPRE

SEQ ID NO: 225210 - protein, 1192 aa, Zea Mays
MESSDDGGSGPAAGSPGPPSAPAAVGGASSAPGASGSGGKPPVKRVMKTPYQLEVLERTYAEDSYPNETKRAELSVQLNLTDRQLQMWFCHRRLKDRKPPAKRQLRDEEVSVPVIGPPPPVLPPPLPPSEMMVGTVGTYGEQLLPYSRRGSGRLSAAPRLSVPEIGRRYYEPPQVMLPHMAPVHLMQAEHRVIDSVEALIGEPLRDDGPVLGIEFDPLPPGAFGAPIVPEQPRQPFRSYETKMFSGPKTMKAVHEYQFLPEQPSDTYERASQSHFYDSSAEASNLRVAPLSTGSRFLHGVEQAPSYTFHSQSSGSSHLTQRGSGRSPIASALTDHEGALSNINASTTPIHGQLGIPQVAGFESPLASPERLGYHDEDTYHMDRKRKHNEEAKIAREVEAHEKRIRKELEKQDLLNRKREEQMRREMERHDRERRKEEERLMRERQREEEKFQREQRREHKRMEKFMQKQSIRAEKLRQREELRREKEAARQKAANERATARRIARESMELMEDERLELLELASRSKGLPSMVSLDSDTLQQLDSFRGMLGKFPPETVRLKVPFSIKPWAASEDIIGNLLMAWKFFVTFGDVLGLPSFTLDEFVQALHDYDSRLLGELHVSLLKSVIKDIEDVARTPSVALGVNQSSSANPGGGHPQIVEGAYAWGINILNWQRHLNFLTWPEILRQFGLCAGFGPQLKKSDAEIVHHRDDNEGRNGVDVISILRNGSAAVKAAALMKERGYTNRRRSRHRLTPGTVKFAAFHVLSLEGSKGLTILEVAEKIQKSGLRDLTTSKTPEASISAALSRDTKLFERTAPSTYCVKTPYRKDPDDSEAVLAAAREKIRAFQNALPECEEVEKDVDEAERDDDSECDDADDDADGDDVNIEDKDAKSPLVGAQYGAQITVVGDIKKESNIVMNTSVPPSIQIKSSASVPFHTLDSKASSSTDPEVGDDAKDIEIDESNQGESWVQGLAEGDYCDLSVDERLNALVALIAVANEGNSIRAILEERLEAASALKKQLWAEAQLDKRRIRDDFTSKMQYDSYNQLTTGDVYHQRNGASRESSTNAESLSVQQYASSEKTRSQLKSFIGHKAEQLYVYRSLPLGQDRRRNRYWQFSASSSSYDPGSGRIFFESRDGYWRVIDTSEAFEALVASLDTRGIRESHLHSILQSIEPTFKEAVERKRYFQDRGWAQ

SEQ ID NO: 225211 - protein, 106 aa, Zea Mays
MRSQRLLKRLDFEEMKFSLYFLGYEDVTLAPDDHIKRTEWTFRQKATLELTHNWGTENDPEFKGYHNGNSDPRGFGHIGVTVDDVHKACERFERLGVEFVKKPDDG

SEQ ID NO: 225212 - protein, 101 aa, Zea Mays
MSSVGRQDSMDSLDCSYYLSDGGLVEAPTLSSKQIEHARKQALTILETKSPEEVLKIFTEGSEAKADLAREKAHTPTTPPKGADAKATTTSGTVRTSPPTN

SEQ ID NO: 225213 - protein, 771 aa, Zea Mays
MAEGDAGKAEAGSCSAAAASGAGGCDAVKKRPEQSVAFHELFGFADPLDWLLMAAGSAGAVVHGAAMPVFFLLFGELVNGFGKNQHNLRRMTDEVSKYSLYFVYLGLVVCASSYLEIACWMYTGERQVGALRRRYLEAVLRQDVGFFDTDARTGDVVFSVSTDTLLVQDAIGEKVGNFIHYLATFLAGLVVGFVSAWRLALLSIAVIPGIAFAGGLYAYTLTGLTSKSRDSYANAGIIAEQAIAQVRTVYSYVGETKALNSYSEAIQNTLKLGYKAGMAKGLGIGCTYGIACMSWALVFWYAGVFIRNGQTDGGKAFTAIFSAIVGGLSLGQSFSNLGAFSKGKIAGYKLLEVIRQRPTIVQDTADGRCLDEVHGNIEFKEVAFSYPSRPDVMIFRDFSLFFPAGKTAAVVGGSGSGKSTVVALIERFYDPNQGQVLLDNVDIKTLQLKWLRDQIGLVNQEPALFATTILENILYGKPDATMAEVEAAATSANAHSFIALLPNGYNTHVGDRGLQLSGGQKQRIAIARAMLKNPKLLLLDEATSALDAGSESIVQEALDRLMVGRTTVVVAHRLSTIRCVDMIAVIQQGQHRRRRPHRDGFQRRQRPQVPGAEGLLLQAPETERAGVALHHTGRCRVRPVRVHRPHVRHRDEQHDRGVLLPEPQQDGEQDQGVRVHLHRHRAVRRRRLPRPALLLQHHGRKPHNQGAEDDARRDFEERCWVVRSGGEQLEPCRRSPLHRRRRCEVGHCRADIGDPAEHDVPARVLRGGLHH

SEQ ID NO: 225214 - protein, 1366 aa, Zea Mays
MLMDPPVMQMDCKLKNDVDKTSSIDYDRKVTISHDDYGWAGSDVKPKDDIVCNPVEVSNACQTGINEVLDSASKNSPLNLGDLPQGAELRNKNGDSSYSNVKLQLNSSAGNNNGLQTDDDNFTKQYFGKKDMHHRQEEMHPSSNTVSLPTSCRLNGDATPSEEEKIAEDRVKVDGNVDAVIKEVETDLVGCHAHQKEFQCTLQDLSEIACSIDLVHNTSSPQGENKKPVSPLNGMGHYVDNNSCNGDTNYKGEELNMGDAGDEDHAIALWVKWRGKWQTGIRCCRVDCPLPTLRAKPTHDRKSYVVVFFPRTKTYSWVDMLLVLPIEECPLPLVNGTHRKWRKLVKDLNIPRRFNMQNLAVFMINLIDELHIEELRQSLHGNKLKELRNASVQPELIPEWNRWKQELIKQYFSLHPAGNVGNFEKNNCYDDPALDQQGSRKRPKLEVRRGEIQISHMGEADYRTPTEDPNQNNLPGNSVMHENVGALGSTDQNNSVTLPGSFGTNENTISSSANAALQNARLDLDSFKSSRQCSAHIEAKGRQCGRWANDGDIYCCVHQSMHFLDHSSREDKALTIEAPLCSGMTNMGRKCKHRAQYGSTFCKKHRLQTNLDAMHPENLLDPSEVLHMGEEPPNKWVEEISKSQAMYSIDLETDKKVQDAVKVKLMTIVSIENSGEKGAMEKADMCVASTSITNTDDTSLCIGIHSHDSIVECQDYAMQHTLYCEKHLPRFLKRARNGKSRLVSKDIFVNLLKGCTSRKDKICLHQACEFLYWFLRNNLSHQHTSLASEHMPQILAEVSKNPDVGEFLLKLISTEREKLANIWGFDTNRSKQIYSENKEGSLVLHKEGTNLSSGPKCKICAHQFSDDEALGLHWTTVHKKEARWLFREGTNGLSLYDSHNIEDANGSQKFICRLCGLKFDLQPDLGRHHKVAHMDSDVVGHSSLGRGKYQLNRGRHYYSAFKKSLRPTSTLKKRSSSGIEKNFKFQSSALTSQIIQSETSSFGKLQDFQCSDVAQTLFSKIQKTRPHPSNLDILSVARTVCCKTSLAAALEVKYGSLPENIFVKAAKLCSDNGIQIDWHQEVFICPKGCKSRYNSNALLPMQLTAVDFPEAPSVDPLNDDEMWAMEEYHYVLDSKHFGWKPKNESVVLYEDISFGREKVPIVCVIDMDAKDSLGMKPEELLSHGSSVPWQGFHYITKRLMDSSLINSENSMPGCACSHPECSPEKCGHVSLFDGVYASLVDINGTPIHGRFAYDENSKIILQEGYPIYECNSSCTCDSSCRNKVLQKGLLVKLELFRTENKGWAIRAAEPIPQGTFVCEYIGEVVKADKTMKNAERSSFYTDGMHLIEFSSHTIQCVIKEWVQLLV

SEQ ID NO: 225215 - protein, 280 aa, Zea Mays
MAAALKMEPVRPGTAAGQAKLVGTAVCVGGSMLIPFYKGPVLRVWASPIHWRFAEHASPPAAAAAAGAHTGPAAVLGDVLVIASCVAWAVWFILHTKISQGFSAPYTSTAIMCLMAGVQCAGVSAALDRSLAVWKLGFDIRLYSVLYIGIVGSGAGFTLMSWCIQVRGPLYVSMFSPLLLVIVAVVGWAILGDKIRLGSAIGSVLIVAGLYMVLWGKGREMDRPGLDNDKGDEETAAALGLAVASSKGGAVVVSSRVDAVSSLPVFSTTTSPKRQQLIHG

SEQ ID NO: 225216 - protein, 407 aa, Zea Mays
MSRMGGKDCVPPVAMVLVQLGFAVMNIVSKLALDAGMSPYVLIAYRNLIAAAVISPIAYLLERRSGATITKKVLLQIFCSSIFGYASGCMHGCRATLNQVLFVVGLKSTSATVACALTNTLPALTFVMAAALKMEPVRPGTAAGQAKLVGTAVCVGGSMLIPFYKGPVLRVWASPIHWRFAEHASPPAAAAAAGAHTGPAAVLGDVLVIASCVAWAVWFILHTKISQGFSAPYTSTAIMCLMAGVQCAGVSAALDRSLAVWKLGFDIRLYSVLYIGIVGSGAGFTLMSWCIQVRGPLYVSMFSPLLLVIVAVVGWAILGDKIRLGSAIGSVLIVAGLYMVLWGKGREMDRPGLDNDKGDEETAAALGLAVASSKGGAVVVSSRVDAVSSLPVFSTTTSPKRQQLIHG

SEQ ID NO: 225217 - protein, 135 aa, Zea Mays
MRPWRGVVCDCRPVPSRPFPFFPSTPAKFTAALFGGNYCWIVGRRKEGRGAMGNASSMLTQYDIEEVQEHCSYLFSQQEIVSLYERFCQLDRSAKGFISEDEFLSIPEFSLNPLSKLYSRFMTSMAREKLPSRIC

SEQ ID NO: 225218 - protein, 108 aa, Zea Mays
MRPWRGVVCDCRPVPSRPFPFFPSTPAKFTAALFGGNYCWIVGRRKEGRGAMGNASSMLTHLAAGDRVAVRALLPVGPQRQGLHLRGRVPLHPRVLPQPALQEVAPYG

SEQ ID NO: 225219 - protein, 126 aa, Zea Mays
MAPRPAANHQATAEQGAKHLGRPSGAPSARAPRPPPAAPERPTGRRAEQSFNSVPDRVFLIQVAASKTKIYMVLELVNGGELLDRILYYVSDSPPVASLLLQRQLTSRRPVRESSRSRRQGGSSST

SEQ ID NO: 225220 - protein, 99 aa, Zea Mays
MSRFERKGYKLVAIKLIVPSKEFAEKHYHDLKERPFFSGLCDFLSSGPVLAMVWEGEGVIKYGRKLIGATDPQKSEPGTIRGDLAIVVGRIPLYSHATA

SEQ ID NO: 225221 - protein, 526 aa, Zea Mays
MYIYIYISIYLSTEMRPSSASSPRPVSTRSVHHHHILKGRDHHILKGREEMEQLPDDMLVEILSRLPPSSLAASRCVSKHLCSIVDARRLLRTGHLLPLRLDAFYCISLASVDRETYLFARPSVARRIPGACLDFRVDLEVVDHCNGLLLLCDMVFRLLNPATRQSAALPKAPDPSIENMLGVATVWAGTAPHRPPFYLFTDFNLVYDPMAESPEHFEVFLIPVLLCGHSGLMSDNITINLEEQEWPPSTYRTHVFSSRSWRWEERSWVRQGEPTGTMADMLRSEHGWNHKAVYFRGALYVHYSNESVMRISISKDRNTYQMMRLPAIRSKQIVKRATFYLGKSEKGVYCALFYWAQDDSDPQFRVWSLMEEEMNGRDGQIHMKWLIKTSISLKPLLAQLHHCGHDLTPDEWRIIYNRHDRDLVGSSAQDDIDDEWDFENAHEIVLEAPNNVNDWCLARQSTTRASHAIRWPAHPLLLPVPNNIPPPSCSGCSGLRRSTRARTDNEDHRYSVNKDHTVVDRPSLCD

SEQ ID NO: 225222 - protein, 158 aa, Zea Mays
MAPPLATRGLPLASRGPPSCAASCSSCLPSYLQLGRRPSRRFRCSSPQVDAAAVPPGKGGEYRPSFADDLLLAFFRSKMVKEVGWDSEKPGYAGLMEVANRLMVKGKSALETEQAAVRVLQSLFPPLLLVLYKALLAPIANGQLAAMMLGRQQFHVNG

SEQ ID NO: 225223 - protein, 182 aa, Zea Mays
MVVHPLRRRLLLAHLRPSRDTPLRPRVCHLHHLHLPRRRVHVVVAGRLAPRPRRVLHQEDAARAPHLLGFQADQRRDIARPELKSLQGGGDHPAPQDRRVRAGLHHVDGGAARRRRPRRPGPRLRLRAHQQPLPRRHLPHEPRRRHRPGPLRPGGHRNHPLGRHVGAKDHIGGGGGCRPRRL

SEQ ID NO: 225224 - protein, 314 aa, Zea Mays
MATMESLIGLVNRIQRACTVLGDHGGGGGEGSLWEALPSVAVVGGQSSGKSSVLESIVGRDFLPRGSGIVTRRPLVLQLHKTDGGHEYAEFLHAPRKRFTDFAAVRKEIADETDRITGKTKAISNVPIHLSIYSPHVVNLTLIDLPGLTKVAVEGQPESIVQDIENMVRAYVDKPNCIILAISPANQDIATSDAIKLARDVDPSEKAADKNTPVSDRYQDNHLRRIGSNVSSYINMVCETLRNTVPKAIVHCQVKEAKRNLLNRFYAHVGSKEKKQLSAMLDEDPALMEKRDALVKRLELYKSARNEIDSVAWK

SEQ ID NO: 225225 - protein, 107 aa, Zea Mays
MTYGLSQLSYLVSLNNVRRYKSHLSWPPIFASSWDESVSLRWGDLGLSVSHIFRPVPGCCTMLGPMNIEVKQRKVVAVGRKRTARPTENTCPEEAKEERKIGKPCVE

SEQ ID NO: 225226 - protein, 243 aa, Zea Mays
MTYGLSQLSYLVSLNNVRRYKSLAINFCESDLSWPPIFASSWDESVSLRWGDLGLSVSHIFRPVPGCCTMLGPMNIEVKQRKVVAVGRKRTARPTENTCPEELAESSEEVKTDTDRNVLVMFDILRRKKSAKLENLVLNRLSFAQTVENVFALSFLVKDGRVEITVDDSGHIVRPRNAPAASAIASGEVSYSHFVFRFDLKDWKLMKEVVTEGEELLPHRTSQSNLCNEENDQPNLEGNMEGS

SEQ ID NO: 225227 - protein, 424 aa, Zea Mays
MGSRVKEDERNEKIIRGLLKLPGNRRCINCNSLGPQYVCTSFSTFICTNCSGIHREFSHRVKSVSMAKFTSQEVSALQEGGNERAKEIYFKHWDLQGPVIDSSDVHRLRNFIKNVYVERRYSDQRIGEHLAQAKKPSSSRTDDPSPATFKDAKLYMSKNLIDFDSDLEPPQGVAQTDIQKGSSPQTDVGWATFDDATSKKTTTMPSTSSTNFLEGPMLQIADLTSAPQIRFSNAKSLSFAPSNRGNQLNQQNFSPVNTTQYSNTLLNRATSAPVHSQDIFAMSYRPVSSAWNWQPNPSVNMQYGQHRTHYPVGIVNTTQLAHPYPVNPVSLAGGPASAHASTRFPSLTSMQEALPNLGSTAVLSRAPVHQYMVQQHTVQVPNYTFPSGYEGTRGIAATASTYGLPPMDQRLAAQNLQVSIAPSP

SEQ ID NO: 225228 - protein, 330 aa, Zea Mays
MYSVVIAVVSSLPLIKLSNRNEVAELLLLVGKPSSSRTDDPSPATFKDAKLYMSKNLIDFDSDLEPPQGVAQTDIQKGSSPQTDVGWATFDDATSKKTTTMPSTSSTNFLEGPMLQIADLTSAPQIRFSNAKSLSFAPSNRGNQLNQQNFSPVNTTQYSNTLLNRATSAPVHSQDIFAMSYRPVSSAWNWQPNPSVNMQYGQHRTHYPVGIVNTTQLAHPYPVNPVSLAGGPASAHASTRFPSLTSMQEALPNLGSTAVLSRAPVHQYMVQQHTVQVPNYTFPSGYEGTRGIAATASTYGLPPMDQRLAAQNLQVMNHGSLPRVGGNPFA

SEQ ID NO: 225229 - protein, 138 aa, Zea Mays
MSYELPDGQVITIGAERFRCPEVLFQPSFIGMEAPGIHETTYNSIMKCDVDIRKDLYGNIVLSGGTTMFPGIADRMSKEITALAPSSMKIKVVAPPERKYSVWIGGSILASLSTFQQMWISKAEYDESGPAIVHRKCF

SEQ ID NO: 225230 - protein, 276 aa, Zea Mays
MDDGDGGLSFDFEGGLDSAPAAGGPVPSSTDPGAGGGDGPGMHGRGRGRGSYRQTVCRHWLRGLCMKGEACGFLHQFDKARMPVCRFFRDFGECREPDCAYKHSYDDVKECNMYKMGFCPNGPNCRYKHIKLPGPPPSVEEVLQKILQMRSFNRYSQNRNSNYNQQGERPQHPQGSALPNQNSAENATAAAPPAGGQQAQTLNQQPPQQQQKPNTNDQAQGVSNGHQATRIATPLPQGPSRRPKDPRCSRHLGKNQQEGRGQRGRRRRGVESGQRS

SEQ ID NO: 225231 - protein, 362 aa, Zea Mays
MVLNKFAPQLYEKLTENMKGHLEEMRTCIEAAQGGLFLEELQRKWNDHNKALTMIRDILMYMDRTYIPTNKKTPVFEHGLELWRDTIVRSPMIQGRLFDTLLELIHRERTGDVINRGLMRTTTKMLMDLGLSVYQDDFERPFLEVSASFYSGESQQFIECCTCGEYLKQAERRLHEESERVSQYLDAKTNEKITAVVVKEMLANHMQRLILMENSGLVNMLVEDRYEDLTRMYTLFNHVPDGLATIRSVMVSHIKDTGKSLVTDPERLKDPVDFVQRLLNMKDKYDNIINVSFSNDKSFLNALNSSFENFIKLKQTDHLSSYHCFVDDKLRKGVKEANEEDLETVLDKVMMLFRYLQEKRSI

SEQ ID NO: 225232 - protein, 76 aa, Zea Mays
MGGAMPPQPCCGGIRSLLQQANNTPDRRTICGCLKNVANGANGSGTYISRAAALPSKCGVALPYKISTNVNCNTIN

SEQ ID NO: 225233 - protein, 439 aa, Zea Mays
MVQLNGRSVSPGTKVPLTGGDEVIFSSCGKHTYIFLYPLNDKVPKTVLSSAVSLLEAPVASVKRIRTDKRTGDTSAVAGTEMMTSTSNQKDVAAVPPASAGENSQRVVRPLASSASDKLKGRAVSPEKEFANGENANEVNSNIEDSPMVVAAAPISPDAAANDTCQQNGFVSDSHLGAEIGKTATYKIRPVLRMITGSTISEFDLTGDDLFKALEDQRDHIIRELNASTNVPPSRCQAFKDGMKQGIINPSDIDVTFENFPYYLSENTKNVLLSSAFIHLKKKEFIKQFVEISSINQRILLSGPAGSEIYQETLVKALAKHFSARLLVVDSLLLPGAPSKDPEFQKDVGKADKSGDKAAAEKFAIYQKHRSSLADTVHFRRPAAPTSSVNADIVGTSTLHSASLPKQESSTATSKSYTFREGDRVRYVGPAQPCSLSQR

SEQ ID NO: 225234 - protein, 628 aa, Zea Mays
MVQLNGRSVSPGTKVPLTGGDEVIFSSCGKHTYIFLYPLNDKVPKTVLSSAVSLLEAPVASVKRIRTDKRTGDTSAVAGTEMMTSTSNQKDVAAVPPASAGENSQRVVRPLASSASDKLKGRAVSPEKEFANGENANEVNSNIEDSPMVVAAAPISPDAAANDTCQQNGFVSDSHLGAEIALEDQRDHIIRELNASTNVPPSRCQAFKDGMKQGIINPSDIDVTFENFPYYLSENTKNVLLSSAFIHLKKKEFIKQFVEISSINQRILLSGPAGSEIYQETLVKALAKHFSARLLVVDSLLLPGAPSKDPEFQKDVGKADKSGDKAAAEKFAIYQKHRSSLADTVHFRRPAAPTSSVNADIVGTSTLHSASLPKQESSTATSKSYTFREGDRVRYVGPAQPCSLSQRGPSYGYRGRVMLAFEDNGSSKIGVRFDKQIPDGNDLGGLCEEDHGFFCSAELLRPDFSAGEEVERLAMTELIEVISEENKSGPLIVLLKDVEKSFTGVTESLSSLRSKLESLPPGVLIIGSHTQMDSRKEKAHPGGFLFTKFASSSQTLFDLFPDSFGSRLHERSKESPKTMKHLNKLFPNKILIQLPQDEALLTDWKQQLDRDVETLKAKSNIGSIRMGL

SEQ ID NO: 225235 - protein, 562 aa, Zea Mays
MTELIEVISEENKSGPLIVLLKDVEKSFTGVTESLSSLRSKLESLPPGVLIIGSHTQMDSRKEKAHPGGFLFTKFASSSQTLFDLFPDSFGSRLHERSKESPKTMKHLNKLFPNKILIQLPQDEALLTDWKQQLDRDVETLKAKSNIGSIRMFLSRNGIECNDLEELFIKDQSLSNENVDKIVGYAVSYHLNQNKIETSKDAKLVLTTESLKHGLNMLQSMQNDNKSSKKSLKDVVTENEFEKRLLADVIPPNDIGVTFDDIGALENVKDTLKELVMLPLQRPELFCKGQLTKPCKGILLFGPPGTGKTMLAKAVATEAGANFINISMSSITSKWFGEGEKYVKAVFSLASKIAPSVIFIDEVDSMLGRRENPGEHEAMRKMKNEFMVNWDGLRTKDKERVLVLGATNRPFDLDEAVIRRFPRRLMVNLPDASNREKILKVILAKEELGSDVDMDSLANMTDGYSGSDLKNLCVTAAHYPIREILEKEKKEKNLAKTEGRPEPALYGSEDIRPLSIDDFKSAHEQVCASVSSDSANMNELLQWNDLYGEGGSRKKKALSYFM

SEQ ID NO: 225236 - protein, 122 aa, Zea Mays
MTIVVVLCYDTAPVQTFPEEAATAESPGKFEDATSENASNSELPTGSGASFADFVDNAKKKVMDVVHNITDFFRDLFNDSAEAQTGAGPSAEKGFSATEMAVGGSFMALTIAVILVVLFKRA

SEQ ID NO: 225237 - protein, 134 aa, Zea Mays
MFGFLKQRRQTPSGFSSSSAAEEVTAGIDGSGLVAIVTGASSGIGAETCRVLALRGVRVVMGVRTPSAGERVKEEIVKNVPAADSPHSQILRKAGQKKAEPNRHVSSMSSVKRFADNFNGLNLPLNILMKKMQK

SEQ ID NO: 225238 - protein, 212 aa, Zea Mays
MFGFLKQRRQTPSGFSSSSAAEEVTAGIDGSGLVAIVTGHFLLTNLLLEKMKITAMESGIEGRVVIVASDSYKHTYREGIRFDKLNDASGYKGILAYGQSKLANILRSNELSCRLKEEDAKVVVNSLHPGVVATNITRHLGIIKDILSPIAKLVLRGVEQGAATVCYLALHPQVAGVTGKYFVDFNAVELKPPATDKELSKKLWDFSVSLLQ

SEQ ID NO: 225239 - protein, 271 aa, Zea Mays
MFRVQSSPSLPNGTAFKQPPFAINNNAAASSTVGFYGTRDVVRPKTAQLTIFYAGSVNVFDNVSAEKAQELMLLASRGSLPSSAPVARKPEAPILAPAKVTAPEVLHATQMLFQKPQHVSPPSSAISKPIPGILQAASLPRSASSSNLDSPFPKSSVPFPVSPVSQAPRAQPATIAATTAAAIMPRAVPQARKASLARFLEKRKERVTTAAPYPSAKSPMESSDTFGSGSANDKSSCTDIALSSNHEESLCLGQPRNISFIQESPSTKLQI

SEQ ID NO: 225240 - protein, 56 aa, Zea Mays
MLEIKFYSFWKIITYLFVVAIFHCFIRCSKIVLTGHMLFWPMCYPFLCFIGRVFHA

SEQ ID NO: 225241 - protein, 117 aa, Zea Mays
MSKKRKHLDPANSLKDSEQVVASDFIRGDDLDDLLSKLIRSVEIAKASRGGLPEKIWMKQQFAIGVNDVTRVLERMPHSVTAHPAQMSNEAPTVSGRRQAPLVPLQLPDYVLRVILQ

SEQ ID NO: 225242 - protein, 172 aa, Zea Mays
MKANICSVKYNPGSSFYVAVGSADHHIHYFDLRNPSAPVHVFGGHKKAVSYVKFLSNNELASASTDSTLRLWDVKDNLPVRTFRGHKNEKNFVGLSVNNEYIACGSETNEVFVYHKAISKPAASHRFVSSNLDDADDDPGSYFISAVCWKSDSPTMLAANSQGTIKVHVLAP

SEQ ID NO: 225243 - protein, 146 aa, Zea Mays
MAACSRGLAWPPFDLTTARGAASWPRRRATIRCCCAGTDPEPRRRLSRAAAAAPERAEEWRVDGNKPSAAAPARRRASLTAMPPLPFPAPRIVLEDSSSNRTSTHGARRGARLLNPVIPHPRETLVLLVRRNGESTCWTKPSRSLE

SEQ ID NO: 225244 - protein, 319 aa, Zea Mays
MCLFGTCLIDTGIASEKEWGINLLDEAVKESGINEDGSTWYRESGEDTGENGYRCRWARMGGQNHDGSTEWKETWWEKSDWTGYKELGAEKSGKNAEGDSWWEKWKEVLYQDEWSNLARIEKSAEKQAKSGAENAGWYEKWWEKYDAKGWTEKGAHKYGRLNEQSWWERWGEHYDGRGFVLKWTDKWAETDLGTKWGDKWEEKFFAGIGSRQGETWHVSPGRERWSRTWGEEHFGNGKVHKYGKSTTGESWDLVVDEETYYEAEPHYGWADVVGDSTQLLSIQPVERPPGVFPAIDFSSAPPPKDAPPGMPPSPLDGGN

SEQ ID NO: 225245 - protein, 642 aa, Zea Mays
MTATRALTMLRENRRGFDVIISDVHMPDMDGFRLLELVGLEMDLPVIMMSADSRTDIVMNGIKHGACDYLIKPVRMEELKNIWQHVIRKKFNENKDHEHSGSLDDTDRNRPTNNDNEYASSANDGGDGSWKSQRKKREKEDDETDLENGDPSSTSKKPRVVWSVELHQQFVNAVNHLGIDKAVPKKILELMNVPGLTRENVASHLQKFRLYLKRIAQHHAGIPHPFVAPVSSANVAPLGGLEFQALAASGQIPPQALAALQDELLGRPTSSLALPGRDQSSLRVAAIKGNKHHEEREIAFGQPIYKCQNNAYGAFPQNSPAVGGLQPFAAWPNNKVGMTDSTSTLGNVGNSQNSNMLLHELQQQPDTLLLGTLHNIDAKPSGVVMPSQSLNTFPASEGISPNQNPLIIPSQPPSFVSSIPPSMKHESLLGLPSTSTSLLGGLDMVNQASTSQALISSHGTNLPGLMNRSSNAIPSPGISNFQSGNIHYVVNQNAMGVSSKPPGVLKTESTDSLSCSYGYIGGSTSVDSGLFSSQSKNPQYDLLQNQNDVNGSWSPSQDFDSFGNSLGQGHPGTTSSNFQSSALGKLPDQGRGRNHGFVGKGTCIPSRFAVDEVESPTNNLSHSIGNSGDIVNPDIFGFSGHM

SEQ ID NO: 225246 - protein, 606 aa, Zea Mays
MEKSRGKYAEVDKQRSSGSGGYIGGLHQRYESRLGGYSPRKKKTSLQAEQATTKTPSKVIQSPEKKSATWDQPPVKANQSNFPTTFLPTVGQMAPTPFSFSVIKDPSTTAVTMLAATEDKLIDCLNDFLLSTGSKLQRSKPCLSCTINREKRQAFVEFLTPEDATAAISFDGRSLNGSVLRIRRPKEYVETVNVTPKKAEETALISDVVADSPYKIFIAGIAGVISSKMLMEIVSAFGPLAAYRFLFNNELGGPCAFLEYADRSVTSKACAGLNGMMLGGRVLTAVHVFPNPHVEAANEASPFYGIPDNAKLLLKEPTKVLQLKNVFEREEYMLLSKSELEETLEDVRVECTRFGAVKSVNVVEYPAAGVSAAEENIVELKIECTEFSDTENIAKAVSEYSVPIIPSIDVLNHSVASDTKDVDLIPESQDQKDKHLPSNAALCESEAPVADEDAELDETQSRAALPTPQHAEADHTEAAVDENKHTGAGKVTATATDDDAVEKSHGDPRTSETCNPAGPTDKAEKPGRYSEQGAGDVTEDRPEKEAQAVGTSDTGFVFEPGSVLVEFLREEAACMAAHSLHGRRFGNRTVHAGYAPYDLYLQKYPR

SEQ ID NO: 225247 - protein, 145 aa, Zea Mays
MDFLVLMLLFVLRMSYLNLCAKHRMPCSSSRQTVTCGCHVDQNNRGLYRPQCRSLHPRASLQRFFHHLSQGRILRRSCRGRGRQLARRIWRCMRGSLRSSARRADTPRADTHPCTAAPQKCILFITSIVLLGSCIHRIVHLVAQL

SEQ ID NO: 225248 - protein, 228 aa, Zea Mays
MGESEKLVANLFQMARENAPSIIFIDEIDSLCGQRGEGNESEASRRIKTELLVQMQGVGHNDDKVLVLAATNTPYALDQAVRRRFDKRIYIPLPDTKARQHMFKVHLGDTPHSLTESDFESLARRTDGFSGSDVAVKDVLFEPVRKTQDAMFFFKADGDMWMPCGPKQPGSVQTTMQELASKGLAAKILPPPISRTDFEKVLSRQRPTVSKKDLEVHERFTKEFGEEG

SEQ ID NO: 225249 - protein, 232 aa, Zea Mays
MSTANHYQHIKSTKPVVGKARKLKDLMIKSDNRICADCGAPDPKWASTNIGVFLCLKCGDVHRALGPDISKVLSVTLDDWSDSDIDSMVEVGGNSYANSIYEAFLPKDHPKPKPDSTMEYRTKFIRAKYETQDFLKPSLRISSRSSFKSTNSVKSVDSNFSSTSRKDISEDTREFVGELNITVVKGTNLAVRDMLTSDPYVVLTLGGQLKKVILIRYGMKCLRFLFLEITDL

SEQ ID NO: 225250 - protein, 319 aa, Zea Mays
MGPTTRAHFVYNRRRRRRRGGRHAVEEASDEEQQQMDSSSSSSDEEGDQEEDAEASGEDVDDEEEEEAVAAEPAPKQPPAAAAAGEKRGRRKGSITISLKKVCKACKRTGHQAGFKGAVYIDCPMKPCFLCKMPGHTTLTCPHRVTMEHGVIPAPKRNANTSLDYVFQSQVKGKIPMVKPKFLIPNQLEHGNIKFHQRRVTCLEFHPTKNSVLLSGDKKGLLGIWDYVKLHEKITYDSVHSCILNSMKIDTTNDGMIYTASSDGTISCTDLDTGIGSPLLNLNPNGWNGPSSWHMIYGMDLNTDKGLLLVADNFGFLYL

SEQ ID NO: 225251 - protein, 283 aa, Zea Mays
MPVILREMEDHSVHPMSKSNHGSLSGNGYEMKHSGHKVCDWDSSSKSDRSHQEASAASESSPNEHTSTQSDNDEDHGKDNQDTMKPVLSLGKEGSAFLAPKLHYSPSFACIPYTVDAYYSGVGVLTGYAPHAIVHPQQNDTTNTPGMLPVEPAEEPIYVNAKQYHAILRRRQTRAKLEAQNKMVKNRKAAKEGEPFWDSPWGRGRPGWHIECSAMSAHYLGHVFDIHGGGKDLIFPHHENELAQSQAAYPESEVKCWMHNGFVNKDDKKMAKSDNNFSRLEIS

SEQ ID NO: 225252 - protein, 140 aa, Zea Mays
MLPVEPAEEPIYVNAKQYHAILRRRQTRAKLEAQNKMVKNRKAAKEGEPFWDSPWGRGRPGWHIECSAMSAHYLGHVFDIHGGGKDLIFPHHENELAQSQAAYPESEVKCWMHNGFVNKDDKKMAKSDNNFSRLEICEPF

SEQ ID NO: 225253 - protein, 204 aa, Zea Mays
MRARKAKTATSSSFWRSLLGGCLGGGGGGGRAAGDRQRKVRPGGGGGRLSFTDLSGAADQDLSASLVGSNLHVFSVAELREATRGFVSGNFLGEGGFGPVYRGFVADGAKKGLKAQAIAVKLWDPEGAQGHKEWLAEVIFLGQLRHPNLVKLVGYCCEDEHRLLVYEYMEHGSLENHLFKRLTKPRFDCTRCPNAGRMALLLYY

SEQ ID NO: 225254 - protein, 85 aa, Zea Mays
MSSQHGPDYDWRTSPIDPQVVYASGGKGHGRYTIFANVNDSIQVRVQCGGSSRSAARSSRRSNQDLVEVAQLQEELRRHQDYLRQ

SEQ ID NO: 225255 - protein, 451 aa, Zea Mays
MTLQQILARAVGDDAILNGSHVVDFIDDGSKVTAILEDGRKFEGDLLVGADGIWSKVRKTLFGHSDATYSGYTCYTGIADFVPPDIDTVGYRVFLGHKQYFVSSDVGAGKMQWYAFHNEEAGGTDPENEAVLRRDIYDRPPTMNWGKGRVTLLGDSVHAMQPNLGQGGCMAIEDGYQLAVELENAWQESVKTETPIDIVSSLRRYEKERRLRVAIIHGLARMAAIMATTYRPYLGVGLGPLSFLTKLRIPHPGRVGGRFFIKYGMPTMLSWVLGGNSSKLEGRLLSCRLSDKANDQLYQWFEDDDALEEAMGGEWYLIATSEGNCNSLQPIHLIRDEQRSLFVGSRSDPNDSASSLSLSSPQISERHATITCKNKAFYLTDLGSEHGTWITDNEGRRYRVPPNFPVRFHPSDVIEFGSDKKAMFRVKVLNTLPYESARSGNRQQQQVLQAA

SEQ ID NO: 225256 - protein, 660 aa, Zea Mays
MLSTTWASPKATPIPSSPASQTATRLHPASSSNRTLRLVALPSPSAPRRRRRPGLPPPARAGLVATAAMPAPEPKARVLVAGGGIGGLAFALAAKRKGFEVLVLERDMSAVRGEGRYRGPIQLQSNALAALEAVDAAAADEIMDSGCVTGDRVNGIVDGVSGSWYIKFDTFTPAAERGLPVTRVISRMTLQQILARAVGDDAILNGSHVVDFIDDGSKVTAILEDGRKFEGDLLVGADGIWSKVRKTLFGHSDATYSGYTCYTGIADFVPPDIDTVGYRVFLGHKQYFVSSDVGAGKMQWYAFHNEEAGGTDPENGKKKKLLEIFDGWCDNVIDLINATDEEAVLRRDIYDRPPTMNWGKGRVTLLGDSVHAMQPNLGQGGCMAIEDGYQLAVELENAWQESVKTETPIDIVSSLRRYEKERRLRVAIIHGLARMAAIMATTYRPYLGVGLGPLSFLTKLRIPHPGRVGGRFFIKYGMPTMLSWVLGGNSSKLEGRLLSCRLSDKLYQWFEDDDALEEAMGGEWYLIATSEGNCNSLQPIHLIRDEQRSLFVGSRSDPNDSASSLSLSSPQISERHATITCKNKAFYLTDLGSEHGTWITDNEGRRYRVPPNFPVRFHPSDVIEFGSDKKAMFRVKVLNTLPYESARSGNRQQQQVLQAA

SEQ ID NO: 225257 - protein, 95 aa, Zea Mays
MKRAAPSQEPLDVSSGDSSGSDSDQLGGKDKGGSASKAAAGAEDVKRVVLHKESQDVSSDDDLSSDSDDDAGKGNAWNAFGLPNSSKAASTAEAL

SEQ ID NO: 225258 - protein, 500 aa, Zea Mays
MELATVAAAVASAAARPHGPFSSPRAVSASVSWTSLSLAYTSRCLSSTSSRRRLRWLPVTSAAVELREATAGGGDSLRVTKTPQPGSSVPGFRPGKTIPENVLINYVGPQHVQDATIEAILKHTLPQALSSVEERALEDSVRILTQFDDMRNSFSLDNVFRYDVAVDVAPEVRWLSEDKYRNLKVVVEIDEAVDAEKAAEKELQRRHKALGLLRIVADRGLQIGDLVVLDIFAESINNDGSRGEKISSAESTGFHLDTEENSNLVPGFLGSLIGIRAGETRSFPIQFPESFERESLRGVRAQFTVVCKELFYRELPVMDDSLAVKLLPGCTTIDEVRERILKRCKEVEKTAIEQATDNAILDQLGKLVEVDVPRALFQEQGQQLYGAKLLQLQAERKLDKDQLASLSTKRSVQAYLEDEKENITRIIKQMLAVGDIFKSENLQYSTDQLVKEVENSIAEFKQYNQDYDEDNIRQQVQDVLEAAKVLEWLKENCSVEYIRR

SEQ ID NO: 225259 - protein, 856 aa, Zea Mays
MPMDTDERPLVELASAAAATTLAASSTSSAPFPAPATPGFSRAVRCNAPASSLPADGGAGAQPAYPENAISTTKYTPASFVPKSLFEQFRRAANCFFLVVACVSFSPLAPYRAVSVLLPLVVVVSAAMAKEAVEDWRRKQQDIEVNNRKVEVYDGIQSFHETEWKKLRVGDIIKVKKDEFFPADLIFLSSSSCDGLCYVETMNLDGETNLKRKQALEVTMGLNDDHFHSFKAFIRCEDPNEKLYSFLGTLYYNGQQYSLSPEQVLLRDSKLRNTMYIYGTIIFTGHDTKVMQNAMEPPSKRSSVERRMDKIIYLLFVILFVIATFGSIVFGMRTKHEISPGSYAWYLRPDQANIFFDPNNASFAAFCHFLTSLMLYVCLVPISLYISIEIVKVLQSTFINQDQNMYCAESDKPARARTSNLNEELGQVHTILSDKTGTLTCNSMEFLKCSIAGVAYGSRPTEVETCYGEIVETNGSFGRKDTTEFKRSVKGFNFTDSHLMNGRWAKECSRDAIEMFFRVLAVCHTAIPVADGNSAGMPYEAESPDEAALVTAAREFGFEFYHRTQTTISVHEYDPVVGGKVDRTYKLLNILEFSSARKRMSVIVRTEEGRLFLFCKGADSVIFERLSKDNGTAHLTKTKCHIDEYSEAGLRTLALAYCELTEEQYVVWNQDYSSAKNSVHTDHVAAVEKVSEDIEKDLVLLGATAVEDRLQNGVPECIYKLAQAGIKIWILTGDKLETAVNIGYACNLLRKEMEEIFITLENSSTSASEGSSGEGNKIATFEEIDRKLKDARGKISQKGTSTSFALIIDGNALTHALTGSLKNSFLDLAVNCASVLCCRVSPKQKALFAASIALDT

SEQ ID NO: 225260 - protein, 103 aa, Zea Mays
MGVRLVGRKFGFHGAVVLKTDRLLSMMPTTSIMGTAIMDTNSRVMKVMAMVLPVHKTQACKTTTDTLVVVTMSSSSQHRNSSCSSLHHHSTDDCLHTSGVLSD

SEQ ID NO: 225261 - protein, 161 aa, Zea Mays
MESIQEKFATVGKVVNITINDPESVKEFSTAKKPDFNLSFKVTALSDESNWRTGMKVRLLSKQSVMGPGKYKKPSKENQDAVSKMIDQNQHSKEDQLKTLEKISGADAVGITKDRDNLKPVFITETEHQDQKPNARGRKGWYKGQGQMQQNANKQVVVPSH

SEQ ID NO: 225262 - protein, 306 aa, Zea Mays
MTVYIELEEKSLVDQLEKLVQEERWEIEEGSQTNILSSSMQVFLVIRKSLKRCSALTKNQTLFNLFQVFQRILKAYAAKLYARLPKGGTGIVAAATGTDGQIRTSDRDERMICYIVNTAEYCHQTSGELAENVAKMINPQFADKVDMSEVQDEFSAVITKALMTLVHGLETKFDAEMVAMTRVPWATLESVGDQSEYVNGISSILSSSIPVLGTLLSPTYFQYFLDKLAASLGPRFYLNIYKCKHISETGAQQVHVKCQANFILFTTHSDISHCFAFCPQDAFGHPSSKDYSPRHPSSWKTEYRCS

SEQ ID NO: 225263 - protein, 435 aa, Zea Mays
MPNWRLVYLALQRWTEQARLPAAPGRPSFAVELEDTRSNAGFFCGELWCGLMEPKGELAQKPIEEAINSLEIDASTKASNVNLPAKKDASSSDAVSCISSGDAASTAKESEMNRETSFGDQGMYYYGYYYPGSYGGWDENGYFVGYNGVEVHPAVVQTDNGSYLCHLPGYENGYASYSQVVPGGIASVDGQYVSKEPYYSTALPIQDPRTPGIFAQPIAYRTELASAYSWDPSFVLLDGVQGHPVGVHQTNYAARPKYSFNKHVIPSSKATRSAKSAADTVKGSSSALETVTNAVNSSPPSKSANKTPGASITKGYLPYSKSVMHTNNQEKNSVYQSKGINVKESGRSWNSREKLGRSKLNGQGDSESNENNHTDNLKHSLSHRSDVVGLSSAGDANASIPSPVAISKNACNLSDFVTKLMQVVSSVAWLRWLVQ

SEQ ID NO: 225264 - protein, 155 aa, Zea Mays
MSPSAIFVFLLVSAVHMLECILDLKRRRGSISDDQLRLRVEITQLLKEASALSTPSTFAQAAKLKRLAGAKEKELAKRRRKERFFGALRLRLRLRMRWPWLASVYRRALRRLRTSYEQALRELIDGSMLVGALHAPIGVDCAHAASFGPMATVGF

SEQ ID NO: 225265 - protein, 258 aa, Zea Mays
MSCCGGAEEDSYGPPANQAVPPPNANAPGNRGGPRGPGAPRVGGPAKPISIDAPSIPLDELKKITNNFSERALIGEGSYGRVYNATLGDGRAAVIKKLDTSASQDSDTDFSAQIAMVSKLKNEYFLELLGYCLEDGNRMVAYQFATMGSLHNILHGKKGVQGAEPGPVLNWAQRVKIAYGAARGLEYLHEKVQPSIVHRDIRSSNVLIFDDFSSKIADFNLTNQGTDTAARLHSTRVLGTFGYHAPESTRRATSTVSV

SEQ ID NO: 225266 - protein, 322 aa, Zea Mays
MLLSNVLWKIPDRAISHDTSPLTIYATSSISNNVKTVLGSGTQYANGFAVADIERSSLILCGKAFADSAIVKDALTAMTAPILSARGGLPVPGWILNFGGSTVLLFAPVEIMMSCVEIHNALLSIDCGAVISSKGSTVLFPTKASREQKLLTKPTAVIIVSSDSSGAIPSVCKLSPGQAAYHFLAGYHDGKFVPAYNRAPSPADPLALASSLFSHLKEDDTPSYLINAKHSGKYIDGNGFMKLLKLALSHDLPDIKTEGSREIGLYYSVGSLRSRFPVTTKWSKAALHHSAVSPASLYRTLLPLHNYYSWGWGNQSAECSEL

SEQ ID NO: 225267 - protein, 292 aa, Zea Mays
MLLSNVLWKIPDRAISHDTSPLTIYATSSISNNVKTVLGSGTQYANGFAVADIERSSLILCGKAFADSAIVKDALTAMTAPILSARGGLPVPGWILNFGGSTVLLFAPVEIMMSCVEIHNALLSIDCGAVISSKGSTVLFPTKASREQKLLTKPTAVIIVSSDSSGAIPSVCKLSPGQAAYHFLAGYHDGKFVPAYNRAPSPADPLALASSLFSHLKEDDTPSYLINAKHSGKYIDGNGFMKLLKLALSHDLPDIKTEGSRVSPASLYRTLLPLHNYYSWGWGNQSAECSEL

SEQ ID NO: 225268 - protein, 148 aa, Zea Mays
MDGHLENYTSDYTLQVLMIGKPLVFTLWPDKLSFFQRQVAKRREKLLNYMLFLRVTPTLPNTFINLASPIVDVPYHIFLLGTLIGLIPASYVTVRAGIALGELTSLSDLYDTQSIALLFLIGVVSVTPALLGKDEAQEKPSEMAVGAS

SEQ ID NO: 225269 - protein, 166 aa, Zea Mays
MGRDERFPVWEAALGAGVAAAFAAGLVGVYLSMPDSDYSFLKLPRNLQELQILTGHLENYTSDYTLQVLLRGVALVVFAATAGASSCYFLSKMIGKPLVFTLWPDKLSFFQRQAGIALGELTSLSDLYDTQSIALLFLIGVVSVTPALLGKDEAQEKPSEMAVGAS

SEQ ID NO: 225270 - protein, 438 aa, Zea Mays
MGSRETSDAIASAHSTFYSWSKLTASERGKALRKWYDLIISHKEELALLMTLEQGKPMKEALGEVNYGASFIEYFAEEAKRIYGDIIPPTLSDRRLLVLKQPVGVVGAITPWNFPLAMITRKVGPALACGCTVVVKPSEFTPLTSLAAADLALQAGIPAGALNVVMGNAPEIGDALLQSTQVRKITFTGSTAVGKKLMAESANTVKKVSLELGGNAPCIVFDDADIDVAVKGSLAAKFRNSGQTCVCANRILVQEGIYEKFASAFIKAVQSLKVGNGLEESTSQGPLINEAAVQKVEKFINDATSKGANVMLGGKRHSLGMSFYEPTVVGNVSNDMLLFREEVFGPVAPLIPFKTEEEAVHMANDTNAGGTIWRSKAVWSWERRIEVRRRRILGAQVHLHGQLGLSHEIGLRLETHGRDDEPRDQEGRRLATRPEEHG

SEQ ID NO: 225271 - protein, 391 aa, Zea Mays
MTLEQGKPMKEALGEVNYGASFIEYFAEEAKRIYGDIIPPTLSDRRLLVLKQPVGVVGAITPWNFPLAMITRKVGPALACGCTVVVKPSEFTPLTSLAAADLALQAGIPAGALNVVMGNAPEIGDALLQSTQVRKITFTGSTAVGKKLMAESANTVKKVSLELGGNAPCIVFDDADIDVAVKGSLAAKFRNSGQTCVCANRILVQEGIYEKFASAFIKAVQSLKVGNGLEESTSQGPLINEAAVQKVEKFINDATSKGANVMLGGKRHSLGMSFYEPTVVGNVSNDMLLFREEVFGPVAPLIPFKTEEEAVHMANDTNAGLAAYIFTKSIPRSWRVSESLEYGLVGVNEGIISTEVAPFGGVKQSGLGREGSKYGVDEYLELKYICMGNLG

SEQ ID NO: 225272 - protein, 113 aa, Zea Mays
MVGYALQAAEILSKEGISAEVINLRSIRPLDRAAINASVRKTNRLVTVEEGFPQHGIGAEICMSVVEESFEYLDAPVERIAGADVPMPYAANLERMAVPQYSEDGARKHIFVA

SEQ ID NO: 225273 - protein, 344 aa, Zea Mays
MVRYYCFEGNLPRKWPRNLGRGDPQPRKHTLWQATSDFTGGQASVHRRHFLQCPSTLLSKNFEKLIQCDQRLYQLSQQPEITLDSALFEPRSSIFEDPVESKCAGFTNLKDEHEALPGYSGPVSPCAGSSISAKNENNDSIGMTAEYLSQTVGTGVGAVGVQAVGRNVNGAAPEFTIPHWWSQLKVPGLRPSMSVDDFVNHLGNCISEQITSGNPALANNEVPTKETLEGIAQYLLGDTQGPPVSASDERSLMARVDSLCCLIQKDTVPVTKPKPEPNDSDSIGVEASDGSDEEFSSAPTGKPTDATNLPAMSRKDSFGELLTNLPRIASLPQFLFKIPEGTEN

SEQ ID NO: 225274 - protein, 122 aa, Zea Mays
MASLAVSGARLGVVVRAGGSAGSGGERRSGVALPSVLFRRKDAFSRVVLGCDGAPGKELLMAGCGSDHLLSSTEPVVDALQRSEGLQPAAACALEQQGREWRRELTWQGRKGGCALDSALQV

SEQ ID NO: 225275 - protein, 746 aa, Zea Mays
MVLLKNEELIIKTGNLMGKSHPTVTRIEALRLCQVFLRSSRGCNWLMTAHGQPIVQGITNAMSEINEKTLVREGCRTALLALRYSGNHHRCFWFNAIDKILYKILCGSCNSSSHAHQTLCHGELFNIDSKDIMDIHPYVWDILGYLAVHCDNEHFSVGTCQNNFLQGLISCACSLATDLTLKKSPLKLSKEEQEPALRAVLMMLLSPSQFIFSEASSKFLEAVLPLDNEYMNMFMSSLESNVTRNLTASFDCVKIMTNLMNIACLLVVQSNYSLNKRSAVDVLSNIIKECLHDHLYITRSNFASHLQFCFDGSSCCYLSEEWEGENIVLFYGLVVLFNLLKSDNFICFHCKRKLDAGIVCHECRDHYNEGLVGVLKQALCQNMSPGPKSYIAHILSMFGLCGFPSKLGGNMRNVLCDSELVDLELLLADGESLSAHAAILSARCPKLLPSEKTFVRDGSVTYEWGRRSCYHVRMSDRVDSHALKKILEYAYTGLVTVDDATVKPVKTLAKYCHLRSLHLMLQKEQPRWHSCPIYDLTTALEPAKHSFSDIILEAQSNDKMECHHGSCQLSTPHIHSHKVILSVSCEYLRALFQSGMHESFAETIRVPVGWEALRKLVQWFYSGELPRVPPDCRWKATSTEEKLSILKSYAELSSLADFWFVDGMKEESLQVLTSCLNSSSTDASLAFIGFAANLGQWELVEAAISSVAHLYPRLRDSGRLEQLDEDVLNMLRTEHVRYLQHRSASK

SEQ ID NO: 225276 - protein, 141 aa, Zea Mays
MKRQVSSTKSKELSGHDIFADHEDPKPNRSRRSDYGSSAAQSPVKNANVSSFSFGEADIDSTVKTAKKKGSSNLSTDLNGKTMPKKDSASAEKQPPNRARPKGMSGSSNFADGKASTSTTGDHEGRRTRQPPGGDSSILLG

SEQ ID NO: 225277 - protein, 302 aa, Zea Mays
MTPSNGSCRSVWTIEFNYEFSLLILKERYSGSIVSQPGSFWEDNSGNIDRCLTLGFQALDCCQLGDEVRKQELKLDSPVQDAYATQTCSSARMKRGLFAYLVESGPVLLLELVALVVDVPNVSWKDIGGLENVKRELQETVQYPVEHPEKFEKFGMSPSKGVLFYGHPGCGKTLLAKAIANECEANFISVKGPELLTMWFGESEANVREIFDKARQSAPCVLFFDELDSIASQRGSNLGDARGVADRVLNQLLTKMDGMNAKKTVFIIGAINRPDIIDPALLRPGRLDQLIYIPLPDEQYRL

SEQ ID NO: 225278 - protein, 176 aa, Zea Mays
MQGTLTETEEGTHIYVCDINPNMLNVGKKRAAERGYSEEHCLSWIQGDAEALSFEDGSMDGYTIAFGIRNVTHIEKALSEAYRVLKQGGRFLCLELSHVDVPIFKEIYDVYSFSMVPAIGELVAGDRQSYQYLVESIRRFPNQEKFAQMIQEAGFQRVEYENLVGGVVAIHSGLKL

SEQ ID NO: 225279 - protein, 173 aa, Zea Mays
MSLVHATIGIDFLSKTMYLEDRTVRLQLWDTAGQERFRSLIPSYIRDSSVAVVVYDVSNRQSFLNTSKWIDEVRTERGGDVIIVLVGNKTDLVDKRQVSTEEGESKAKELNVMFIETSAKAGFNIKPLFRKIAAALPGMETLSAKQEDMVDVNLKSTSSQSNSQQQEGSGCAC

SEQ ID NO: 225280 - protein, 327 aa, Zea Mays
MATRYLIVSLPVQSPGATASSLWSRLQDSISRHSFDTPLYRFNVPDLRVGTLDSLLALSDDLVKSNVFVEGVSHKIRRQIEDLERAGGVETGTLTVDGVPVDTYLTRFVWDEGKYPTMSPLKEIVGSIQSQVAKIEDDMKVRASEYNNVRSQLSAINRKQSGRSSKKLYEDNEYALYTVTLFAKVVDNFKVRAREKGFQVRDFEYSPEAQESRKQEMEKLLQDQEAMRTTLLQWCYASYSEVFSSWMHFCAVRVFVESILRYGLPPSFLSAVLAPSTKSEKKVRSILEELCGNAHSIYWKSEDDVGVAGLGGETEAHPYVSFTINFV

SEQ ID NO: 225281 - protein, 391 aa, Zea Mays
MVSGSFSRSTSARLTSRGGVGSPRVSTPGAVHRNWWPPAPSGPSFDRVVLAFFLASVALVLSCALYLYVFRYLGRSRVVAEFAGENLESCDVFDGVWVPDQRHPLYNSSQCPFAERGFNCLANGRKDTEYLKWRWKPRGCDLPRFSARALLQWLRGKRVVFVGDSMSRTQWESFICMLMTGVDDPETVYEIPALRHGRRRVRAILKLDKLDGLSQEWVNSDVLIFNSGHWWTASKLFDMGCYFEAGGVLKLGTSINAAFKMALETWASWVKERIDLRRTHVFFRTYEPSHWSGLNQKVCEVTQQPTAEANGNDRREFGDILAGVVANMSVPVTVLNVTLMGAFRSDAHIGLWSHPNTILDCSHWCLPGVPDAWNELVFSHLLTNGWRVPAS

SEQ ID NO: 225282 - protein, 244 aa, Zea Mays
MEGQPLHLLIAQFHHPCLRGLIPNYPTHYLPTSRLRLRVQRRKPKQLAAVPSRRPSGSQADAPGLVPVPNTVAALVLQLTVCSLLFLFPNRARALALPPPPGAAAVVEATQEEEEEDQEWEAALQKWKTKTYALSVPLRVVALRGSFPPSWIKDFVEAQGKRLKFSPELRANLDGIFSEMSQCMDKGQVQPKSAMAADVVSLGDSWLGYAIRKGLLEPIKNAEEQDWFHSLSDRWKEPERRSRS

SEQ ID NO: 225283 - protein, 75 aa, Zea Mays
MMLLLDLLQYATIVLPRAREEGSLDVYSSCGMLQLPEWNNKTCTLLSVPYKEREKNNKQRPASQCCDSSSCNWHP

SEQ ID NO: 225284 - protein, 304 aa, Zea Mays
MARLLLSVSVPMSASSSRRIVVPGTARHRGRSGVCVAVPATSTATATQQEFDPAAAPPFGLGDIRAAIPKHCWVKDPWRSMGYVVRDVVLVLGLAAAAARLDSWLVWPLYWAAQGTMFWALFVLGHDCGHGSFSNNPRLNSVVGHILHSSILVPYNGWRISHRTHHQNHGHVDKDESWHPLPERLFKSLDSVVLMLRFRLPFPMLVYPFYLANRSPGKSGSHFHPASDLFQPSESKQVLTSTACWLAMVALLAGLAFLMGPLQMLKLYLVPYWVFVMWLDFVTYLHHHGHNDKLPWNGPIFGVA

SEQ ID NO: 225285 - protein, 297 aa, Zea Mays
MGYVVRDVVLVLGLAAAAARLDSWLVWPLYWAAQGTMFWALFVLGHDCGHGSFSNNPRLNSVVGHILHSSILVPYNGWRISHRTHHQNHGHVDKDESWHPLPERLFKSLDSVVLMLRFRLPFPMLVYPFYLANRSPGKSGSHFHPASDLFQPSESKQVLTSTACWLAMVALLAGLAFLMGPLQMLKLYLVPYWVFVMWLDFVTYLHHHGHNDKLPWYRGKEWTYLRGGLTTLDRDYGWINNIHHDIGTHVIHHLFPQIPHYHLIEARQPSRCWEITTESRKSLALSPCIYLVIWFRA

SEQ ID NO: 225286 - protein, 533 aa, Zea Mays
MGTTYKCCFIFKRRFHTRDAPPPEDVRALFSVHAGGGPHMGADDLRRYLVATGQEEAEVERLLEQIVQGRARVPRLARPLLSLDDFHRYLFSHDLNPPIRHPQLSSDCSDTPIIMALERGVRVIELDMWPNSTIDDINIVHGRTLTTPVSLIKCLRSIKKHAFVASPYPVIITLEDHLPSQLQEKVAKMVVEVFGNILYYPPDDTHELKELPSPEQLKGRVLLSTKPPKEYLETKLSDSTKEGDADLHLGKGTGDDAVWGKEVPDFRTEIQSAEKDDENDDVDDEEEQKLQPHIAPQYKHLITIRAGKPKDSLADALKSDPEKVRRLSLSEQQLAKAAKDHATEIVRFTQRNILRIYPKGTRVTSSNYNPFVGWVHGAQMVAFNMQGYGRALWLMHGFYKANGGCGYVKVYMGDGWRMDFKQTHFDQYSPPDFYTRVGIAGVPADSVMKKTNAIEDNWTPVWEKEFSFPLTVPELALLRVEVHEYDMSEKDDFGGQTVLPVSELRPGIRAVALFDRKGMKYNHVKLLMRFEFA

SEQ ID NO: 225287 - protein, 246 aa, Zea Mays
MNEKASVSKELNAKHKKILEGLLRHPENRECADCKSKGPRWASVNLGIFICMTCSGIHRSLGVHISKVRSATLDTWLPEQVAFIQSMGNEKANSYWEAELPPNYDRVGIENFIRAKYEDKRWVPRNGTSKSSSSVRDEKSQESPASANRSGHGHRSSFEQNRASPALPSKVAHAASRISSQRKSQRHLQTTIMAGMASSLHNQYLVQRKKILPNQQKARPSLHLEWKTYLKTHQLCHYPQLQLFPK

SEQ ID NO: 225288 - protein, 894 aa, Zea Mays
MSIDLNQLPLDGNEDGVPEAGGVFPFVSPHQILHSFDLNIPMDEQQENLHPDNELNVLEDYLNDYGVYADVDIVFDQDELSDSEDNEEEHEIQLGRLDLSHTQRQQIYEALLARSNNGKQRKNNTTIVANQFNVSLRTVQRIWNRAKGCCQRGEPVDVSSRKPKRCGNKKSGKNNCGEMILRTPPQRKRRAGSGAGDDADLGLVKSVGVASATGRSPVSDRRLALYDRPTALALADAPGEPFDDMVCTYHCRQMVKSEFMVALDTAEKQVQEYQTKLVALEDQLSKSEDERMQFLDKLNYVEQELAATKGRESALQERLLKELGEYQERYRGQVMKINELEVQLNKEIDSRISAESSVSSAKALIKDLEGDLHRLSESSEREKKTLKKELSYVKEDLSLSASKNNAELEKTILRAENYESEAKLLNEQLTNLKKQLDECLSEKNEMELKLLNSSALPNQHAPTEEQKLIKLLQEELRNYEKEVHEAKRLKSSHMNVELLKEKLLEEQGRRERAELELSKLQEIGARAHKLELELASCTALLSNIPDVSSYADIPQKIADLQKQALTYLNEVGEVTSRLKELEVALEYADLSKQQAEGEAALAKERAASATREVKRLELMLTAISEERDKLRKEHATESDQSGMEKTIRELESIIHELKELISHKDTELNIMNERLNLETRKVKSLEREGDQLRSQVALLESKLGHGDYSASSTKVLRMMNTLGVDNEAKQTIEVLQAELKKTKERLQAVEELKGQTDPGTVVDANIAEKLAQLKNQIATLEKREERYKAVFAERISVFRKACCSLFGYKIVMNDQQQSNGIPVTRFILQSVYAQSDDEKLEFDYESGSTNIVVNDYTSQQEIARQVDIYIRRTNSIPAFTANLTMESFNKRSIC

SEQ ID NO: 225289 - protein, 271 aa, Zea Mays
MISNHLLFKLASGEVFGQDQPIALKLLGSERSFQALEDWALLIGAKPRGPGMERAALLDINGQIFADQGKALNAVASRNAKVLVVGNPCNTNALICLKNAPNIPAKNFHALTRLDENRAKCQLALKAGVFYDKVSNVTIWGNHSTTQVPDFLNAKIDGRPVKEVIKDTKWLEEEFTLTVQKRGGVLIQKWGRSSAASTAVSIVDAIRSLVTPTPEGDWFSTGVYTTGNPYGIAEDIVFSMPCRSKGDGDYELASDVLMDDFLWERIKKLTL

SEQ ID NO: 225290 - protein, 204 aa, Zea Mays
MAPHPQEDKSDRHSSGAGASREQERRPSKAWGILIFGLIGVTTASFAITQVRKSMDWFYTQSTSSWTWRYTSNNSSRGSFSEEAKKRYYQRMQQEYEEEQERVQRIRHMQSVFNRERNKFGRGYESWRENGPPRGYNYIPRDDWYWQTDTSHSEHKNRRTYTPAGPRVYPMSHHYAVLGLDRSRATPYTDAEVKFITELIMRMM

SEQ ID NO: 225291 - protein, 538 aa, Zea Mays
MAEKAPPPPPKKALPSAGSSAGGGAGGGAAAAPPAPGQEPSSSPPRSPSPPEPFTYNFGAGSTGGGGGDGAAAAPPAPRQEPSSPLRSPSPPEPFTYNFGAGSTGGGGGDGAAAALPAPRQEPSSSPPRSPSPPKPFTYKQKAVWRWRWKRQRGRGAGRGRGGATGPKLSYLPSPLSRPFSGDEVDDEKPDEFEKENGWGSLFMSDPQVLSMHDPQNLPRYIGRQKCDPISTQEFFALRHDWLQLLDGKKTYLRGTADSNYADSNFVTPKPLTVAVLCQILNEHYVCFRPMRTDGSQFYRAFLFSYLENLGKMQGSQAEVTRLMECVARSKVNFCRLEWNKAYFSNPKAFFSSVVSEFEHLVNSVANGLNADELYKISVQENSSSRILCLLRLLTEVHIRTHEVDYNRELSQNRKEKIKALLHCKKSVRPFDADADLLEMKALSQALGIPLHLAAVDDNPLPDRTVQVKWIDFIPRPGPLGSIREYYLGPLGSIRQYYLPSATDKHPVLPAENFLLSGRMPLVTILRTVRATAILYRK

SEQ ID NO: 225292 - protein, 338 aa, Zea Mays
MAVGANKKASNVGHIKDGATVSKVEDVHVDRSVGVKKPRYSADEGPSLTELSGYNAKRHEFDPEYDNDAEQALAEMEFKETDSETDRELKLRVLRIYLSRLDERKRRKEFILERNLLFPNPLEKDLTSEDRELYHRYKVFMRFLSKEEHEALVRSVIEERKIRRRIQELQECRSAGCRTLAEAKIHIEQKRKKEYELNAQKAKDSSQLNANNKSVQKMNRPMKIESDGNLDPKKGGAGLDSPKTTGPTSVKQWDDWDIVGLPGAELLSASEKLLCCQNRLLPSHYLRMQEVLMQEIFKGSVLKKEDAHVLFKVDPTKVDSVYDMVSKKLGNHEEAPTV

SEQ ID NO: 225293 - protein, 228 aa, Zea Mays
MTSFLTCTMFFRSSWLPRFYLVRCGSKRICQIECSFINYAQLWMFRGIQFQCVLQYLGPPVLGLRSAPRTSTAAPPISSTASGARRCPGDRPSRKSSAEKRKVSRLFQSTSMHPKPVPQKKLCRIERNFNLNQREYRYKDCLKSSRNDIEWNFKLNKRKHLYKDCLKSSRNDIERNFKLNKRKHLYKDCLKSSSLLITTAQKNLNPIGNGDALGEAGGHSGREAEADF

SEQ ID NO: 225294 - protein, 181 aa, Zea Mays
MRMACNITCPLIEIGGYGDALLNLIYASPSSQFEELSLEYTKVALVTTIRGLGFLIWVMEVVSLLLRTTIKCISLYALLILEKVLAKFLVMYPNYASASDVGSLHDYEYPHMDKVCLHCDFGLFSYLQSYNSADSSAAFTLSEIIANLSNHALYDTADKGTMEHIKNCLQPEFGTWPCTRV

SEQ ID NO: 225295 - protein, 590 aa, Zea Mays
MHPRSSFKAFLEVVKWRSVPWEDVEMDAIHSLQLILRDSLQGEDANRNNIRSIVKAPSDDMKKLQGLLELRTVTNEMVRLIETATAPVLAVDIAGNINGWNKKAAELTGLPVMEAIGRPLIDLVVADSVEVVKQILDSALQGIEEQNLEIKLKTFHEQECCGPVILMINSCCSRDLSEKVIGVCFVAQDLTRQKMIMDKYTRIQGDYVAIIKNPSELIPPIFMINDLGSCLEWNKAMQKITGMKREDAINKLLIGEVFTLHDYGCRVKDHATLTKLSILMNAVISGQDPEKLLFGFFGTGGKYIESLLTVNKRTNAEGKITGALCFLHVASPELQHALEVQKMSEQAATNSFKELTYIRQELRNPLNGMQFTYNLLKPSELTEDQRQLVSSNVLCQDQLKKILHDTDLESIEQCYMETNTVEFNLEEALNTVLMQGIPLGKEKRISIERDWPVEVSHMYIYGDNIRLQQVLADYLACALQFTQPAEGHIVLQVIPKKENIGSGMQIAHLEFRIVHPAPGVPEALIQEMFQHNPGVSREGLGLYISQKLVKTMSGTLQYLREADTSSFIILIEFPVAQLSSKRSKPSPSKF

SEQ ID NO: 225296 - protein, 64 aa, Zea Mays
MPRTIPPRRPACEFESKWKIVSRKIARKRTELSMKSVLQHREAALSRVETFMDCSHLKIKWQSS

SEQ ID NO: 225297 - protein, 152 aa, Zea Mays
MREIPHESLSRGDSDDQFEPPYFVPCKSPLSESQKRMVEERVRAIRSEIPICVAVMKNNNVGVAQRWMLELGSRYGSVYLPTKGQTILLQCGGTTWKAKLMFHNGRRWFLNGGWPNFARGNGLRVGDICLFELKKKDSKLTMAVHIIRREKF

SEQ ID NO: 225298 - protein, 184 aa, Zea Mays
MAEDNDRKPLHIVHICSEMYPVASCGPLSAYVASLSCEIQKKANLVEVILPKYTSINLDGIHGLRRSEAEYESYFGGLWHKNKIWTGTSSGVGLVIIEPSQLSYFSRDMLRGYPDDFERFSYFSRASLDYIVKSGKRPDIIHIHNWETAIVAPLFWEIFAHQGLGNTRILLTCQDLNSEVNIHA

SEQ ID NO: 225299 - protein, 470 aa, Zea Mays
MYPVASCGPLSAYVASLSCEIQKKANLVEVILPKYTSINLDGIHGLRRSEAEYESYFGGLWHKNKIWTGTSSGVGLVIIEPSQLSYFSRDMLRGYPDDFERFSYFSRASLDYIVKSGKRPDIIHIHNWETAIVAPLFWEIFAHQGLGNTRILLTCQDLNSECLEEPNKLEMCGLDPRKLHRPDRLQDTNKTHLVNILKGGIVYSNKVVLMSSTHSKDALIQGSRHELQSTLAAHREKILVASYGLDGELWDPFKDIYLPRRYSANDIEGKSICRQALRRRLRFNGDSSIIVGCICDDNSDVHSLKEAVHVALHRNTQVIIMETLGSVVNSILQALKGEIKGDKIAFVEAYDEALAHLIYAGSDIILCSSFQDPSLQIAMKAMKYGSVPVQLNFSSDESRESKGHECRNTVMSQYIISTYGDLSLSQALDDFKNDPSHWDRQIKDGMARGSSWDAKCYSLHWEAYSSITKL

SEQ ID NO: 225300 - protein, 695 aa, Zea Mays
METPRLVVGAASRAPPPAPRSQRRRILRPCGGAHCSPSARAAPPVLLTRCSSYSSSREGNGDSHGKARRESSGSVRLDVEADSDQVPSLADEQREGDITELFNLAQRNILYINKQRLIAMEEMKKLHDENNLLLEEIQGLETEMQAQSSSFSELLLRIDTMVISGMISMTEASDLREKLVTNRSIIQSTFCDIHHKPNTELLSELQLFLRKPIEKPLHIVHICSEMYPVASCGPLSAYVASLSCEIQKKANLVEVILPKYTSINLDGIHGLRRSEAEYESYFGGLWHKNKIWTGTSSGVGLVIIEPSQLSYFSRDMLRGYPDDFERFSYFSRASLDYIVKSGKRPDIIHIHNWETAIVAPLFWEIFAHQGLGNTRILLTCQDLNSECLEEPNKLEMCGLDPRKLHRPDRLQDTNKTHLVNILKGGIVYSNKVVLMSSTHSKDALIQGSRHELQSTLAAHREKILVASYGLDGELWDPFKDIYLPRRYSANDIEGKSICRQALRRRLRFNGDSSIIVGCICDDNSDVHSLKEAVHVALHRNTQVIIMETLGSVVNSILQALKGEIKGDKIAFVEAYDEALAHLIYAGSDIILCSSFQDPSLQIAMKAMKYGSVPVQLNFSSDESRESKGHECRNTVMSQYIISTYGDLSLSQALDDFKNDPSHWDRQIKDGMARGSSWDAKCYSLHWEAYSSITKL

SEQ ID NO: 225301 - protein, 246 aa, Zea Mays
MAPQRRRERAVGEARPSSSAPTPAGPGWVEVQRRRVGGGWTSRRISIYASRVYFLLLMLQIPLFRVPCRAGTCTTPIQVTSSQLVSNEIFPPAVVKAMLYPGAIVSSLTKSKAFPSWSDLFDMYNLTEAKNASAVVDLQRLEILAGSYFCVAGGLLGIINPGRTTLFGTLLVIWGLVKEALFGKPVNSDPTESTYVYPTILIALICAFMSITYNVKKTAASSPVSLAKPLKSSAKSKLKLKRANED

SEQ ID NO: 225302 - protein, 56 aa, Zea Mays
MFVGFVKNVGTDVLMVVKFVGFFKNVGTHVLKLSSWALAKTVEFNVLGTWVPTFLY

SEQ ID NO: 225303 - protein, 103 aa, Zea Mays
MQDYQQLVWKSCKLYLPQAFQHHQQLVWKPCKFNLRQFYLPPTLSTSSTTALKTLQVLSTTAGSLLSKKGTKRRLQPTFSIPFPLFFFAHFCCISFGKQPPDI

SEQ ID NO: 225304 - protein, 772 aa, Zea Mays
MRYHQRFAGRRRRHRQGSKADLLDSHQLQQAFQQQLFDQIPTTTTVDDSSDNLIHGRSDTLVDEFESKSCSENPDGTSGDDGLEEDPNQRPNKKKRYHRHTQHQIQEMEAFFKECPHPDDKQRKELSRELGLEPLQNQHERHENAQLRAENDKLRAENMRYKEALGTASCPSCGGPAALGEMSFDEHHLRLENARLRDEIDRISGIAAKHVGKPMVSFPVLSSPLAAAAAAARSPLDLAGAYGVQSAAAGLGADHVLFGAGAGDLLRSVSAGQLDADKPMIVELAVAAMDELLRMARPDALLWGGGASAGAQQQQLDEEEYVRTFPAGLGPRQYGLRPEASRDSAVVIMTCDSLIEILMDANRFAAVFSSIVSRASTHEVLSTGVAGSYNGALQVMSMEFQVPSPLVPTRESYFVRYCKNNPDGTWAVVDVSLDSLRPSPVIKCRRRPSGCLIQEMPNGYSKVTWVEHVEVDDRSVHNLYRPLVNSGLAFGAKRWVGTLDRQCERLASAMASNIPNGDLGVITSIEGRKSMLKLAERMVASFCGGVTASAAHQWTTLSGSGAEDVRVMTRKSVDDPGRPPGIVLNAATSFWLPVPPKRVFDFLRDETSRSEWDILSNGGAVQEMAHIANGRDHGNCVSLLRVNSANSNQSNMLILQESCTDASGSYVVYAPVDVVAMNVVLNGGDPDYVALLPSGFAILPDGPPPAGAAPSHGEGLDTGGGGSLLTVAFQILVDSVPTAKLSLGSVATVNSLIACTVERIKAAVCAEAGNPQ

SEQ ID NO: 225305 - protein, 198 aa, Zea Mays
MSGYFNEVSTVAFQLGNRIKERGGRLIDVDALHEKLLQVIKLYLMHYALASVYENQVAETEAVPKGRVSSSESQDSFYQVAEHACRKDAEKADHSISRHPEFRYKTEFQSHEPEFDYLKSLEIEEKINQIKWCQAANGALYLLSTNDKTIKFWKVQEKKVKKLSEMNLDRSAAPANGSPGGVGYLSPSLSNGYKPRNK

SEQ ID NO: 225306 - protein, 91 aa, Zea Mays
MTKNSPLLHYSFHSMGEMVPASNSKRCFRYLFHGLLLCKCVGQYNFFGGKFVAMLKHKLVKSQTHPHGWMLTHYPEPRDSVVSTNILFHCA

SEQ ID NO: 225307 - protein, 397 aa, Zea Mays
MFSGISKCMKEGGTSPISTTGRAGCILLLYGQSKFHEEATRTVDFVVNQSDFTIQTLRNVTEYLSFAQTITVAALYLPSEVQGQIDSLKGDLNKAADTISVKTAENYKMIRKVLHIMSVVLICIAVVLLVLVFLGYGLEKYGPRYTVYIFVTLCWKAVAALFILLGIFLILNSAAQDTCEAMDQWAQHPQAETALSSILPCVDESTTNRTLYQSKEVVVRLVGIVNRAISALSNRRPHHKHPGQFMPYLCSPYDSNLNDRPCKYREATFENATTAWLNYTCMAQDTDLCSGNKTLTYDIYGQLVLAANVSYALYHYAPFLLNLQDCKFVRATFSAIASRYCPPLGHDLVLVSAGLALIASAFVLCLVWMLFADRPRREEVSDLASGSRIAPVDSSPS

SEQ ID NO: 225308 - protein, 84 aa, Zea Mays
MVIQYKKKHCIDERFCFFQGCCVYLHNAPLVNADYNVISDLALKRVKQDLTMHGGQVCSSIAPATHLVVVSVLQVYNFDNLYKR

SEQ ID NO: 225309 - protein, 612 aa, Zea Mays
MAAKVRFGLLVAMFQAMSGDKSSAKKRGRLRAFLDRAYVPCGGRDDYFSALRLVLPGLDRERGSYGLKEAALAAVLVDALGIAKDSTDAVRLTNWRRGGGGRNAGNFSLVAAEILQRRQGITSGGLTIKEVNDALDRLATTENRSEKALILSNLIKKTNALEMKWLLMIILKDLKLGISEKSIFEEFHPDAQDLFNVTCDLKFVCEKLNDRSQRHKRQDIEIGKAVRPQLALRVRDSSVAWKKLHGKQVVAECKFDGDRIQIHKNGEEIHFFSRSFLDHTEYAPGMSKIIKENILVDRCILDGEMLVWDTVLNRFAEFGSNQEIAKAAREGLETDRQLCYVVFDILYAGDTSVIHQSLTERHQILQKVVKQLKGHLEILIPRRGLNVPRPSDEPCWSIIAHNAEDVDKFFKETIENRDEGIVLKDLDSKWEPGDRNGKWLKLKPDYIHAGADLDVIIIGGYYGSGRQGGEVAQFLVGLAVPSDDNSYPKRFLSFCRVGTGLSDEERDALVTKLNPYFRKNEYPKKPPKFYEVTNNSKERPDVWIESPDKSVIISVTSDIRTIKSEVFAAPYCLRFPRIQRVRYDKPWHECLDVQASTNICSRSGSRGIKLSM

SEQ ID NO: 225310 - protein, 155 aa, Zea Mays
MTGHPLLPGSNSMADGTRVRSRMRPCCLPCTHPVGRGCAPRSEPQTRPAGVHAMGECWRWRGLKMLYYSDGCVAVPLAPIGWSCPSGTRTATGSALLGDLTLGRHHRRGISLTGGRPGWEVGRGGRRRMIGPVQVHVHARRVIVEARLTAWHFAY

SEQ ID NO: 225311 - protein, 380 aa, Zea Mays
MHVLGCRHRNDLTSLLSIKKYGTNELGKCSLFNGEWIPNPSGPAYTNASCRFIDDHQNCMMNGRPDKEYLHWKWKPYGCDLPPFDAVRFLDSVRNKGWGLIGDSILRNQVQSLLCLLSKAEEPVEVYHDNEFKNRRWHFQSYNFTVSIVWAPFLIKSGIFENEDGVSTSEIQLHLDILDANWTSQYESFDYIIISGGQWFLRTAVYWENGAVVGGHNSQNKNVAELGFEHLYQKTLQNVFNFIVSAKHKPVIFFRTWSPDHFEDGEWFSGGSCRRKLPYNKGEYREGNIERVMRQIELESFNKAVAALRGSADMDRLRLMDTYSLSSLRPDGHVGPYRTPYPFARGSSKSTPVQNDCLHWCVPGPIDAWNDLVMKMALDP

SEQ ID NO: 225312 - protein, 269 aa, Zea Mays
MDGMGAFHFIQTWTGVARGLDTAEACGPLPFHDRTLLRARSPPAPAFDHPVYSPALLNGVPRPFVTRVYAVSPKLLAGIKSRCAPGVSTYCAVTAHLWRCMCVARGLAPGSDTRLRVPANVRHRLRPPLPRSYFGNAIVRDLVTTRVEDVLERPLGFVAQAIKDAVDRVNDAYVRSVVDYLEVESEKGSQAARGQLMPESDLWVVSWLGMPMYDADFGWGTPRFVAPAQMFGSGTAYVTQRANRDDGLAVLFGLEPEYLQCFEKVFYGE

SEQ ID NO: 225313 - protein, 396 aa, Zea Mays
MDVDNICDIDNNVSNEDEIHGIGGGGDVNGNDSDHMEEEDHVLTPTGSEVNVRKNKSIDGDNRVVKRLLATKSTSTSTSKFMASAFKATRSNKSTDLVPQPQVSKVAQDASASASENASIAASVQISTEDDCDEELDVKKKKLTSWVWEHFTRWCDSSDPIICTMAYSMRDKFDKYWEMNNMALAVGAFLDPRYKHRMVELYMSKMYDSEMAELEKMTFMNVINELFAFYSSTINAKSTNKGTSSKDSVASKNVVLMDDDDENEVNLDELYAATNNVKKVSELDLYMSDGLVKANEGDAPFDALSWWKGQVTNFPILSSLARDVLSMQVSTVASESAFSSGGRVVDSFRSKLKPKIIEALVCTKDWKLASDKDLEGEIKTISEAMNAMEVDDEVAT

SEQ ID NO: 225314 - protein, 121 aa, Zea Mays
MQAAKYSPEQKERSTRISHPRAEGSTHSPTLASPLHCTAHTPSHSLPALASSQLPVPHRLRNLFIYRRRKPDRAASLSLSLPLPTLRAEFSSLACSHIVASLGRVLGEGGLRYLRGSDRRP

SEQ ID NO: 225315 - protein, 921 aa, Zea Mays
MAAASASLEDLKNENVDLESVPIQEVFAVLKSSPHGLTSTDGASRLQIFGPNKLEEKKGRPPDWQDFVGIVTLLFINSTISFIEENNAGNAAAALMASLAPQTKVLRDGKWSEQDAAILVPGDIISIKLGDIIPADARLLEGDPLKIDQSALTGESLPVNKMPGDSIYSGSTCKQGEIEAVVIATGVHTFFGKAAHLVDSTNNVGHFQKVLTAIGNFCICSIAVGMLVEIVVMYPVQHRQYRDGIDNLLVLLIGGIPIAMPTVLSVTMAIGSHRLSQQGAITKRMTAIEEMAGMDVLCSDKTGTLTLNKLTVDKNMIEPFVRDLDKDSVVLYAARASRTENQDAIDASIVGMLADPREARAGIQEVHFMPFNPVDKRTAITYIDSDGSWHRISKGAPEQIIDLCRLREDLSRRVHAIIAKFADRGLRSLAVARQRVPEGNKDAPGTPWQFLAVLPLFDPPRHDSAETIRRALNLGVNVKMITGDQLAIGKETGRRLGMGTNMYPSSSLLKDGDTGGLPVDELIEKADGFAGVFPEHKYEIVRRLQGRKHICGMTGDGVNDAPALKKADIGIAVADATDAARGASDIVLTEPGLSVIISAVLTSRAIFQRMKNYTIYAVSITIRVVLGFLLLALIWRFDFAPFMVLIIAVLNDGTIMTISKDRVKPSPVPDAWRLQEIFATGVVLGTYQALATVLFFWAVRDTAFFTNTFGVHHIGDSTEELMAAVYLQVSIISQALIFVTRARSWFFVERPGLLLVAAFLAAQLVATLIAVYAHWPFAQIKGIGWGWGAVIWLFTIVTFFPLDVLKFGIRYFLSGKQWSNVFDGKTAFANELDYGKSKREAQWVIAQRSLHGLQQPEASGLFNSADNSSNDFVELSEIAEQAKRRAEIARLRELHTLKGHVESVVKLKGLDIDTIQHNYTV

SEQ ID NO: 225316 - protein, 231 aa, Zea Mays
MKLDFGTHIDGYIVDCAFTVAFNPMFDPLLQATRDATNTGIKEAGIDARLGDVGAAIQEVMESYEVEINGKVFQVKSVRNLNGHSIGPYQIHAGKSVPIVKGGEQTKMEEGEFYAIETFGSTGKGFVREDLECSHYMKNFDVGHVPLRLAKAKQLLGTINHNFGTLAFCRRYLDRLGETKYLMALKNLCDNGIVQPYPPLCDVRGSYVSQFEHTILLRPTCKEVISRGDDY

SEQ ID NO: 225317 - protein, 291 aa, Zea Mays
MGERQYVTEQLDGLCLQHAVGYVTGGQFYGAKASLNVWPAQVASPAEFSLSQIWVISGAFGNDLNTIEAGWQVSPQLYGDNSPRTTRTRRRAATTSTARASCRPAAAWPSAPPSRPSPPTPAASSTSRFSSGRTRAGATGGCSSAPARSSATGPPRSSRTSARAPTWCSSGARSSTRAPPARRTRPRRWAPAASPPRDTRAPHTSETCSSSTGTTTSYRPPGSACSPTGRGAMTSPAAAAARGAPTSITVGPAGMHGARNFTSILARNGIECMGWVLYLYVCFVRAHSSTH

SEQ ID NO: 225318 - protein, 667 aa, Zea Mays
MGEETLVAMPPALPHHHAPTPPQPPSGPVAADKGEEGDHRRPAEGVAGPPQVQPRSVTPHGLGGEEGDVYYARKMLQGAVLRPPPHLPQPEAPPGLARARSTPAAPHEYAAQGDGEDEERESKRPVERSASANSASTAVVDVESIGRFFRDRRDVLSSAITRRISSLKESTSAAKAGAYGVQEIHLPNVKVTVRLKDAIAAADDTDTDTYDVGYTFSGGRIKGRVSFFSRSGCRDCAAVRAFFRQSGLPYVEVNLDVFPEREAELGSRAGAAARVPQIFLNEKLLGGLVVLNSLRNGGEFERRVRDLAGRRCPDSAPRVPVYGFDDDAGKADEEAEDAMVGIVRVLRHRLPIQDRFVRVKLVKNCFSGTDMVDGIVNHLDCSRKKAVEIGKELARKHFIHHVFRENDFEDGNQNLYRFLEHDPAVPKYYNFRGSTNDGEPRPAAAIGQRMTRIMLAILEAYASDDRRHLDYGRIAASEEFRRYANLVQELQRADMTQLPAEERLPFFLNLHNAMAIHAVVRVGQPGAVDRRPFFSDFQYVVGGHPYSLAAIRNGILRGNRRQPYTLAKPFGSSDRRLELAQRRANPLVHFALCDATRSSPTVRFYTAQGVEPELRHAAREFFLHGGVEIDLESRTVHLTRIIKWTGTSSGGSSTTSTRPKPGSCRIS

SEQ ID NO: 225319 - protein, 235 aa, Zea Mays
MEVQGLWHLLKLSSLISTQKKQYLAKRSWLHSLNILLAWLHLISLSVMKVMLLWLTTTATWLKFWLDEGIRCCYVISGLLLALTIFRALCRRYFGHKRTIRPNAKRLYPLFLNRGNMSWDAFSSKVHMVQKGFMGEPKELRPGRGEFHENPSTCICERTDGKAVARAKSQDDQVLNSVADQGKGIGEPAVPNHTDEEAGEPDDDEDVPADKEVVDAEMVDDVLAGDPELEQILSD

SEQ ID NO: 225320 - protein, 1778 aa, Zea Mays
MSAGRGDPNTPANRPLFLSAGVPNLGCHNVAAPAAAGNSGSIASQVLFSPCSTSVLNTIQEVPAPQSALLSPINRATEQGDVPCIQPSWNMPGGCTQVPINIIVFHRELTRRGSRPQLSPSATALPDVSEGASIRLAGSNFLSHGRTPSIVAGDMTTNSSQLATADKYNSEHRMNCLHDEASKTENGKGSTQLPQLATAIFRDSYNDLESVVPAATWETRVQHSQESTTCLAESTTDDNIHMYQSMQKRLKTQINKSEHTPLSAPTVPKEKTLTQIETQLASAEKTEMFRNEETPALKMKARKKKHRPKVIRENKPAKVQKPDSTPDGKSPNQKVKRSYVRKKRNLSSLENCSGPVSDQSISGATGVAARSRTSSVRRSLQFESKEQGLQGGHSSMANIHHHNYEKPGHAQSSFYSESEVQTGRVMQEGMENSPGELAFDMSRRLNKFLDEYIHLPDMLKPTQEVSAATSASFSTELAREEDNVGRTCKPDGKSKCSLFADERVVNPTIEGNKKDLELNYSDADGLVSSARSLPQMDPTRSQMGKVSEVENPTHHSNGSLPGTRDSVVLRAAAEMFAFFQAGAIKKKRSARLRRNSPFYTMDLKNNTLQASTRLPQPCMDALHRSSCIKFLTKKRSEKARPHCSSVIQPNDELKDRLSAGSTFYGATNGCKISEESSPNFSSQTLDNKRINVDTHCEVAEGRSTNTSTGPYMDYVQGVASKLKHLDLNTEQVQRTEMHLSLTTPAVISFEGTSGPSNALVPYGGVVMVPNERPLQLVKKQRPRAKVDLDFETTRVWNLLMGKSAESYGTDVEKERWWQQEREVFQSRANSFIARMRLVQGDRRFSPWKGSVVDSVVGVFLTQNVADHLSSSAYMALAASFPSRPVNNNCKDDGTTEDNKQTTRMSELVGEKSVFDLFYNGVRPDLEVGCEEVSMTCKKTHMEPTDNTRDSEFIEGETYSFDYKSTDESVCNHKGIGIEHKEQQLPDFSSAELTVSTELVQQIQIQKISSSQILTSETIQSRLSLSSEIPRNFVCGGSAAAYQQLGSNFDQGSSLTENDATASEIECHRLQMAAINDYGFGKPEIPSSSSMPFFLAVDPQQLKLRNETNVSSTSSNIPSDSASPNLKNGTDPLLMPFNSYMADWSSDKITYTTLNTPKISTELPVKLHHDKSSSFEAPNLKEHESVFATHEMTVEATRKEDEHTSKSSFTSYNGVPDTAAQASKPKKTRTTTAKNTENFDWEKLRRQACSEGQMKQRSFERRDSIDWEAVRCADVRRISHAIRERGMNNVLAERIQNFLNRLVRDHGSIDLEWLRYIPPDSAKDYLLSIRGLGLKSVECVRLLTLHHLAFPVDTNVGRICVRLGWVPIQPLPESLQLHLLELYPILETIQKYLWPRLCKLDQQTLYELHYQMITFGKVFCTKRQPNCNACPMRSECKHFASAFASARLALPAPQEESLVKLSNPFAFQNSSMHAMNSTHLPRLEGSIHSREFLPKNSEPIIEEPASPREERPPETMENDIEDFYEDGEIPTIKLNMEAFAQNLENCIKESNNELQSDDIAKALVAISTEAASIPVPKLKNVLRLRTEHYVYELPDAHPLLQQLGLDQREHDDPTPYLLAIWTPDGIKEITKTPKPCCDPQMGGDLCNNEMCHNCTAEKENQSRYVRGTILVPCRTAMRGSFPLNGTYFQVNEVFADHRSSHNPIHVEREMLWNLQRRMVFFGTSVPTIFKEEIQQCFWRGFVCVRGFDMETRAPRPLCPHLHIIARPKARKTAATEQVL

SEQ ID NO: 225321 - protein, 1450 aa, Zea Mays
MSAGRGDPNTPANRPLFLSAGVPNLGCHNVAAPAAAGNSGSIASQVLFSPCSTSVLNTIQEVPAPQSALLSPINRATEQGDVPCIQPSWNMPGGCTQVPINIIVFHRELTRRGSRPQLSPSATALPDVSEGASIRLAGSNFLSHGRTPSIVAGDMTTNSSQLATADKYNSEHRMNCLHDEASKTENGKGSTQLPQLATAIFRDSYNDLESVVPAATWETRVQHSQESTTCLAESTTDDNIHMYQSMQKRLKTQINKSEHTPLSAPTVPKEKTLTQIETQLASAEKTEMFRNEETPALKMKARKKKHRPKVIRENKPAKVQKPDSTPDGKSPNQKVKRSYVRKKRNLSSLENCSGPVSDQSISGATGVAARSRTSSVRRSLQFESKEQGLQGGHSSMANIHHHNYEKPGHAQSSFYSESEVQTGRVMQEGMENSPGELAFDMSRRLNKFLDEYIHLPDMLKPTQEVSAATSASFSTELAREEDNVGRTCKPDGKSKCSLFADERVVNPTIEGNKKDLELNYSDADGLVSSARSLPQMDPTRSQMGKVSEVENPTHHSNGSLPGTRDSVVLRAAAEMFAFFQAGAIKKKRSARLRRNSPFYTMDLKNNTLQASTRLPQPCMDALHRSSCIKFLTKKRSEKARPHCSSVIQPNDELKDRLSAGSTFYGATNGCKISEESSPNFSSQTLDNKRINVDTHCEVAEGRSTNTSTGPYMDYVQGVASKLKHLDLNTEQVQRTEMHLSLTTPAVISFEGTSGPSNALVPYGGVVMVPNERPLQLVKKQRPRAKVDLDFETTRVWNLLMGKSAESYGTDVEKERWWQQEREVFQSRANSFIARMRLVQGDRRFSPWKGSVVDSVVGVFLTQNVADHLSSSAYMALAASFPSRPVNNNCKDDGTTEDNKQTTRMSELVGEKSVFDLFYNGVRPDLEVGCEEVSMTCKKTHMEPTDNTRDSEFIEGETYSFDYKSTDESVCNHKGIGIEHKEQQLPDFSSAELTVSTELVQQIQIQKISSSQILTSETIQSRLSLSSEIPRNFVCGGSAAAYQQLGSNFDQGSSLTENDATASEIECHRLQMAAINDYGFGKPEIPSSSSMPFFLAVDPQQLKLRNETNVSSTSSNIPSDSASPNLKNGTDPLLMPFNSYMADWSSDKITYTTLNTPKISTELPVKLHHDKSSSFEAPNLKEHESVFATHEMTVEATRKEDEHTSKSSFTSYNGVPDTAAQASKPKKTRTTTAKNTENFDWEKLRRQACSEGQMKQRSFERRDSIDWEAVRCADVRRISHAIRERGMNNVLAERIQNFLNRLVRDHGSIDLEWLRYIPPDSAKDYLLSIRGLGLKSVECVRLLTLHHLAFPVDTNVGRICVRLGWVPIQPLPESLQLHLLELYPILETIQKYLWPRLCKLDQQTLYELHYQMITFGKVFCTKRQPNCNACPMRSECKHFASAFARIAACML

SEQ ID NO: 225322 - protein, 62 aa, Zea Mays
MYKLQRSIFIAEAKCSDDFVFSIVFSVIGLACTYIEMIYGIASAIFVIFMTSFLIDVCDMND

SEQ ID NO: 225323 - protein, 51 aa, Zea Mays
MLASRGSQSAVSALRMLCFSKEEVDALVEHMNGDMRVRFVGVPVALNKKWN

SEQ ID NO: 225324 - protein, 83 aa, Zea Mays
MHKKSEPIGQDAPTNRFSSMLASRGSQSAVSALRMLCFSKEEVDALVEHMNGDMRVRFVGVPVALNKACMFIDCMRHIKVIRK

SEQ ID NO: 225325 - protein, 441 aa, Zea Mays
MAKKLGKKARKFARKNLQSAAKRNRKIRNQFKHRRGPRGGGSAGREDGDEHVLQRVLDPTMVTDDAAATLIHGLEFPEDDAELDADLSDSDGYLSEDPGCPYYSDSEDEKAAKDCIMEEGLDRQNDDMNRDIKKQKKKLKKLLDKDPEFANFLEKWQSELESSRSKGDSDEEGMDSMDDDDDSNDGNLPNAKVLTRKTISEWCQLVSKEPKAPALRNLLNAFRDACRYGVHSDGPLMQRFQSARVFYQIIMFVLSESDNIFRALLEIQDDVNKGKIMNLRNSKKWLTVDSLIKSYLSSSLDLLSQLTDNKILAFVLTRLRVSVVLFSAYPSTSSRLVKILFRLWASGDRSLSLSAFLMIREVASLLPDCLDHCLTKSYNTYLASTNLVNDRNTKHIYFLMDCLVELYSLDVQKSYERAIISVEQLNAILRQASKTKEKCHR

SEQ ID NO: 225326 - protein, 180 aa, Zea Mays
MASRPKLSGIQKQVLALYRGFLRTARLKAPEERRRIESVILAEFRDNARSVDRLYWGCDLYIVKDHLDVVNAILDTDDSCIRIVRKNGKTSLHTAARIGYHRIVKALIERDPGIVPIKDRKGQTALHMAVKGKNTDVVEELLMADVSILNVRDKKGNTALHIATRKWRPQVWFFSGVFYK

SEQ ID NO: 225327 - protein, 180 aa, Zea Mays; identical to SEQ ID NO: 225326

SEQ ID NO: 225328 - protein, 130 aa, Zea Mays
MLAHWGIMFQDITTLLLDPKAFRDTIDLFVERYKDQGITVVAGEVISEEYSLEYGTDKIEMHVGAVQANDRALVVDDLIATGGTLCAAVKLIERVGAKVVECACVIELPELKGRDKLGDRPVFVLVEADA

SEQ ID NO: 225329 - protein, 448 aa, Zea Mays
MAEADCSAARTRTAGLAAAAAAAAFLVLVVVAGSAVLPGARVRVLDGLRGRADDGDAGGPSRAVTGAVEDPEAVANDVHVSIRNSTARRNLGYLSCGTGNPIDDCWRCDSDWHSNRQRLADCGIGFGRNAIGGRDGKVYVVTDPSDDDPVNPREGTLRHAVIQEEPLWIIFKRDMVITLREELIMNSFKTIDGRGANVHIANGACVTIQYVTNVIIHGLHIHDCRPTGNAMVRSSPSHYGWRTMADGDGVSIFGSSHVWVDHCSLSNCADGLIDAIMGSTAITLSNNYFTHHNEVMLLGHSDSYVKDKAMQVTIAFNHFGEGLIQRMPRCRHGYFHVVNNDYTHWEMYAIGGSAEPTINSQGNRYLAPTNPFAKEVTKRVETAQTVWKSWNWRSEGDLLLNGAYFTPSGAGASASYSRASSLGAKSSSMVGTITSDAGALSCRKGAAC

SEQ ID NO: 225330 - protein, 315 aa, Zea Mays
MKHQPPRRWGVVAAVVALVLLACLQIQYHHLKVDLGKAGFASATQENNAIRSRNRIRWGPDRNGAHSLPRGIVHRHSDMSLRPLWEDDTASTHKNKNSDYSALLAMAVGISQIKNIDTMARKFLKENYAVMLFHYDGNVDGWRHLEWSDKAIHILAHNQTKWWFAKRFLHPDVMAIYDFIFLWDEDLGVENFNPRRYLDIMVSEGLEITQPALDPDLSTDIHHRITIRNKMAKVHRRIYDNRPSMNCSDESKGPPCTGWVEGMAPVFSRTAWKCVWHLIQNDLIHGWGLDMKLGYCAQLPCPLLNTVEHGHAISG

SEQ ID NO: 225331 - protein, 109 aa, Zea Mays
MCGTLDYLPPEMVEKTEHDYHVDIWSLGILCYEFLYGVPPFEAKEHSETYRRIVKVDLKFPLKPFVSPAAKDLISQMLVKNSAQRLPLHKVLEHPWIVQNADPSGVCRG

SEQ ID NO: 225332 - protein, 538 aa, Zea Mays
MIQETPVKRLCKTHNIITVNGQYPGPTLEVREGDTLVINVVNRAQYNATIHWHGIRQIRTGWADGPEFVTQCPIRPGGSYKYRFTIQGQEGTLWWHAHSSWLRATVYGALIIRPRENKTYPFAKPSREVPVILGEWWDANPIDVIREAQRTGGGPNVSDAFTINGQPGDLYKCSNKETTAIPVKAGETALLRFINAALNHELFVTIAQHKMTVVATDASYTKPFTTSVLMLAPGQTTDVLVTMDQPPTRYYVAARAYVSGQNVAFDNTTTTAVLEYDCGCASDFGPKIQPAFPAALPAFNDTSAATAFAAGIRSPDRVKVHENVDEYLFFTVGLGLFNCKPGQLCAGPNNNTRFAASMNNVSFVFPQTDSLLHAHYYKIPGVFTTDFPAYPPVQFDYTGQNVSQALWQPVPATKLYPLRFGSVVQLVLQDTSIVTPENHPIHIHGYDFFILAEGFGNFDPKKDVEKFNYVDPPQRNTVAVPVNGWAVIQFVADNPGVWLMHCHLDVHITWGLAMAFLVEDGYGELQSLEPPPVDLPMC

SEQ ID NO: 225333 - protein, 442 aa, Zea Mays
MMALHEALRNVCLSSDWTYSVFWTIRPRPRCRGGNGCKVGDDNGSLMLMWEDGFCRPRVAECLEDMDGEDPVRKAFIKMSIQLYNYGEGLMGKVASDKCHKWVFKEPSECEPNISNYWQSSFDALPPEWTDQFASGIQTIAVIQAGHGLLQLGSCKIIPEDLHFVLRMRHMFESLGYQSGFFLSQLFSSSRGASPTPTPPFPLKQPPAAPAARAPPQLFSWPGHHQPQQLPSPAGASPLFPPGPGAFHPSSARPMPPFPGGKDEGHMFHLPPAAHHGTNKQPPQHMDEHHHHQQQPMVGAGGDAPDGDLRWPNGLSFFTALTGRADDAKLLFGGPGAGAGAADDDDKAAPDAHGGAENVEEYLSLESHSNKARKVESPAAQSTNKFKRSFTLPARMSSSSSTSAFPSVSASTAPPQQQQAGMEYRGPHEGGVYSDLMETFLE

SEQ ID NO: 225334 - protein, 69 aa, Zea Mays
MSLLAATSACTLQCAVIVRVRRLAAGVRSPPLNKLGCADSDVMDGEMMMMMIIERSPAVWATCMWPSSD

SEQ ID NO: 225335 - protein, 361 aa, Zea Mays
MMKSTLIKDLYGEIDRLKAEVYAAREKVGVYIPKDRYQQEENERKAMADQIEQMNASLEVNHKLISDLQQNYDSELQHSADLSKKLEVTEKCLDHTSNLLSTTKEDLKQAQYNLNEKDYIISEQKKAENALTHQTYVLRSDLEQYTRDNTSLYSKIARGDKLSATNRSVVNTFQTDLASKLDILSNTLNASIDQQNMHLKSVEDLCQSYVDSHDKATSELKKKILASKSLYMSHMEAFLNVVLVHKASANGTLEDISSLSAASCCSLDQLLVCVEGEAQNIFNDIHNLLTIHRSEMTHFTQELRESFQISLDRTKEMSTYIIGLFDKYVEETSKLHSHSNNTHEAQMKSIEDFQMVYEVSH

SEQ ID NO: 225336 - protein, 111 aa, Zea Mays
MYYKEMHGRHVEEDLRQRGEETLLETVLCLVAPAKYFSQVIEGALRDSADHHGKEALTRVAVTRSDHDMDDIRAAYHQQFGAKLEDVIAAKAHGHYRDALLSLVGAGNSSV

SEQ ID NO: 225337 - protein, 500 aa, Zea Mays
MEVLCIGTADTKFEELLFLAAQLRSALAASGSDSKVQVSIVDVSTTEKTTANDFKDIIFIPRNTILSCHLGVDQHNLPDNRGEAIALMSKALQSFLKKRYDSGMLVGAVGLGGSGGTALIAPALRLLPLGVPKLIVSTVASGHTTPYVETSDLVLFPSVVDICGINSVSRVILSNAAAAFAGMVHGILSASNESDETSTKPTVGITMFGVTTPCVNAVKDRLNKEGYETLIFHATGVGGKAMEDLVRGGFIQGVLDVTTTEVADHIVGGIMACDETRFDAIIENKIPLVLSVGALDMVNFGARDTIPLAFADRNIHVHNEQVSLMRTTVEENKKFARFIADKINKSSSKVTVCLPQKGISAIDAPGMPFYDPEATSTLLGELNTLIQRTDIREVKLFPYHINDPEFANALVDAFLSMDVQASSSAQPKQDLNIGKSCSGQKISDSSIIWRTPVDFPDAKPGELPLIVLRRKVTRPRGSKEGPIQKTPYGRQKHAYRKESI

SEQ ID NO: 225338 - protein, 841 aa, Zea Mays
MKSLRLVLSGRVHLTESPLNRHSYRLQSYVQPSGPEFSTTAAGHLLRPPPASPAPITSPARLRPSPRPPTATAAREGVSGSGHLLRPACLPDTSATRQALPDARVGRRRPPADARGDLARSAPSRCEVMEVLCIGTADTKFEELLFLAAQLRSALAASGSDSKVQVSIVDVSTTEKTTANDFKDIIFIPRNTILSCHLGVDQHNLPDNRGEAIALMSKALQSFLKKRYDSGMLVGAVGLGGSGGTALIAPALRLLPLGVPKLIVSTVASGHTTPYVETSDLVLFPSVVDICGINSVSRVILSNAAAAFAGMVHGILSASNESDETSTKPTVGITMFGVTTPCVNAVKDRLNKEGYETLIFHATGVGGKAMEDLVRGGFIQGVLDVTTTEVADHIVGGIMACDETRFDAIIENKIPLVLSVGALDMVSLMRTTVEENKKFARFIADKINKSSSKVTVCLPQKGISAIDAPGMPFYDPEATSTLLGELNTLIQRTDIREVKLFPYHINDPEFANALVDAFLSMDVQASSSAQPKQDLNIGKSCSGQKISDSSIIWRTPVDFPDAKPEILRRTRSILHKLKEQISDGTPVIGAGAGTGISAKFEEAGGVDLIVLYNSGRFRMAGRGSLAGLLPFGDANDIVLQMANEVLPVVKGVPVLAGVCATDPFRRMEYFLRQLETIGFCGVQNFPTVGLFDGNFRQNLEETGMGYSMEVEMISMAHRMGFLTTPYAFNPDEAAAMAKAGAHIVVAHMGLTTAGSIGAMTAATLDDSVLRVQAIADAAFGVNPDIIVLCHGGPISGPLEAEFVLKNTKRVHGFYGASSMERLPVEQAITNTMREYKRISLK

SEQ ID NO: 225339 - protein, 1513 aa, Zea Mays
MDTVTRLLDVIDRQIRCSQGLSIDVKENSDAFDAEPLVFSALESSHAALAIMTHHDMPKQLYREELIERIIDFSRHQITDCMAASNPTFRALYKPAGNVANDGDDDEGDLENGQVSKRRRTATNLSMRKSSNRVSASVYSAVQKLCLILGFLKELLTTVRLSDSCILQLAKTCFTTFLVDNMQLLQLKAIGVICTVFSSYTQHRSYLVDETLHLLRKLQFSKNAVRTYHLADEDQKQIQMITALLVHLVQFSAIVPDSLKGTVDWTTIVDASSDADYYPIQCHEAATEACCRFWTDVLQRFTAAKSQDMSETKGIIDNLVQDFLTILNLPEYPAAASILEVLCVLLLQNAGLKSKDINARCFAIDLLGGIASRLKRDSVVCSEEKLWILQDFTDKGSDGSIFLKNKCCVCLGGRGINIACNECGRCFHSDCMGAGSQDNLQRDSVCPLCFCKQQLNVLQSYCQSQIKENGKKTAASASKKSAKPTEVSAVEIVQQILLSYLQEAGSQDDGNLFTRWFYLCIWNKDDQHSQEKIIYYLARLKSKEILRDSGNGLAISRDSAKKICLALGQKNSFCRGFDKILALLLASLRENSPVIRAKALRAVSCIVEADPEVLGDKRVQYAVEGRFCDSAISVREAALELVGRHIASHPDVGLKYIEKVAERIKDTGVSVRKRAIKIIRDLCASNPNTDTTHAFVEIISRVNDEESSVQDLVCKTFYELWFEEPTGSHKHLVADGSSVPMEIAKKTEQIVDMLRKMPNHQPLITIIKRNLTLDFLPQSTKAAGINSSMVASIRKRCELICKRLLERILQVEEGAANEMEIHTLPYIVALQAFCIVDPTLCIPVTDPSKFVVTLQPYLNIQVDNKSSAQLLESIIFVIDAVLPLIRKPPQNVVEELEKDLKHMIVRHSYLTVVHACIKCLCALSKSAGRGPGLVENLVNIFYKHLCGANSDSQLLGRSLFCLGLLLRYGYQLMLTSENQLDFPKIINLLQRKYLLKDDFSLKVRALQTLGYILIAKPEFMLQKDMLNLIETALSSEVDYRFKIQGLQNLYEYLRDAESQLTAESTAKPPGQCEINGRSEVPVAAGAGDTNICGGIIQLYWSSILERCLDTNDQVRQSALKIVEVVLRQGLVHPITCVPHLIALEMDPLEGNSKLAHHLLMNMNEKYPSFFESRLGDGLQLSFKFFESIVSNHKMSANIKSNPIAFVKPGISRIYRLIRSNRNSRNKFVHSIVRKFESDSRSRSTVSFLVYCAEVLASLPFTCSDEPLYLIYDINRAIHLRAGGVEGNLKRWTSMSQSQEMAGMPTLPGESHVVMQEEPGGYYDNMGDATERVNDNPCSTSDVDIAKVQGDCHDAIALQLLLKLKRHLKVVYGLDDARCQAFSLKEPPKSGETFSRQNVSFNIGNTNLSLPSCLQDAASVYQDFKTVLREDSMDFAVFVPSVQTRKRPTPRNTTSPTPRSMTRVRRTAAPSVTKARGGARGDDSDDTDDDDWTGGPRVLDFSGGGRVTRQRVQV

SEQ ID NO: 225340 - protein, 1462 aa, Zea Mays
MTHHDMPKQLYREELIERIIDFSRHQITDCMAASNPTFRALYKPAGNVANDGDDDEGDLENGQVSKRRRTATNLSMRKSSNRVSASVYSAVQKLCLILGFLKELLTTVRLSDSCILQLAKTCFTTFLVDNMQLLQLKAIGVICTVFSSYTQHRSYLVDETLHLLRKLQFSKNAVRTYHLADEDQKQIQMITALLVHLVQFSAIVPDSLKGTVDWTTIVDASSDADYYPIQCHEAATEACCRFWTDVLQRFTAAKSQDMSETKGIIDNLVQDFLTILNLPEYPAAASILEVLCVLLLQNAGLKSKDINARCFAIDLLGGIASRLKRDSVVCSEEKLWILQDFTDKGSDGSIFLKNKCCVCLGGRGINIACNECGRCFHSDCMGAGSQDNLQRDSVCPLCFCKQQLNVLQSYCQSQIKENGKKTAASASKKSAKPTEVSAVEIVQQILLSYLQEAGSQDDGNLFTRWFYLCIWNKDDQHSQEKIIYYLARLKSKEILRDSGNGLAISRDSAKKICLALGQKNSFCRGFDKILALLLASLRENSPVIRAKALRAVSCIVEADPEVLGDKRVQYAVEGRFCDSAISVREAALELVGRHIASHPDVGLKYIEKVAERIKDTGVSVRKRAIKIIRDLCASNPNTDTTHAFVEIISRVNDEESSVQDLVCKTFYELWFEEPTGSHKHLVADGSSVPMEIAKKTEQIVDMLRKMPNHQPLITIIKRNLTLDFLPQSTKAAGINSSMVASIRKRCELICKRLLERILQVEEGAANEMEIHTLPYIVALQAFCIVDPTLCIPVTDPSKFVVTLQPYLNIQVDNKSSAQLLESIIFVIDAVLPLIRKPPQNVVEELEKDLKHMIVRHSYLTVVHACIKCLCALSKSAGRGPGLVENLVNIFYKHLCGANSDSQLLGRSLFCLGLLLRYGYQLMLTSENQLDFPKIINLLQRKYLLKDDFSLKVRALQTLGYILIAKPEFMLQKDMLNLIETALSSEVDYRFKIQGLQNLYEYLRDAESQLTAESTAKPPGQCEINGRSEVPVAAGAGDTNICGGIIQLYWSSILERCLDTNDQVRQSALKIVEVVLRQGLVHPITCVPHLIALEMDPLEGNSKLAHHLLMNMNEKYPSFFESRLGDGLQLSFKFFESIVSNHKMSANIKSNPIAFVKPGISRIYRLIRSNRNSRNKFVHSIVRKFESDSRSRSTVSFLVYCAEVLASLPFTCSDEPLYLIYDINRAIHLRAGGVEGNLKRWTSMSQSQEMAGMPTLPGESHVVMQEEPGGYYDNMGDATERVNDNPCSTSDVDIAKVQGDCHDAIALQLLLKLKRHLKVVYGLDDARCQAFSLKEPPKSGETFSRQNVSFNIGNTNLSLPSCLQDAASVYQDFKTVLREDSMDFAVFVPSVQTRKRPTPRNTTSPTPRSMTRVRRTAAPSVTKARGGARGDDSDDTDDDDWTGGPRVLDFSGGGRVTRQRVQV

SEQ ID NO: 225341 - protein, 317 aa, Zea Mays
MALLHASVAMERKLVVEWVPSCDLEDSSAKETPEAHKKAWKLLKGADGVLVPGGFGDRGVQGKILAAKYARENNVPYLGICLGMQIAVIEFARSVMKLRGANSTEFDPATTSPCVIFMPEGSKTQMGATMRLGSRRTYFHVSGCKSAKLYANASSVDERHRHRYEVNPDMVPDFERAGLQFVGKDESGKRMGVGLEIFSDVVDLDVLSRNLIRNVHNHLVVFCWMQIIELPSHKFFIGAQFHPEFKSRPGKPSPLFLGLIAAASGQLEPLLQRSNPTTKACPMSKVPKLKLYPTGPVNNPLNSLVNGYYPNGTGIHT

SEQ ID NO: 225342 - protein, 184 aa, Zea Mays
MSKKIVVKLHLQDNKDKQKAMKAVSALTGPTVSPAGCTWCAGIDEISADMASHKMTVVGMVDPVSVVSKLRKASWSATIESVGPAKEPEKKDGEAAKKDGGEGEKKEGGEGEKKEAGEGENKKEAGGEKDKDGKKAAPPTEQQVQLAELLNQYYRASSYYPYPPVATHYHVQSMEEDPNSCTVC

SEQ ID NO: 225343 - protein, 634 aa, Zea Mays
MAAEAPPSASASASSSSAPRPPTAAASAPGGGGGGAPASAESYLGSLISLTSKSEIRYEGVLYDINTEESSIGLRNVRSFGTEGRKKDGVQIPASDKVYEYILFRGTDIKDLQVKSSPPQPPPPQAASLHNDPAIIQSHYSQPASTSSSLPSAGGAVLPDFSSQAVQYGLQRPTFQSNLPLYQPGNTPWGSSVAPPAGNAPWGSSVAPPAGNASTLSVPSMYWQGYYAPSSGLPHHLQPPPLLHPTPGLSVPQNLQYPGLNPSLQSGPQKLSELQPSLMPPITSQGPSSGILPATTAPASATLLAPESSKPLLPNMGSLFAPRATSLGATFPLPSQPTAVAETSATVSQNLTSFGSSKVPALPGSTLAYQTVSQSVSSTIAPSSSAQAEMPVPLLAPSGQLLQNTSSILSSSHSMQAPLQLASKEVKPIEPKAKVAEPLLPDPLLPDPPSRAMPEIKEPILPLPKQTPQKYNGSGSRNHHNFRGRGRGRGSAFSQSVTAFTEEFDFTAMNEKFNKDEVWGHLGKKSQSRDKDGEVGDDVFDEELEAEETDNPELAVKPVYVKDDFFDSLSSGTFGRGGPNGRGRPSERRRVDTEAMETRGGVALGILILTGAMGEIDYSSSSHTCGCCSLLPHA

SEQ ID NO: 225344 - protein, 484 aa, Zea Mays
MAAEAPPSASASASSSSAPRPPTAAASAPGGGGGGAPASAESYLGSLISLTSKSEIRYEGVLYDINTEESSIGLRNVRSFGTEGRKKDGVQIPASDKVYEYILFRGTDIKDLQVKSSPPQPPPPQAASLHNDPAIIQSHYSQPASTSSSLPSAGGAVLPDFSSQAVQYGLQRPTFQSNLPLYQPGNTPWGSSVAPPAGNAPWGSSVAPPAGNASTLSVPSMYWQGYYAPSSGLPHHLQPPPLLHPTPGLSVPQNLQYPGLNPSLQSGPQKLSELQPSLMPPITSQGPSSGILPATTAPASATLLAPESSKPLLPNMGSLFAPRATSLGATFPLPSQPTAVAETSATVSQNLTSFGSSKVPALPGSTLAYQTVSQSVSSTIAPSSSAQAEMPVPLLAPSGQLLQNTSSILSSSHSMQAPLQLASKEVKPIEPKAKVAEPLLPDPLLPDPPSRAMPEIKEPILPLPKQTPQKKVLAYLPHALTLIS

SEQ ID NO: 225345 - protein, 1262 aa, Zea Mays
MALFRKFFLKKTPDRLLEISDRVYGIMLALPVDLVRAVFDCCFSTDSMGEDEYRDYLSGIVAQLQEFFPDASFMVSNFWSGDKRSRISDILSEYDMTVMDYPQQYEGCPLLQLEMIHHFLKSCENWLSVEGQHNMLLMHCERGGWPVLAFMLAGLLLYRKTYTGEQKTLEMVYKQARRDFIQQFFPLNPQPSHLRYLHYITRQGGGSEWPPISRPLILDSVVLHVVPRFDVDGGCRPYLRVHGQDSSPGNKSAKVLYEMPKTSKHLPHYGQAEVPIKLSVFCRVYGDVVLEFIHIGDNIEHKETMFRIMFNTAFVQSNILALNRDDIDVAWNVNNQFPRDFRAEVHFSDPDSFKPAATVEEIADDGDETDVASVDTGEEFYEAEEDWHDARKDQETRSTDGGISLDDVADGGVATEERSSLEKHQFNEGVKIGVSQNLGSMNEKGASAPTPTFDNQEGLQQPREVLANGKLSSTNGQENSDVHDIQVVATSVDSEGHKFGSTCQEDMKGVIAQTLVTTVDPSCSDEIECQANEQTKISEYPDLDYTAFGSPRSLSRTNGDTHLRTTKNEGLQNGDIKIITENTISMDNDLVIYEEKTIVVNGNTVQEVKNIVNEKSIAAKIDKPIIESRNSLNNNNGKIQIAKPSDTSNGKLDGCRLESCLEEALPTKKTTVHDRIVVLPATDVGTEIKTKQEGLGDKQDFAPPPPPPPLASRAGPPPPPPPPGARSGPPPPPPPPGSRTGAPPPPPPPGAPPPPPPPGGGGRGPPPPPAPRGHLGGPPPPPPPSGRAPGVPPPPRAPGVPPPPGNNPSLGRGRGAVRPLGSAYGAAASRKSTLKPLHWVKVTRALQGSLWEELQRNDDSQSVSEFDISELESLFPAAVPKSDDSSKSERRKSLGSKPEKVHLIELRRANNTEIMLTKVKMPLSDLVSAALALDQSTLDVDQVENLIKFCPTKEEMELLKNYTGDKQNLGKCEQFFLELMKVPRMESKLRVFSFKIQFGSQVADLRRSLNIIDSSCNEIRTSLKLKEIMKKILLLGNTLNQGTARGAAVGFRLDSLLKLTDTRATNNKMTLMHYLCKVLAARSPQLLNFYVDLVSLDAASKIQLKMLAEEMQAVSKGLEKVHLEYDASERDGPVSEIFREKLKEFTDNAGADVQSLSSLFSEVGKKADALIKYFGEDPVRCPFEQVISTLLTFVTTFRKAHEENLKQAELEKKKAEKEAEAEKAKNAQLTGKNDSKPSNPRRQAKQTLERTRSASRRGRDVG

SEQ ID NO: 225346 - protein, 455 aa, Zea Mays
MEKKAATTEEPLLAPRSEHTVAAEAKRLLSLAGPLVASCILQNVVQLVSVMFVGHLGELPLAGASLASSLANVTGFSLLVGMASALDTLCGQAFGARQYGLLGLYKQRAMLVLALACVPIAAVWANAGRILILLGQDRDIAAEAGAYSRWLILSLVPYVPLACHVRFLQTQSIVVPVMASSGATALGHVLVCWALVFKAGMGSKGAALSGAISYSVNLAMLAVYVRLSSACKRTWTGFSTEAFRDLLRFTELAVPSAMMVCLEWWSFELLVLLSGLLPNPKLETSVLSICTRVSNELGAGEPQAARLAARVVMCIALSAGLLLGSTMILLRSFWGYMYSNEPEVVTYIARMMPVLAISFFTDGLHSCLSGVLTGCGRQKIGARVNLGAYYLAGIPMAVLLAFVLHLNGMGLWLGIVCGSLTKLVLLMWITLRINWEKEATNAKETVFSSSLPVAL

SEQ ID NO: 225347 - protein, 296 aa, Zea Mays
MAFAASPSLSALASSSSSTAAAPTPSSNPLHEPRPLHLSLKPVLPLPKPHALSCSAPHIPRAAAGDGSGVGNGGKDGGGGGGGEDEDDCDDADFGPLLGFNEVLHLAAARGVALPGDMLEAAKDAGIREVLLLRYFDLQAAPWPLGVLIRAFSMLRNRMLADPSFLFKVSTEIVIDSCCATFAEVQKRGKDFWAEFELYAADLLVGVAVDIALVGLLAPYVRIGKPSASTGLFGRFSRMAGSLPSSVFEAERPGCRFTAQQRIGTYFYKGVLYGSVGFVCGIIGQGIANMIMTAKR

SEQ ID NO: 225348 - protein, 409 aa, Zea Mays
MVRKRLGYSSRGHRIPTMPRVPNSARGKRSTRRKKDENDDMCAMDLLATVAGKLLADQDNSSSVPNTSAAKAKKRKSVKEEHFDEIPPLKNVAMEKDVGSGSVSAFPRQAKNCLAENSSTRNGADTVLESLTVKSNMLAKIPECGSYGIHHAGSSSSAEPEQVHQAEPKVSRRQADGHPVAYGIFNSVDVDGKPPALVSSDSSSCVPLSSHDKEHQTSSLYRGVVQYTADREDDENSSGCTHPSTIESKGCKPQYLGNHRIRKLLASKVRKAARNKICGGIPSKKICGGLSKKGSKLNLCGKKMSTTHQKVQRMIFKKKKLTHRTSFAKEMLTEASGTSFAMEGQNKSCEAENYHVKLRIKSFNIPELFIKVPENATIGSLKLIHPRPRKLLDGFIHQHLQAMLVLNTT

SEQ ID NO: 225349 - protein, 154 aa, Zea Mays
MKCEEPFPEADVGDDSQQPRAPYRSRSLSDLYSVHCPVQMASQDTTASSQAIVPVSPAPSDVGALAIVPLCKSKGSEVGQRRMRRPFTVGEVEALVGAVEQLGTGRWRAVKTLAFDSIDHRTYVDLKLIHPRPRKLLDGFIHQHLQAMLVLNTT

SEQ ID NO: 225350 - protein, 154 aa, Zea Mays; identical to SEQ ID NO: 225349

SEQ ID NO: 225351 - protein, 143 aa, Zea Mays
MELSTLTQANISLPFITATADGPKHIEATLSRAKFEELCSDLIDRLKTPVNNALRDAKLSVSDLDEVILVGGSTRIPAVQELVRKLTDKDPNVTVNPDEVVSLGAAVQVIFFILKCCLLLQSIILTWRAPTTTTKPFSPKQGW

SEQ ID NO: 225352 - protein, 134 aa, Zea Mays
MELDTPKIIAAASSFAGACPQQQSRRDTVTLGEAPCCPSRWIELCPSPQLAIVEYWACRRCRACHAQQEPQRHDLFQLDESSHIVVDPCPCRHASRIPCSTKAPSCGQHADMRDTSRPGPRDDDRASDVVPTTR

SEQ ID NO: 225353 - protein, 119 aa, Zea Mays
MHSSCMSQIIAAASSFAGACPQQQSRRDTVTLGEAPCCPSRWIELCPSPQLAIVEYWACRRCRACHAQQEPQRHDLFQLDESSHIVVDPCPCRHASRIPCSTKAPSCGQHADMRDTSRP

SEQ ID NO: 225354 - protein, 173 aa, Zea Mays
MASSAARSLALVASASASLGVGQRSWARLAVSSSSAGSALPKLRGLRSFAASAGGAVMGKPGPGVVDADAGMDAVQRRLMFEDECILVDEQDNVIGHESKYNCHLMEKIEAGNALHRAFSVFLFNSKYELLLQQRSATKVTFPLVWTNTCCSHPLYRESELIEENCAVAGFKT

SEQ ID NO: 225355 - protein, 244 aa, Zea Mays
MASSAARSLALVASASAAGMDAVQRRLMFEDECILVDEQDNVIGHESKYNCHLMEKIEAGNALHRAFSVFLFNSKYELLLQQRSATKVTFPLVWTNTCCSHPLYRESELIEENCAGVRNAAQRKLFDELGIVADELPVDQFIPLGRMLYKAPSDGKWGEHELDYLLFMVRDVKLDPNPEEVADVKYMNRHQLKELLRKADAGEDGVKLSPWFRLVVDNFLMGWWDHVEQGTLQGAADMKTIHKL

SEQ ID NO: 225356 - protein, 633 aa, Zea Mays
MHARFLSAPSPASAAPSPYVRLAFTGALPRRACWKPRGPASASAPPPRPLHSLCARASMQPASPAHDGHGGPPVHGVSNTVIGVLGGGQLGKMLCHAASQMGIRIVILDPLPGCPASSVCDEHVIGSFNDGDTVREFAKRCGVLTVEIEHVDAATLEKLEKQGVDCEPKASTITIIQDKYRQKKHFSRYEIPLPDFMEVDTLRSIEEAGEKFGYPLMVKSKRLAYDGRGNAVAKNKEELSSVVASLGGFERGLYVERWTPFVKELSVIVARSRDNSTVCYPVVETVHKENICHVVEAPADVSNKIKKLATSVAEKAIKSLEGAGVFAVELFLTEDDQILLNEVAPRPHNSGHHTIESCYTSQYEQHIRAILGLPLGDPSMKAPAAIMYNILGEDEGEAGFFLAHQLISRALTIPGTSVHWYAKPEMRKQRKMGHITIVGPSKISVKSRLDNLLQRNSSDPKEGPRVAIIMGSQSDLPVMKDAERVLKEFDIPCELTIVSAHRTPERMYDYAKSAKDRGFEVIIAGAGGAAHLPGMVASLTPLPVIGVPIKTSTLSGFDSLLSIVQMPKGIPVATVAIGIAENAGLLAARILAARDPELQDRVTKYQDDLRDMVLETAERLEDQGPEEFLKGMD

SEQ ID NO: 225357 - protein, 164 aa, Zea Mays
MYPQGRMSHHFREMKVGDYLSVKGPKGRFKYHVGQVRAFGMLAGGSGITPMFQVARAILENPNDNTKVHLIYANVTYEDILLKDELDDMAKTYPGRFKIYYVLNQPPENWNGGVGFVSKEMIQSHCPAPAEDIQILRCGPPPMNKAMAAHLDELNYTKEMQFQF

SEQ ID NO: 225358 - protein, 378 aa, Zea Mays
MATAVAATAAAAGGSNVEFIRARSDKREYRRVVLANALEILLISDPDTDKAAACMEVEVGSFSDPEGLEGLAHFLEHMLFYASEKYPGEHEYTKYITEHGGSYNAYTSSETTNFFFDVNVDNFEEALDRFAQFFIKPLMSQDAVLREIKAVDSEHKKNLLSDGWRMYQLQKHLASKDHPYHKFSTGSWETLETKPKARGVDIRLELLKFYKNYSANLMHLVVYGKESLDYIQGLVERMFSDIKNTDQRCFKCPSHPLSEEHLQLLVKALPIEEGDYLRIIWPITPSIQFYKEGPCHYLSHLIGHEGEGSVFHIIKELGWAMNLMAGESTDSNEYSFFSVSIRLTDAGHEHMEDIVGLIFKYLHLLKVDGVHEWIFNER

SEQ ID NO: 225359 - protein, 288 aa, Zea Mays
MSQDAVLREIKAVDSEHKKNLLSDGWRMYQLQKHLASKDHPYHKFSTGSWETLETKPKARGVDIRLELLKFYKNYSANLMHLVVYGKESLDYIQGLVERMFSDIKNTDQRCFKCPSHPLSEEHLQLLVKALPIEEGDYLRIIWPITPSIQFYKEGPCHYLSHLIGHEGEGSVFHIIKELGWAMNLMAGESTDSNEYSFFSVSIRLTDAGHEHMEDIVGLIFKYLHLLKVDGVHEWIFNELEAINEMEFHYQDKVDPISYVMRTVSTMRVIYCLVVFSFIDNTNQQTFY

SEQ ID NO: 225360 - protein, 725 aa, Zea Mays
MAPGTSANPDLFHHILNELQVPLTAMCSRDDEEALSKCMNLGACFHLLKPLNRRSFSILWHQALEHKSKKAAPQRPSLNDSTKNRMVSPSTEKPKEVLILERNNLSVPQSNGYEEPKKQNRVTWTIELHEKFLEAVEALGGNKSARPEKILHLMNVKGLTVKHIGSHLQKHRLRNQNTKQGQRQENASRKPISRQGEATSESITPRVETDGEVYPSRLWTKVKKRSVDTSALKTGMHTCTSGNDNEGTESVWDRYENNLQVFAENKKRWMFTSEHQWPRRNNIDTTDEGDPNEAPETAAGASIEIFGSSSLISDQVGEKNRVESDRDNNTVWSTDLLEGYGASIESSGSSSLLANDQVGENNHSEAARANDSMGNITLLEEIAYGGAYIGTSGSGSLLTGDLVRQNGCAEATRHNDNLWGVNLPQGYGAFTEISGSSNMLTSYQVGENNGTEFARDNGHMENISLLEVYGASIENAGSSSMLTSDQVGQSNLTEADRIYDTMGSINYLEGTVDPEYIAPMDYSVAWAHLEGNGPDLRSPSDGREEAYSFWMSQLAGPQDYQSLGPEGFLQVGDDAYNDALRSVGLVNVDEQATQGWQEQQSLSMEDLLQVDDVAWDDTLISMGLINLLDEPMAEEAAIGGSQGQQSLAPEVLQAGDNAYGDDLGSIEMVNLLNEPMTQEAAIADALVDDPMTLIAQDDVPWAWSPAVPGDYGIDWIQDPNAELYG

SEQ ID NO: 225361 - protein, 641 aa, Zea Mays
MLLRPSRGLSCLQPFSLHQSRAAMSETESAAAAPVAAAESKPRRLRGHKKGAVTCCVASSARPGVVASSGEDGCLCWFDLRTKDALLTMEAANKPISSICFKPGNEDFVYISAGNEILSFDVRMGTQSKPLETYNYNRDEINQIAVSSKGFLAAADDSGDVKIVNTIQKCLYKRLREAHTSICSSVQFIPWRPWTAITGGLDSKLAAWDFSKGRTLFSIDYGSPELQNGSSSGSAGQCFNPAFVHSVAVSEEGILGGLYKVCAVARGDGAVDVVDLEYELAPAKSKGPPRAAILTTRSKGAELGDGSCNQSRAKRIHLDYTMGGHTAAVSCVAFSAFGEKGKFLISGGNDASVKLWDWSKGFYSETNSKVDLVLDIDVKKKSETLSGCKLLLYPLEQEEEEGSSKLASLPAIAKKVLSYEEGIYAKLSRKWIEEGLRTVSIGRQEPGGFAAVLWRRREMGGLLLPHHRTFPNSLQASIPGPLSLHKGDRKNLHYFAPDVHLFCSLRQGFPRSSWSAVIRSEASGNAVASPGTVIKRSKEELITFFRDIQTSIAECSRKASKRTRKQPPDLFQEVRRREEQSHGTGGGDSGTDDVSEGPRKVKSLEDMNVAGLRELARARRMRGYSKLKKGELIDRLRGATT

SEQ ID NO: 225362 - protein, 639 aa, Zea Mays
MLLRPSRGLSCLQPFSLHQSRAAMSETESAAAAPVAAAESKPRRLRGHKKGAVTCCVASSARPGVVASSGEDGCLCWFDLRTKDALLTMEAANKPISSICFKPGNEDFVYISAGNEILSFDVRMGTQSKPLETYNYNRDEINQIAVSSKGFLAAADDSGDVKIVNTIQKCLYKRLREAHTSICSSVQFIPWRPWTAITGGLDSKLAAWDFSKGRTLFSIDYGSPELQNGSSSGSAGQCFNPAFVHSVAVSEEGILGGLYKVCAVARGDGAVDVVDLEYELAPAKSKGPPRAAILTTRSKGAELGDGSCNQSRAKRIHLDYTMGGHTAAVSCVAFSAFGEKGKFLISGGNDASVKLWDWSKGFYSETNSKVDLVLDIDVKKKSETLSGCKLLLYPLEQEEEEGSSKLASLPAIAKKVLSYEEGIYAKLSRKWIEEGLRTVSIGRQEPGGFAAVLWRRREMGGLLLPHHRTFPNSLQASIPGPLSLHKGDRKNLHYFAPDVHLFCSLRQGFPRSSWSAVIRSEASGNAVASPGTVIKRSKEELITFFRDIQTSIAECSRKASKRTRKQPPDLFQEVRRREEQSHGGGDSGTDDVSEGPRKVKSLEDMNVAGLRELARARRMRGYSKLKKGELIDRLRGATT

SEQ ID NO: 225363 - protein, 229 aa, Zea Mays
MRTRSGSRYSNGGEPDYLDALPDDLVLSILSKLAAASSAPSDLLSVHLTCKRLNELGSHDMVFAKASPASLAVKAAAWSEPAQRFLKRCADAGNLEACYNLGMIRFYCLGSRSGGAALPLAAASRRSSTSSERGNGSAADMTYQHRVPYRPTAPLRGPGVAESGAGRGRRFGCFLFLFASFSPADELNEVYIAGAACRSDAHFLLGSTREAKSQRAVEIQQPRLSFIFL

SEQ ID NO: 225364 - protein, 678 aa, Zea Mays
MGIVEAWMREKPIRTFLARLAQRRAAAAAAFLASPSATTVIDGEGGSDGSIPQLSSVANSVVSRCSRILALSIENLQRSFETDFPHSCNEANTYARDLLEYCCHKALHEVTTRPDYLADKNLRRLMFDMMLAWETPGAQDVSVDNGSIVRDSLEIEDEDEGSIFYANSTRLAAQVDDKKTVGLSAFARIAPSCPIIADLVTVRNLFDALTSSSGGRLHFLVYDKYLKSLDRELRSVKGIMQSSLASSFHLDAGECILAIDGDKPIQPVLQHIGISAWPGRLVLTTHALYFQSIRVGYGDKIVKYDLSTDSNQVIKRDLTGPLGVRLFDKAVMYKSSTLTEPIYFDFFELGGPSRRDYWLAITREVLQVNRFIRKFNLGDVQKAEALSKAILGILRYSAVKEAFHIAPSHFKTTLTFSLAEKLPKGDMVLEALYNNYFQLLDSSLRHLAIDSAVDRMSENHSIPFSLYALSRMGFLLLKTNDKSEKEMSFCAVCFGVTKSLEAALEESICYSERIESARATVDQVKVEGVDANLALMQELLFPLIQAGKIVYSLSQWEDPLKSLLFLAFMLYAIQRGLISYIAPFVFLTFAIIMLWHKYIGDGKLLEVLEVKPPPSKNAVEQILTLQEAISKLENFLQSANITLLKFRSVLFACVPKASDTDVSPGNVHKGDAPKETEH

SEQ ID NO: 225365 - protein, 711 aa, Zea Mays
MGIVEAWMREKPIRTFLARLAQRRAAAAAAFLASPSATTVIDGEGGSDGSIPQLSSVANSVVSRCSSCNEANTYARDLLEYCCHKALHEVTTRPDYLADKNLRRLMFDMMLAWETPGAQDVSVDNGSIVRDSLEIEDEDEGSIFYANSTRLAAQVDDKKTVGLSAFARIAPSCPIIADLVTVRNLFDALTSSSGGRLHFLVYDKYLKSLDRELRSVKGIMQSSLASSFHLDAGECILAIDGDKPIQPVLQHIGISAWPGRLVLTTHALYFQSIRVGYGDKIVKYDLSTDSNQVIKRDLTGPLGVRLFDKAVMYKSSTLTEPIYFDFFELGGPSRRDYWLAITREVLQVNRFIRKFNLGDVQKAEALSKAILGILRYSAVKEAFHIAPSHFKTTLTFSLAEKLPKGDMVLEALYNNYFQLLDSSLRHLAIDSAVDRMSENHSIPFSLYALSRMGFLLLKTNDKSEKEMSFCAVCFGVTKSLEAALEESICYSERIESARATVDQVKVEGVDANLALMQELLFPLIQAGKIVYSLSQWEDPLKSLLFLAFMLYAIQRGLISYIAPFVFLTFAIIMLWHKYIGDGKLLEVLEVKPPPSKNAVEQILTLQEAISKLENFLQSANITLLKFRSVLFACVPKATEVVAAVLIVAAAFLVFLPSRPLIQMLVLEMYTREMPLRKQNTEKFRRRIREWWARIPAAPVQMIRPNESKKKR

SEQ ID NO: 225366 - protein, 124 aa, Zea Mays
MAAELVQPLAPANAKDQVGRRRGGGGELGQDGEDKVIGKRVQVVRLAGRPLPAPAAVALSGDGRRRPLPLLTHQGNHLAAVGIPGPAPRPHLSVPPQESSLPGGKRDGASGGRKKVKRPRARAG

SEQ ID NO: 225367 - protein, 357 aa, Zea Mays
MLDDHPFAQDGISSPIAAHIFDFCDNGSGGDLFTAVNVASDLFTAPSEDASSSSVVTTPPAPCGHGDDMPLGTAAAPAASAFSPMPSFDSTLSALLEEEDPSVPNPELLLPIDYPFAAAAAGDEPHPEQQQQQFAQVPVMLPLAGAAQHPGLQTHSTASELMQLDECFAAAMAGGGGYVGLNESMCQQPQPGALFSTTGGMMETGAPGCYFDKDMAAAAAAQGGFLGTGCNGMMMSIMGMEEIGEYQRMMEGASDSLAGTHIPDADCAAAAQMAFSGNAVAGEMQMGGSMSPGRLPAATATEASSLEDANFKSARITVEERREKIISTLAERPWRTAGPASAAGSPRMTTTASRRQG

SEQ ID NO: 225368 - protein, 416 aa, Zea Mays
MLDDHPFAQDGISSPIAAHIFDFCDNGSGGDLFTAVNVASDLFTAPSEDASSSSVVTTPPAPCGHGDDMPLGTAAAPAASAFSPMPSFDSTLSALLEEEDPSVPNPELLLPIDYPFAAAAAGDEPHPEQQQQQFAQVPVMLPLAGAAQHPGLQTHSTASELMQLDECFAAAMAGGGGYVGLNESMCQQPQPGALFSTTGGMMETGAPGCYFDKDMAAAAAAQGGFLGTGCNGMMMSIMGMEEIGEYQRMMEGASDSLAGTHIPDADCAAAAQMAFSGNAVAGEMQMGGSMSPGRLPAATATEASSLEDANFKSARITVEERREKIIRYIKKRNKRNFRKKIKYACRKTLADSRPRVRGRFAKNDDYGEPSSRVMQNHEEYDQMAASMKAEDILDPDAAHFNGMNSYLFNHTVESWL

SEQ ID NO: 225369 - protein, 55 aa, Zea Mays
MCVWWFGEDGAMDGVESESQFDARDEKPNPRIIGILANFEPGYLCGVPMCRSPRA

SEQ ID NO: 225370 - protein, 165 aa, Zea Mays
MMMMTPPEGSTKVASEAADIGRSALFPASALSNTFGFKIQDKQGRMHRFNCETSSLTDLITSILQRVGDDIDRKHLPQILYEDEDHDKVILSSDSDLIAAVDHARQIGWKSLRLHLDYARRKRGDGSSDFEYAGKDAWASAYSAVAAGAALVAGLGVMAYLKRSG

SEQ ID NO: 225371 - protein, 464 aa, Zea Mays
MASRRVDAVLLTDSNALLCGILTDKDITTRVIARELKMEETLVSKVMTRNPVFVLADTLAVEALQKMVQGKFRHLPVVENGEVIAILDIAKCLYDAIARMERAAEKGKAIAAAVEGVEKHWGTAVSGPNNFIETLRERMFRPSLSTIISENSKVVTVVPSDTVLTASKKMLELKMSSAVVAIESKPGGILTSRDILMRVIAQNLPPESTTVEKVMTQCPECASVDTPILDALHTMHDGKFLHLPVLDRDGNVVTVVDVLHITHAAIATVGNSGAAGSESTSAMMQRFWDSAMSIGPLDDDDDSTRSEGSTKVASEAADIGRSALFPASALSNTFGFKIQDKQGRMHRFNCETSSLTDLITSILQRVGDDIDRKHLPQILYEDEDHDKVILSSDSDLIAAVDHARQIGWKSLRLHLDYARRKRGDGSSDFEYAGKDAWASAYSAVAAGAALVAGLGVMAYLKRSG

SEQ ID NO: 225372 - protein, 87 aa, Zea Mays
MVVSTFTGPGIGIGFGVGCGFGVGWGFGGGGCGVGLGLGWGFGNAFGCQYRSSRVQFQGIEFQKKAGGDESQKVVSPELAEKSHPYG

SEQ ID NO: 225373 - protein, 64 aa, Zea Mays
MSTRLGQSSRQSEVASKEQRGKGLLDPRQPARDSFALPDLNLPPQDSADVSTVSLIAPDRLQLC

SEQ ID NO: 225374 - protein, 55 aa, Zea Mays
MNQTPPTPMMISYRRNRLALKGTHSRQFQAHLSSSGNACAQNLGRNQPSPIPTCS

SEQ ID NO: 225375 - protein, 824 aa, Zea Mays
MAAADGDALIAAFAVSKGGIVLKHIFLNAPPPEAMCGSGGREVESDEEDPPVMVGRHPDCHVLVDHPSVSRFHLELRCRRRQSLITVTDLHSVHGTWVSGRRIPPNTPVDLATGDTLRLGASKREYKLLWLSLREAFEMDDLMYMPSLPEEDKEEPYVKEPSSKLLPGHRDSVNMETHQDTSEQIVSEDIAFPAKVAPSAPPLSEFLQPFFVEEHSLSQFHEKRNGVTEEKLVDKNQISESFGSLIIQEMPGTLTNAGKSIQSGEQEDASNKVSKRSKLKSVKSLRVDTGRSSERSSTLSHSFQKGDQNDIVVCSQSCGTECAVCIALFGISEIEKAEEKEELIAEDNVDMNPPASMIMEGNMNERKPDNYIPQDPIGAKLQKKLGLLDSALPLHFKDDVFADKEIPQWNVASVHTESELLSEYLIIPEVKHDDLNHLNLEEGLSKSENINPNKITEGPGNCQLEGTIRGNLFDNLDTDGIEEGEEICPLDKDEITPNGSGNIIMERSNIVLKPTISQQLMDSISPLNLDHGDFSENENSMLNTGDQMKLNEPVSENLNPLIPTDEKYLKSQTEECMPISYLEFKDDILLDRENSVLAPRKYEAMSPVRQENLFSDKENVTPASKVKTVVRGVLGTRMDNSVSAANASNKNKVLGSRVDNSVSTENSSNKKQCELSSKSKKVHTVDFDVFYSDKENLTPISSGGMKARKCFPKDLSVDLDQDQEAFCSDKENLTPLSSAARKTRDMSGNLTRVESAVTKKRVVGRLPFQTLVSNSPLRPASSHDCTCAVARPAGVAAGDLAIKLEDKLNDLSVMATNQVVLEKA

SEQ ID NO: 225376 - protein, 172 aa, Zea Mays
MLAVGSYSQTTAVYAENNMEPLYVLHGQLGGVTQVLFSKDGNYLYTGGRKDPYILCWDIRNTVDIVYKLYRSADTTNQRIHFDIEPCGRHLATGGQDGMVHVYDLQGGQWVTGYQAAADTVNGFSFHPYLPFAVTSSGHRRFGMQDEFEDELNLAGDENSCSVWMFSSSQEA

SEQ ID NO: 225377 - protein, 231 aa, Zea Mays
MIVYIELEEKALVDQLEKLVQLILLFYLEERWEIEDLALGLASQTVLGAATMVSQTGKHPGQLKGQKDWREKRDEFKKKVSIVELNHILNEVNTHILPSHNDLTPITTIAGGSVANTIRGLLAGFGISTGMSFSGVDLTSLRAKKGHTAQTDSSSYNVGDEEYCGYDYILVGQLSEVRISNFVTHQLLFLTPLSACFYKTYAILNWVVPLARQGRYDEIADSKLSDKRQVL

SEQ ID NO: 225378 - protein, 336 aa, Zea Mays
MGHSASRPTACAGAGEALPSRFARFRRRLRNRLRRGAGDDSVSSKALAADEFAGIARVRIAKADMQFKDKFFACLSLGDRTYRTETSDNTHRPVWDSEKKVIVETNGPHIARISVFETNRFSKNTLVGYCEVNLFEMLTKDLEEHSEDLRLLDPSSPNTTVGSISISCHIEDPVETEQSFARRVLAIVDYDEDGTLSLSEFSDLMKAFGNKLAVAKIEELFRQADTNSDGIVDIDELAALLAAQQEEEPLISNCPVCGEDLGKYDNINDMIHMTLCFDEGTGNQIMTGGFLTDKQASLWGGCSSSVNGHISPRMMLVCTLALQLHIFWFSTGEQRG

SEQ ID NO: 225379 - protein, 60 aa, Zea Mays
MMKKADSFVLCCKGLLKGNAVQSLMTAMINVHLDGNEPFAGKPWHLLLLMLPHPTWKIYL

SEQ ID NO: 225380 - protein, 1014 aa, Zea Mays
MENGNNGGNPPHYPPYQYPYPQAQAQLYPYGYQYPPAPPSPSPSAAPAGPYLSPSPSFPSYAPAPHPPQQFHSGPLQAYPPPPQYHAYPPPPHPSPYGHGYDPYPSPYFSYPSTNPSPSPSPGLSPSSSFHHQHASAPEPPSPAPSAPSAPSYPIEDVLASMRLSGRHDYASSPSVTPPSTPFLGDGSSHGGGMQLVPYGTAAGGSQHGGGMQVVPYGAAAGGSQHGGSFRASLKVVLLHGSLDIWVHDARHLPNKDMFSKRVGELLGPRITSAVGSKMSSASMTSDPYVTVQVSYATVARTYVIPNCENPVWSQNFMVPVGHEAAEVQFVVKDSDVFGAQIIGVVSIPAEKLLTGDRIQGVFPVLEPNGKPCAPGAVLHLSIQLIPVAQLTMYHHGVIAGPDSHGVPHTYFPLRRGMRVTLYQDAHVPDGCLPDIWLSNGLRYQHGQCWRDIYDAICQARKLIYIVGWSVFHTIHLVRDGTQAPSLGDLLKMKSQEGVRVLLLVWDDPTSRSILGYKMDGFMGTRDEETRRFFKHSSVQVLLCPRSAGKRHSWVKQQETGTIFTHHQKTVIVDADAGNYRRKIVAFVGGLDLCGGRYDTPWHPLFRTLQNEHKEDYYNPNFNTVDARGPREPWHDLHSKIDGPAAYDVLQNFQERWLKAAKRHGIKKLAKSYDDALLTIERIPEIININDAIYFSDNDPETWHVQVFRSIDSNSAKGFPKDPRAATMKNLVCGKNVLIDMSIHTAYVHAIRSAQHYIYIENQYFIGSSFNWDSNKDLGANNLIPIEIALKIANKIKANERFSAYIVVPMWPEGNPTGAATQRILYWQNKTMQMMYETIYRTLKEEGLDDMYEPQDYLNFFCLGNREVADSTSTSNASNTANNPQRSMEGIRDTEIAMGAYQPQYTWANKLSAPRGQIYGYRMSLWAEHIGSIEEDFNYPESLECMRRVRHLGEENWKQFVADEVTEMRGHLMKYPVSVDRKGKVKPLPGCTTFPDMGGNICGSFVAIQENLTI

SEQ ID NO: 225381 - protein, 287 aa, Zea Mays
MDVDDPSPRAGGGSGVDPPRIRRLEESVVNRIAAGEVIQRPSSAVKELVENSLDAGASTVSVTVKDGGLKLIQVSDDGYGIRFEDLPILCERHTTSKLSAYEDLQTIKSMGFRGEALASMTYVGHVTVTTITEGQLHGYRVCYKDGVMENEPKPCAAVKGTQIMVENLFYNMVARRKTLQNSNDDYPKIVDFISRFAVHHINVNFSCRKHGANRADVHSSSTSSRLDTIRNVYGASVVRDLIEIEVSDEDAGDAVFKMDGYISNANYVAKKIMMILFINGRNIQEQC

SEQ ID NO: 225382 - protein, 405 aa, Zea Mays
MWMSIYTQPKKSLLNQERVIETIKNTIEEKLRNCNTTRIFQTQAVNSALTQVYTQKDKGTEVKMAPGVKSQKAPVSQMVRTDPRNPSGSLHAYWHGQSSKLENKYDLVSVRNVVRSRRNPKDAGDLSSRHELLMEIDSHCHPGLLEVIKNCTYVGLADEVSALIQYNTHLYLVNVVNVSKELMYQQALCRFGNFNAIQLSEPAPLQELLLMALKDDESIGDENDEEKLEIAEANSKILKENAEMINEYFSIHVDHDGNLTRLPVVLDQYTPDMDRLPEFVLTMGNDVTWDDEKECFRTAAAAIGNFYALHPPILPNPSGSGVQVYKKNKACMASGEHVDSTDEDDIDHELLAEAETAWSQREWTIQHVLFPSMRLFLKPPKSMATDGTFVQIASLEKLYRIFERC

SEQ ID NO: 225383 - protein, 533 aa, Zea Mays
MRRGSLSLLLLAAVAAVAATAVPAEPASTLSGPSRPVTVAIGDRGHAVDLPDTDPRVQRRVTGWAPEQIAVALSASPTSAWVSWITGDYQMGGAVEPLDPGAVGSVVRYGLQNYTSGIIHHVRLQGLEPGTRYLYRCGDPAIPDAMSDVHAFRTMPAVGPGSYPGRIAVVGDLGLTYNTTSTVDHLVRNRPDLVLLLGDVCYANLYLTNGTGADCYSCAFAKSTPIHETYQPRWDYWGRYMEPVTSSIPMMVVEGNHEIEQQIHNRTFAAYSSRFAFPSEESGSSSPFYYSFDAGGIHFVMLASYADYSRSVQVAGGGPGEGGQVGDAMADRGLARALVHHLQGSLQGSRVHEGGDGGAPLRLRCRRRLHRPRARVRAVEPGVQLHAGRVRPRAHLGGRRRQPREDGDGARGRGRPLPGPGVDAGPLHGGPPLRRQLHVGPRRGPLLLGPPAGVQRVQGEQLRARRPGGQERHARALAVAPQPGPPCRRRRQRRRRRGLHRQGARQVPRQDGQIVGLLIDPSLLATPTLVAAY

SEQ ID NO: 225384 - protein, 125 aa, Zea Mays
MMNSQKLQLPVQDLMSLRGRSFIISKVAAHPSSSRRRRPRGLVAAAGSDDDECASAGGESESSSSGGKDDGGGGLSREDLERLVGSDEDAKFNGLDLANLIRKKYGRSYDVTLIKKSSWGGICWP

SEQ ID NO: 225385 - protein, 349 aa, Zea Mays
MERADSQKDGVEDTLGSIVEAIDQGVKDEDQLDLPKYVCFKGDNGLYLSARTVEGHPYLQFASEDIGDPSVRFITYNHKVNGKRVVRFKSNHLGKFWRRSPNWIWADTDDTSTKNSDTLFEVIKIDEDGVYALRNLGNNHFCHRLTYDGKESCLNATIPTIRKEAHIKIEEAVLSRKISNIEYHLKGAKIFDKKAKTLITREAVNGTSTDSKTTITLKYSVIKGKLWDSSKSMKLGVTTTIEAGVPVVLPATIEVQSEFNSTYSWGESIIEKEEYSNAYEVVVPAYSVVTVSVLATQGICQVPFSYTQEDVLTTGERKVFKFDDGIFRGVNSFGFKSEVTERKLSKDDD

SEQ ID NO: 225386 - protein, 346 aa, Zea Mays
MWRATRRSPPFLRWLSSDAASSKAPRQRVAALWGNGDYGRLGLGSLESRWSPTVCPFFLARAADPPASLACGGAHTLFLTQNGRVFATGLNDFGQLGIGTSVTHMLEPVEISGFHERVVEVSAGNHHSCAVTADGKLFVWGRNSGGQLGLGKGAGKVVSTPTKVDCLTDLRVKTVALGSEHSIAVTEEGEVLSWGAAGSGRLGHGRQSSILGFSLTSTEYTPRLIKNFDGIKIKKIAAGMLHSACIDEKGTLFIFGQKTEKGFGRPNEEFRPNIVEEIPFSEEVACGGYHTCVVTDSGDLYSWGSNENGCLGLGYFICDFFNNFPTSSCILLISVCNCASNVEVVF

SEQ ID NO: 225387 - protein, 287 aa, Zea Mays
MAKYLMSMVVDEEDINHVRCLPMKHGTEHGMNGRDHINGYTASFRNGVGFNDGNGLSGEQGFAIGGEERLSRSNGYLSELAAAAYVCHGGVQRVHIIDGTVGGALLLELFTRDGVGTMIARDMYEGTRMAREEDLSGIRKIIRPLEESGVLVRRTDQELLEALTSFIVVERDGSIIACAALFPFLEDKSGEVAAIAVSEECRGQGQGDKLLDYVEKKALSLGLEKLFLLTTRTADWFVRRGFKECSFDSLPLVRRKRIDLSRGSKYYMKWLQAAEVGHMAADGFAMR

SEQ ID NO: 225388 - protein, 362 aa, Zea Mays
MVLMAVGMKSLIMLQVEISLVLSTYEVATACALSIEADKLICIVDGQIFDEHGRVNRFMSIEEADMLIRTRAKQSEIAANYVKVVDEEDINHVRCLPMKHGTEHGMNGRDHINGYTASFRNGVGFNDGNGLSGEQGFAIGGEERLSRSNGYLSELAAAAYVCHGGVQRVHIIDGTVGGALLLELFTRDGVGTMIARDMYEGTRMAREEDLSGIRKIIRPLEESGVLVRRTDQELLEALTSFIVVERDGSIIACAALFPFLEDKSGEVAAIAVSEECRGQGQGDKLLDYVEKKALSLGLEKLFLLTTRTADWFVRRGFKECSFDSLPLVRRKRIDLSRGSKYYMKWLQAAEVGHMAADGFAMR

SEQ ID NO: 225389 - protein, 85 aa, Zea Mays
MVVLGGRGRLQRGPGLLPPLPSRVKLWLFVAYVVSFVCLAGSVGLLVQDALTNKGPSVWTGVAGVLQCVLVLISGLVYWTCHSED

SEQ ID NO: 225390 - protein, 72 aa, Zea Mays
MVRFAMEQPQTMASYSVSDDVATYYLYMTYVHPFIFSLATIIPMLPDEVLWKGSGTLCEILLMVQAFKAGGT

SEQ ID NO: 225391 - protein, 138 aa, Zea Mays
MVAVRKITTRLILALACQCKVYPKGVDLMLSHALTVTRSFRAIKRRGRQEDLTGRSGMSRAKFVLMAGSGSRGVLQRQTRHEPKSAVLHYPKHLSSRNMLSIFQHEEENWSGAMIMQKCARILFAFSSIADNHSSIYS

SEQ ID NO: 225392 - protein, 650 aa, Zea Mays
MFSTAGGRSMAISVDALQRAKSLLGDSDLVVSPNGSIGRSLASAIENLPKPTISPKGDVSNLSYGTRAIGYAVPDTPVTKTSANQFHMGREYRPVNEIPKVPKPPSRCLSEGDNASNSKDKTQWHHMPAGSGNTDCLANGKRIIGGRNSVSPFKRPRSSRWVSNHYKWIVWKLASLERCYPTRVAGKFLTVDNVLEELKYRYSLDASLDVALLEQLEKRKLFVGQKLRVSGVVKLVVHINGTYRARWNDALGFCKHVGLPLAFRCIKVSGGRVPRTLVGITRIYPILYRERLPDGRFVVRSERMERKALELYHQRVSKITEDILFEQQENCDSTDDNEEGATICKMLEHAAEPEFILAGMTPEQLKCFSSYIEKQKIVKQNEVSEKVEKALVVAGLSSRDVTPFLKVRVIGLVNKHSASTSSNKEGLITIWNPTEMQKDNLVEGQAYSVMGLVPSNYCTEIMYLHARGSSTTWKPLASAQTTDFKPFFTPRRAIELLKFGEVPISSEFDIAGLILYVGNTYLCNNKKKQWLFLTDGSKFVSGQGCEEQDCLLAVSFSSATTDEDSTLFSYTLSGNTVGFSNLVKRQKDETRQVWVAEATESSSYTLSNEIPRKSHLKEAAVLAERWASRSYHKIQELKERVLCIVGNAGV

SEQ ID NO: 225393 - protein, 1327 aa, Zea Mays
MDGLAQSVNTAGLFSTGSGRPLAVSQRAVRRASALVGEEVDEATDNNNKKRKKPFGCDAGLEGELANLHVPFGGGVHKDNFFPMFQSGSGKAVLLNKDSIQKARAVLEENVENAAGAKQPMFHTSTGRSVLVSKSSIDKARAVLGGRMIAHEGDVGGVDGMEQFPVSQAGSGNVEGPGRPANQSLIFQTSSGRPVLISKRYVERSRALLMDEDVKNIRQWDTGCQLPIFQTGLGRPVAVKHSSIKKASTILGDGDVKRSGNGHTGVCTTPFQFETPKSVLMSSSLIINGMTVTPEENTSVRAEKCFNDDGQLPLFQTGSGRSVTASKGSFKRASSVLEPRNIAKELEDESHLNDGYATSIFKTGLGKSILPTENSRERAQFVLEAKEAVKQAVISDIGAGFGENPMFHSGKQQFSPENDTSRPRASTPMEQGKFATKGYEDCGSPLPMFQTGSGKSVLVCESSMQKARAVLEEEEHYKLVKMDKKIAASASPLKTSHARTVNISSTGVSRAATLLGLEENTLSTQFFGHVSDKLGTEITVKRGNPEHMLDVASAHAISSGTHKGFIYPTENPTHMDKHQQFGFSKSSTSYVGEHSIRFSTAGGRSMAISVDALQRAKSLLGDSDLVVSPNGSIGRSLASAIENLPKPTISPKGDVSNLSYGTRAIGYAVPDTPVTKTSANQFHMGREYRPVNEIPKVPKPPSRCLSEGDNASNSKDKTQWHHMPAGPLVDITNYMATCSGNTDCLANGKRIIGGRNSVSPFKRPRSSRFITPIKNNKLSSAGESIVPPMQISPCRTMLSVRYPFQHQRKNYKEYFGGPPCFKYLTEHVTDDVKLMDARRAEKFRFQHMDTGAEEFQKMLLTCGASLSCATKEWVSNHYKWIVWKLASLERCYPTRVAGKFLTVDNVLEELKYRYSLDASLDVALLEQLEKRKLFVGQKLRVSGVVKLVVHINGTYRARWNDALGFCKHVGLPLAFRCIKVSGGRVPRTLVGITRIYPILYRERLPDGRFVVRSERMERKALELYHQRVSKITEDILFEQQENCDSTDDNEEGATICKMLEHAAEPEFILAGMTPEQLKCFSSYIEKQKIVKQNEVSEKVEKALVVAGLSSRDVTPFLKVRVIGLVNKHSASTSSNKEGLITIWNPTEMQKDNLVEGQAYSVMGLVPSNYCTEIMYLHARGSSTTWKPLASAQTTDFKPFFTPRRAIELLKFDGSKFVSGQGCEEQDCLLAVSFSSATTDEDSTLFSYTLSGNTVGFSNLVKRQKDETRQVWVAEATESSSYTLSNEIPRKSHLKEAAVLAERWASRSYHKIQELKERVLCIVGNAGV

SEQ ID NO: 225394 - protein, 1221 aa, Zea Mays
MDGLAQSVNTAGLFSTGSGRPLAVSQRAVRRASALVGEEVDEATDNNNKKRSGVHKDNFFPMFQSGSGKAVLLNKDSIQKARAVLEENVENAAGAKQPMFHTSTGRSVLVSKSSIDKARAVLGGRMIAHEGNVEGPGRPANQSLIFQTSSGRPVLISKRYVERSRALLMDEDVKNIRQWDTGCQLPIFQTGLGRPVAVKHSSIKKASTILGDGDVKRSGNGHTGVCTTPFQFETPKSVLMSSSLIINGMTVTPEENTSVREKCFNDDGQLPLFQTGSGRSVTASKGSFKRASSVLEPRNIAKELEDESHLNDGYATSIFKTGLGKSILPTENSRERAQFVLEAKEAVKQAVISDIGAGFGENPMFHSGKQQFSPENDTSRPRASTPMEQGKFATKGYEDCGSPLPMFQTGSGKSVLVCESSMQKARAVLEEEEHYKLVKMDKKIAASASPLKTSHARTVNISSTGVSRAATLLGLEENTLSTQFFGHVSDKLGTEITVKRGNPEHMLDVASAHAISSGTHKGFIYPTENPTHMDKHQQFGFSKSSTSYVGEHSIRFSTAGGRSMAISVDALQRAKSLLGDSDLVVSPNGSIGRSLASAIENLPKPTISPKGDVSNLSYGTRAIGYAVPDTPVTKTSANQFHMGREYRPVNEIPKVPKPPSRCLSEGDNASNSKDKTQWHHMPAGSGNTDCLANGKRIIGGRNSVSPFKRPRSSRWVSNHYKWIVWKLASLERCYPTRVAGKFLTVDNVLEELKYRYSLDASLDVALLEQLEKRKLFVGQKLRIWGASLCGWSGPVSFHEVSGVVKLVVHINGTYRARWNDALGFCKHVGLPLAFRCIKVSGGRVPRTLVGITRIYPILYRERLPDGRFVVRSERMERKALELYHQRVSKITEDILFEQQENCDSTDDNEEGATICKMLEHAAEPEFILAGMTPEQLKCFSSYIEKQKIVKQNEVSEKVEKALVVAGLSSRDVTPFLKVRVIGLVNKHSASTSSNKEGLITIWNPTEMQKDNLVEGQAYSVMGLVPSNYCTEIMYLHARGSSTTWKPLASAQTTDFKPFFTPRRAIELLKFGEVPISSEFDIAGLILYVGNTYLCNNKKKQWLFLTDGSKFVSGQGCEEQDCLLAVSFSSATTDEDSTLFSYTLSGNTVGFSNLVKRQKDETRQVWVAEATESSSYTLSNEIPRKSHLKEAAVLAERWASRSYHKIQELKERVLCIVGNAGV

SEQ ID NO: 225395 - protein, 1445 aa, Zea Mays
MDGLAQSVNTAGLFSTGSGRPLAVSQRAVRRASALVGEEVDEATDNNNKKRKKPFGCDAGLEGELANLHVPFGGGVHKDNFFPMFQSGSGKAVLLNKDSIQKARAVLEENVENAAGAKQPMFHTSTGRSVLVSKSSIDKARAVLGGRMIAHEGNVEGPGRPANQSLIFQTSSGRPVLISKRYVERSRALLMDEDVKNILFTSLCEGQWDTGCQLPIFQTGLGRPVAVKHSSIKKASTILGDGDVKRSGNGHTGVCTTPFQFETPKSVLMSSSLIINGMTVTPEENTSVRAEKCFNDDGQLPLFQTGSGRSVTASKGSFKRASSVLEPRNIAKELEDESHLNDGYATSIFKTGLGKSILPTENSRERAQFVLEAKEAVKQVISDIGAGFGENPMFHSGKQQFSPENDTSRPRASTPMEQGKFATKGYEDCGSPLPMFQTGSGKSVLVCESSMQKARAVLEEEEHYKLVKMDKKIAASASPLKTSHARTVNISSTGVSRAATLLGLEENTLSTQFFGHVSDKLGTEITVKRGNPEHMLDVASAHAISSGTHKGFIYPTENPTHMDKHQQFGFSKSSTSYVGEHSIRFSTAGGRSMAISVDALQRAKSLLGDSDLVVSPNGSIGRSLASAIENLPKPTISPKGDVSNLSYGTRAIGYAVPDTPVTKTSANQFHMGREYRPVNEIPKVPKPPSRCLSEGDNASNSKDKTQWHHMPAGPLVDITNYMATCSGNTDCLANGKRIIGGRNSVSPFKRPRSSRFITPIKNNKLSSAGESIVPPMQISPCRTMLSVRYPFQHQRKNYKEYFGGPPCFKYLTEHVTDDVKLMDARRAEKFRFQHMDTGAEEFQKMLLTCGASLSCATKEWVSNHYKWIVWKLASLERCYPTRVAGKFLTVDNVLEELKYRYDREVNHGHRSAIKKILEGNSSPSLMMVLCISAIYSCPYQNNNKLEVNKVDTNEDNSGNQSFSATNRNMSANIELTDGWYSLDASLDVALLEQLEKRKLFVGQKLRIWGASLCGWSGPVSFHEVSGVVKLVVHINGTYRARWNDALGFCKHVGLPLAFRCIKVSGGRVPRTLVGITRIYPILYRERLPDGRFVVRSERMERKALELYHQRVSKITEDILFEQQENCDSTDDNEEGATICKMLEHAAEPEFILAGMTPEQLKCFSSYIEKQKIVKQNEVSEKVEKALVVAGLSSRDVTPFLKVRVIGLVNKHSASTSSNKEGLITIWNPTEMQKDNLVEGQAYSVMGLVPSNYCTEIMYLHARGSSTTWKPLASAQTTDFKPFFTPRRAIELLKFGEVPISSEFDIAGLILYVGNTYLCNNKKKQWLFLTDGSKFVSGQGCEEQDCLLAVSFSSATTDEDSTLFSYTLSGNTVGFSNLVKRQKDETRQVWVAEATESSSYTLSNEIPRKSHLKEAAVLAERWASRSYHKIQELKERVLCIVGNAGV

SEQ ID NO: 225396 - protein, 1459 aa, Zea Mays
MPSKWQVWGQPDGSIVWLPVSDAPPNPPRPGPLRPAPRHPPLPDEAPIEETLCPDTAGGCRISSMADLLLQAREQLIEGDAMDGLAQSVNTAGLFSTGSGRPLAVSQRAVRRASALVGEEVDEATDNNNKKRKKPFGCDAGLEGELANLHVPFGGGVHKDNFFPMFQSGSGKAVLLNKDSIQKARAVLEENVENAAGAKQPMFHTSTGRSVLVSKSSIDKARAVLGGRMIAHEGDVGGVDGMEQFPVSQAGSGNVEGPGRPANQSLIFQTSSGRPVLISKRYVERSRALLMDEDVKNIRQWDTGCQLPIFQTGLGRPVAVKHSSIKKASTILGDGDVKRSGNGHTGVCTTPFQFETPKSVLMSSSLIINGMTVTPEENTSVRAEKCFNDDGQLPLFQTGSGRSVTASKGSFKRASSVLEPRNIAKELEDESHLNDGYATSIFKTGLGKSILPTENSRERAQFVLEAKEAVKQAVISDIGAGFGENPMFHSGKQQFSPENDTSRPRASTPMEQGKFATKGYEDCGSPLPMFQTGSGKSVLVCESSMQKARAVLEEEEHYKLVKMDKKIAASASPLKTSHARTVNISSTGVSRAATLLGLEENTLSTQFFGHVSDKLGTEITVKRGNPEHMLDVASAHAISSGTHKGFIYPTENPTHMDKHQQFGFSKSSTSYVGEHSIRFSTAGGRSMAISVDALQRAKSLLGDSDLVVSPNGSIGRSLASAIENLPKPTISPKGDVSNLSYGTRAIGYAVPDTPVTKTSANQFHMGREYRPVNEIPKVPKPPSRCLSEGDNASNSKDKTQWHHMPAGPLVDITNYMATCSGNTDCLANGKRIIGGRNSVSPFKRPRSSRFITPIKNNKLSSAESIVPPMQISPCRTMLSVRYPFQHQRKNYKEYFGGPPCFKYLTEHVTDDVKLMDARRAEKFRFQHMDTGAEEFQKMLLTCGASLSCATKEWVSNHYKWIVWKLASLERCYPTRVAGKFLTVDNVLEELKYRYSLDASLDVALLEQLEKRKLFVGQKLRIWGASLCGWSGPVSFHEVSGVVKLVVHINGTYRARWNDALGFCKHVGLPLAFRCIKVSGGRVPRTLVGITRIYPILYRERLPDGRFVVRSERMERKALELYHQRVSKITEDILFEQQENCDSTDDNEEGATICKMLEHAAEPEFILAGMTPEQLKCFSSYIEKQKIVKQNEVSEKVEKALVVAGLSSRDVTPFLKVRVIGLVNKHSASTSSNKEGLITIWNPTEMQKDNLVEGQAYSVMGLVPSNYCTEIMYLHARGSSTTWKPLASAQTTDFKPFFTPRRAIELLKFGEVPISSEFDIAGLILYVGNTYLCNNKKKQWLFLTDGSKFVSGQGCEEQDCLLAVSFSSATTDEDSTLFSYTLSGNTVGFSNLVKRQKDETRQVWVAEATESSSYTLSNEIPRKSHLKEAAVLAERWASRSYHKIQELKERVLCIVGNAGV

SEQ ID NO: 225397 - protein, 1407 aa, Zea Mays
MPSKWQVWGQPDGSIVWLPVSDAPPNPPRPGPLRPAPRHPPLPDEAPIEETLCPDTAGGCRISSMADLLLQAREQLIEGDAMDGLAQSVNTAGLFSTGSGRPLAVSQRAVRRASALVGEEVDEATDNNNKKRKKPFGCDAGLEGELANLHVPFGGGVHKDNFFPMFQSGSGKAVLLNKDSIQKARAVLEENVENAAGAKQPMFHTSTGRSVLVSKSSIDKARAVLGGRMIAHEGDVGGVDGMEQFPVSQAGSGNVEGPGRPANQSLIFQTSSGRPVLISKRYVERSRALLMDEDVKNIRQWDTGCQLPIFQTGLGRPVAVKHSSIKKASTILGDGDVKRSGNGHTGVCTTPFQFETPKSVLMSSSLIINGMTVTPEENTSVREKCFNDDGQLPLFQTGSGRSVTASKGSFKRASSVLEPRNIAKELEDESHLNDGYATSIFKTGLGKSILPTENSRERAQFVLEAKEAVKQAVISDIGAGFGENPMFHSGKQQFSPENDTSRPRASTPMEQGKFATKGYEDCGSPLPMFQTGSGKSVLVCESSMQKARAVLEEEEHYKLVKMDKKIAASASPLKTSHARTVNISSTGVSRAATLLGLEENTLSTQFFGHVSDKLENPTHMDKHQQFGFSKSSTSYVGEHSIRFSTAGGRSMAISVDALQRAKSLLGDSDLVVSPNGSIGRSLASAIENLPKPTISPKGDVSNLSYGTRAIGYAVPDTPVTKTSANQFHMGREYRPVNEIPKVPKPPSRCLSEGDNASNSKDKTQWHHMPAGPLVDITNYMATCSGNTDCLANGKRIIGGRNSVSPFKRPRSSRFITPIKNNKLSSAGESIVPPMQISPCRTMLSVRYPFQHQRKNYKEYFGGPPCFKYLTEHVTDDVKLMDARRAEKFRFQHMDTGAEEFQKMLLTCGASLSCATKEWVSNHYKWIVWKLASLERCYPTRVAGKFLTVDNVLEELKYRYSLDASLDVALLEQLEKRKLFVGQKLRVSGVVKLVVHINGTYRARWNDALGFCKHVGLPLAFRCIKVSGGRVPRTLVGITRIYPILYRERLPDGRFVVRSERMERKALELYHQRVSKITEDILFEQQENCDSTDDNEEGATICKMLEHAAEPEFILAGMTPEQLKCFSSYIEKQKIVKQNEVSEKVEKALVVAGLSSRDVTPFLKVRVIGLVNKHSASTSSNKEGLITIWNPTEMQKDNLVEGQAYSVMGLVPSNYCTEIMYLHARGSSTTWKPLASAQTTDFKPFFTPRRAIELLKFGEVPISSEFDIAGLILYVGNTYLCNNKKKQWLFLTDGSKFVSGQGCEEQDCLLAVSFSSATTDEDSTLFSYTLSGNTVGFSNLVKRQKDETRQVWVAEATESSSYTLSNEIPRKSHLKEAAVLAERWASRSYHKIQELKERVLCIVGNAGV

SEQ ID NO: 225398 - protein, 1515 aa, Zea Mays
MPSKWQVWGQPDGSIVWLPVSDAPPNPPRPGPLRPAPRHPPLPDEAPIEETLCPDTAGGCRISSMADLLLQAREQLIEGDAMDGLAQSVNTAGLFSTGSGRPLAVSQRAVRRASALVGEEVDEATDNNNKKRSGVHKDNFFPMFQSGSGKAVLLNKDSIQKARAVLEENVENAAGAKQPMFHTSTGRSVLVSKSSIDKARAVLGGRMIAHEGDVGGVDGMEQFPVSQAGSGNVEGPGRPANQSLIFQTSSGRPVLISKRYVERSRALLMDEDVKNIRQWDTGCQLPIFQTGLGRPVAVKHSSIKKASTILGDGDVKRSGNGHTGVCTTPFQFETPKSVLMSSSLIINGMTVTPEENTSVREKCFNDDGQLPLFQTGSGRSVTASKGSFKRASSVLEPRNIAKELEDESHLNDGYATSIFKTGLGKSILPTENSRERAQFVLEAKEAVKQVISDIGAGFGENPMFHSGKQQFSPENDTSRPRASTPMEQGKFATKGYEDCGSPLPMFQTGSGKSVLVCESSMQKARAVLEEEEHYKLVKMDKKIAASASPLKTSHARTVNISSTGVSRAATLLGLEENTLSTQFFGHVSDKLGTEITVKRGNPEHMLDVASAHAISSGTHKGFIYPTENPTHMDKHQQFGFSKSSTSYVGEHSIRFSTAGGRSMAISVDALQRAKSLLGDSDLVVSPNGSIGRSLASAIENLPKPTISPKGDVSNLSYGTRAIGYAVPDTPVTKTSANQFHMGREYRPVNEIPKVPKPPSRCLSEGDNASNSKDKTQWHHMPAGPLVDITNYMATCSGNTDCLANGKRIIGGRNSVSPFKRPRSSRFITPIKNNKLSSAGESIVPPMQISPCRTMLSVRYPFQHQRKNYKEYFGGPPCFKYLTEHVTDDVKLMDARRAEKFRFQHMDTGAEEFQKMLLTCGASLSCATKEWVSNHYKWIVWKLASLERCYPTRVAGKFLTVDNVLEELKYRYDREVNHGHRSAIKKILEGNSSPSLMMVLCISAIYSCPYQNNNKLEVNKVDTNEDNSGNQSFSATNRNMSANIELTDGWYSLDASLDVALLEQLEKRKLFVGQKLRIWGASLCGWSGPVSFHEVSGVVKLVVHINGTYRARWNDALGFCKHVGLPLAFRCIKVSGGRVPRTLVGITRIYPILYRERLPDGRFVVRSERMERKALELYHQRVSKITEDILFEQQENCDSTDDNEEGATICKMLEHAAEPEFILAGMTPEQLKCFSSYIEKQKIVKQNEVSEKVEKALVVAGLSSRDVTPFLKVRVIGLVNKHSASTSSNKEGLITIWNPTEMQKDNLVEGQAYSVMGLVPSNYCTEIMYLHARGSSTTWKPLASAQTTDFKPFFTPRRAIELLKFGEVPISSEFDIAGLILYVGNTYLCNNKKKQWLFLTDGSKFVSGQGCEEQDCLLAVSFSSATTDEDSTLFSYTLSGNTVGFSNLVKRQKDETRQVWVAEATESSSYTLSNEIPRKSHLKEAAVLAERWASRSYHKIQELKERVLCIVGNAGV

SEQ ID NO: 225399 - protein, 1498 aa, Zea Mays
MPSKWQVWGQPDGSIVWLPVSDAPPNPPRPGPLRPAPRHPPLPDEAPIEETLCPDTAGGCRISSMADLLLQAREQLIEGDAMDGLAQSVNTAGLFSTGSGRPLAVSQRAVRRASALVGEEVDEATDNNNKKRSGVHKDNFFPMFQSGSGKAVLLNKDSIQKARAVLEENVENAAGAKQPMFHTSTGRSVLVSKSSIDKARAVLGGRMIAHEGNVEGPGRPANQSLIFQTSSGRPVLISKRYVERSRALLMDEDVKNIRQWDTGCQLPIFQTGLGRPVAVKHSSIKKASTILGDGDVKRSGNGHTGVCTTPFQFETPKSVLMSSSLIINGMTVTPEENTSVRAEKCFNDDGQLPLFQTGSGRSVTASKGSFKRASSVLEPRNIAKELEDESHLNDGYATSIFKTGLGKSILPTENSRERAQFVLEAKEAVKQAVISDIGAGFGENPMFHSGKQQFSPENDTSRPRASTPMEQGKFATKGYEDCGSPLPMFQTGSGKSVLVCESSMQKARAVLEEEEHYKLVKMDKKIAASASPLKTSHARTVNISSTGVSRAATLLGLEENTLSTQFFGHVSDKLGTEITVKRGNPEHMLDVASAHAISSGTHKGFIYPTENPTHMDKHQQFGFSKSSTSYVGEHSIRFSTAGGRSMAISVDALQRAKSLLGDSDLVVSPNGSIGRSLASAIENLPKPTISPKGDVSNLSYGTRAIGYAVPDTPVTKTSANQFHMGREYRPVNEIPKVPKPPSRCLSEGDNASNSKDKTQWHHMPAGPLVDITNYMATCSGNTDCLANGKRIIGGRNSVSPFKRPRSSRFITPIKNNKLSSAGESIVPPMQISPCRTMLSVRYPFQHQRKNYKEYFGGPPCFKYLTEHVTDDVKLMDARRAEKFRFQHMDTGAEEFQKMLLTCGASLSCATKEWVSNHYKWIVWKLASLERCYPTRVAGKFLTVDNVLEELKYRYDREVNHGHRSAIKKILEGNSSPSLMMVLCISAIYSCPYQNNNKLEVNKVDTNEDNSGNQSFSATNRNMSANIELTDGWYSLDASLDVALLEQLEKRKLFVGQKLRIWGASLCGWSGPVSFHEVSGVVKLVVHINGTYRARWNDALGFCKHVGLPLAFRCIKVSGGRVPRTLVGITRIYPILYRERLPDGRFVVRSERMERKALELYHQRVSKITEDILFEQQENCDSTDDNEEGATICKMLEHAAEPEFILAGMTPEQLKCFSSYIEKQKIVKQNEVSEKVEKALVVAGLSSRDVTPFLKVRVIGLVNKHSASTSSNKEGLITIWNPTEMQKDNLVEGQAYSVMGLVPSNYCTEIMYLHARGSSTTWKPLASAQTTDFKPFFTPRRAIELLKFGEVPISSEFDIAGLILYVGNTYLCNNKKKQWLFLTDGSKFVSGQGCEEQDCLLAVSFSSATTDEDSTLFSYTLSGNTVGFSNLVKRQKDETRQVWVAEATESSSYTLSNEIPRKSHLKEAAVLAERWASRSYHKIQELKERVLCIVGNAGV

SEQ ID NO: 225400 - protein, 1519 aa, Zea Mays
MPSKWQVWGQPDGSIVWLPVSDAPPNPPRPGPLRPAPRHPPLPDEAPIEETLCPDTAGGCRISSMADLLLQAREQLIEGDAMDGLAQSVNTAGLFSTGSGRPLAVSQRAVRRASALVGEEVDEATDNNNKKRKKPFGCDAGLEGELANLHVPFGGGVHKDNFFPMFQSGSGKAVLLNKDSIQKARAVLEENVENAAGAKQPMFHTSTGRSVLVSKSSIDKARAVLGGRMIAHEGNVEGPGRPANQSLIFQTSSGRPVLISKRYVERSRALLMDEDVKNIRQWDTGCQLPIFQTGLGRPVAVKHSSIKKASTILGDGDVKRSGNGHTGVCTTPFQFETPKSVLMSSSLIINGMTVTPEENTSVRAEKCFNDDGQLPLFQTGSGRSVTASKGSFKRASSVLEPRNIAKELEDESHLNDGYATSIFKTGLGKSILPTENSRERAQFVLEAKEAVKQVISDIGAGFGENPMFHSGKQQFSPENDTSRPRASTPMEQGKFATKGYEDCGSPLPMFQTGSGKSVLVCESSMQKARAVLEEEEHYKLVKMDKKIAASASPLKTSHARTVNISSTGVSRAATLLGLEENTLSTQFFGHVSDKLGTEITVKRGNPEHMLDVASAHAISSGTHKGFIYPTENPTHMDKHQQFGFSKSSTSYVGEHSIRFSTAGGRSMAISVDALQRAKSLLGDSDLVVSPNGSIGRSLASAIENLPKPTISPKGDVSNLSYGTRAIGYAVPDTPVTKTSANQFHMGREYRPVNEIPKVPKPPSRCLSEGDNASNSKDKTQWHHMPAGPLVDITNYMATCSGNTDCLANGKRIIGGRNSVSPFKRPRSSRFITPIKNNKLSSAGESIVPPMQISPCRTMLSVRYPFQHQRKNYKEYFGGPPCFKYLTEHVTDDVKLMDARRAEKFRFQHMDTGAEEFQKMLLTCGASLSCATKEWVSNHYKWIVWKLASLERCYPTRVAGKFLTVDNVLEELKYRYDREVNHGHRSAIKKILEGNSSPSLMMVLCISAIYSCPYQNNNKLEVNKVDTNEDNSGNQSFSATNRNMSANIELTDGWYSLDASLDVALLEQLEKRKLFVGQKLRIWGASLCGWSGPVSFHEVSGVVKLVVHINGTYRARWNDALGFCKHVGLPLAFRCIKVSGGRVPRTLVGITRIYPILYRERLPDGRFVVRSERMERKALELYHQRVSKITEDILFEQQENCDSTDDNEEGATICKMLEHAAEPEFILAGMTPEQLKCFSSYIEKQKIVKQNEVSEKVEKALVVAGLSSRDVTPFLKVRVIGLVNKHSASTSSNKEGLITIWNPTEMQKDNLVEGQAYSVMGLVPSNYCTEIMYLHARGSSTTWKPLASAQTTDFKPFFTPRRAIELLKFGEVPISSEFDIAGLILYVGNTYLCNNKKKQWLFLTDGSKFVSGQGCEEQDCLLAVSFSSATTDEDSTLFSYTLSGNTVGFSNLVKRQKDETRQVWVAEATESSSYTLSNEIPRKSHLKEAAVLAERWASRSYHKIQELKERVLCIVGNAGV

SEQ ID NO: 225401 - protein, 144 aa, Zea Mays
MRKMNIFNEAKVYTWKIEDFSALKNPSHSPEFEIAGYTWIISLNPSYDGNSLSLFLKMKKTNDVPKGSGSLVEFALSIKDQENGKDRKYPGRCQFSSKHHRWGWKKFISLEDFKDSSKGYLIKGKCCIEAEVAISGSSKTEYSM

SEQ ID NO: 225402 - protein, 205 aa, Zea Mays
MSFTGTQDKCKACDKTVHFIDLLTADGVSYHKTCFKCSHCKGVLSISSYSSMDGVLYCKTHFEQLFKETGNFSKKFQGGGGASSNKNDPAPSKLSSAFSGTQDKCAACQKTVYPLEKMTLEGESYHKGCFKCSHGGCILTTSSYAALNGILYCKIHFSQLFKEKGSYNHLIETAQTKKNEAAEAAEEPSVDACAAAEAEASAESA

SEQ ID NO: 225403 - protein, 853 aa, Zea Mays
MPTIIIATHKQQMILLSSKEQTNIQTVPGYGSSSYYYQNNTWNGGSTGNTFAQSYQNYSSSDTNAQQSSTSVPANSLPYQQQYNQWPYYYNQSVPSASSNPVAGNSTTDNLTGNMPSGYSYPSSQPPPPGTTSWKSNSVASVAPPMQVPGVPGQQSQYGNQAEGHYNQGPGVQWSQNHYAYQTQPYPQKTNSNHPQLSNHEDQQETVYSNSPSTNLSSNHVSENFKPNLQDSVTMDTSSEGKIQVPINPQIAPGFSMVIPKNEKKHSGLDLSKKPAYVSVSMPTNDAKATQVGLDARLPFSLRNYATRNLNRCKNDAQREACRSIMNEITKKAFAEGTLLTKNWDTEPLFPLPESTVGMTGTSSVNNLSPFSSVSTPRKRVKSRWEPVVDENVTNKVEQIAKGLIGSNVHSTSDPKNRMGSSWDHRKFLQSSQAPSNKVNQRSAKKQKMGSNLSQIQNGNASSDSEKEHDLTKYYASATALANSPEEKKRREHRSKRFEKSKDSSFKSRNVSANKDAMTNLRARRAILSFRTRTYEGGTLAVEDMDWDALTVKGTCQEIEKRYLRLTEAPDPAKIRPEDVLEKALAMVETSQKNYLYKCDQLKSIRQDLTVQRIQNELTIKVYETHARLAMQAGDLHEFNQCQSQLKRLYAQGIKGCYFEFSAYNLLCVMLHSNNKRDLLSSMASLSKEAKQDAAVKHALAVHASVLSGNYVLFFKLYKKAPNLNSCLMDLYVERMRFEAMKCMSRSYRPTVPVGYVAQILGFMRTDTGCATNGDDGLEECEKWLKAHGIVLSEGNSGELQIDMKASSSTLYMPEPENAVAHGDASLAVDDFLARTDGHLKRCSSDEPTVDTP

SEQ ID NO: 225404 - protein, 212 aa, Zea Mays
MDLPPGAGRRTTYSLLPQFPDDAAAPAPAPANILQRQSSGSSYGAGSSISTSSDYPFHLQPPASAAGVAPPGSAAAPPGAAGSPCKSWAQQAEETYQLQLALALRLCADAACAADPGFLDPGDSGSGRGSGNGRAFPLAQPAPSAESLSHRFWVNGSLSYNSTIPDGFYLIHGMDPFVWSLCTDVQEENHIPSMESLKYVGELCFQHSFQFC

SEQ ID NO: 225405 - protein, 396 aa, Zea Mays
MDASKLRELRDFVEACKKNPSLLADPNLSFFRDYLQSLGAKIPAAAPSFESPKVTLPIHLLLYPPRRSSMDDIDDDGDDDDDLDMRDPTPERDELDEEIVESDLELEGEIVQSDHDDPPQKMGNPSVEVTEENRDASQEAKGKAMEAISEGKLEDAIEHLTNAIVLNPLSAIMYGTRASVFIKMKKPAAAIRDANAALEINPDSAKGYKTRGMAYAMLGKWEEAAHDLHTASNMDYDEEINAVLKKVEPNAHKIVEHRRKYERLRKEREEKRAQRDRLRQRAEAQAAYDKAKRKEQSSSRSSGGASPRGFPGGMPGGGFPRGMPGGGFPGGGMPGGFPGGGMPGGFPGGVPGNVDMSKILNDPDLMAAFSDPEVMAALQDGMFLVSATNLVMLVYF

SEQ ID NO: 225406 - protein, 105 aa, Zea Mays
MSLEELLPPNQQKYSTIIMLRSSLVISTLLIALSVPFFGLVMALVGSLFAMLVTYILPCACFLAILKTKVGWHQIAACSFIIVVGVCCAYVGTYSSLSKIIQNYA

SEQ ID NO: 225407 - protein, 379 aa, Zea Mays
MVEGFVRGSSQFKELAQAYEVLSDPEKREIYDQYGEDALKEGMGGGGGMHDPFDIFQSFFGGGSPFGGGGSSRGRRQRRGEDVVHPLKVSLEDLYNGTSKKLSLSRSVLCSKCNGKGSKSGASSRCAGCQGSGFKVQIRQLGPGMIQQMQHPCNECKGSGETISDKDRCPQCKGDKVVQEKKVLEVFVEKGMQNGQKITFPGEADEAPDTVTGDIIFVLQQKEHPKFKRKGDDLFYEHTLTLTESLCGFQFVVTHLDNRQLLIKSNPGEVVKPDSFKAINDEGMPMYQRPFMKGKLYIHFSVEFPDSLSPEQCKALEAVLPPKPVSQYTDMELDECEETMPYDVNIEAEMRRRQQQHQEAYDEDEDMPGGAQRVQCAQQ

SEQ ID NO: 225408 - protein, 1881 aa, Zea Mays
MASGRAATSSSILVNAAGTSKTLSASLWWDSFVVLSDDLDRATAGPSVPDALAKRIKSHHAWLRGSVSMFGKPNDASRSALEVGEVAVGERRLTVKPELKEAALRASKCLNLDEVQSYILVKRSSEVSPTIRDADAEEFLHLVSVRYYLERQCLLKCIRRIFVHASDVSDSTDPIRDEASLLISEEIDRKLISIIEDSFSTASSVKAEAEFTISSLEETLIEVNLILDILFLTFYDNFSRCNGRQWITLCSIFKDILCGSYGVGKFVASVEAKNSFHYAKAQLLLILIETLDFENLLRMIHDEVPLSGGCSAFSVGDILEMDVEISKLPEFSLVESGPLILAWAVFLCLVLSLPESNTNLEIDHTSYARRAFEFAPFNYLLGVLCSSIFRESDGPVSGYRGILRTFISAFIASYEKEHSSFDMISSILCEVYDGEESLCMQFWDKDSFVDGPIRYNYLERMNGVTTIYTIPCVADGVGYGHQIESHHPVSIPSIEGITIPQGTHGYILKVLQEDTTLVRWEFPHSGVSFLLITLAQELHSCNYKKACDIIGLLYRMVSSNKDLCFALMHVDKSLAVQTSNNLGQIEKHVRIDIAKVFCNSIFKYVRDVNNADILSKTFGLLAEMMKCAPYHVFDAAFECNIFTSQLSSPSSDWLLSGALARMLFAAYEGNGDCSSLTSSVLDFTTQVLRKGADADDIISPLIVFSIKYIMINHVNWKHKECSRWKTTLRVFELVKSCLQVKPFSSKLGGIIWEILLYDSSVHGVLWSILSVLTRLLHDSYRSNYHGLKDIEDIQLVLCNGLDIIYHILSNLPEGMQVAAARAFSALCFIAYKAQPQLMENASFTSDVSEIRRLESNISCILDEDDKNNDCLVVAVFNLLTSAARYQPAFLISLIEQSTKSTDHNASTNDRDNRVLVTSKSNARLVDQILDYIDRSIELMNRSPLVLLSILDLLKALWESGIRFLFILEKLRSSVTFWDNLSRCIRATLDISPIDNIDAIDEKFSLRYHCQGKIFEIMSHELFLQGKLLTETSNTVQDDPKGQKEHKSGPCRISVVLKWFDNAILADLVSNLSSNAYKKELHHAKVAACLCIIHLITKLSTGDTGSLSFSFMKKIQIISTKLLQHHAFLALLSQYSLHGYSGEQELNNLVLNDLYYLIRGELEGRQISSGPFQELLSFLLGFRIFEHNPLEQLQNTYLMANDKFLFDVEHIHDELGVDLWTDSDKRSKEVAKKMLDIMSKANLMKYYADAKLSALMSFLKFLSVYKGAISNKNLDLPDGGISVAATQSAIKCACKSFESTVDSLLPQAHTDEVLFPLLSGQVELLLTLARILFHQAKNKKSSHLCPDIVLLMKTSGASTCLFVDLMPSAHALKQPVKTLLVLLLSSYEFMYSKVDIKDLPNDINIFGELALLSVSLLPILCKLAENRECSDLAVASMDLILKGSVPSNLWMPILQKHFHLQTILHKCQNGDLLSTQVILNFLLTLGRTKDGAKVLQSANIFAFLKLLLSQLSLDDSCLRNSLSAQVKDVNLWGLGLGIVASLNHCLDDDISHNNVVSNTISFLSGHVPLVSSYLSTQSATTHQSKKRALSQKSQTSLSALSLTENILILLCILAKYHFPRDTGKKEVDSELREIIIHLLAFISKGSVKTGNASKWNSSFFCPAVIKEEVALNEKPPLICSKYGWFRFAASCTLSTAGVSVSPSAALSVVRRDKTSGDSDSIRQTRFTEILAVQIYRIAFLIMKFLCSQAKEAVKRAEELEFLDLAHFPELPMPDILHGLQDQVVCIVTEIFEANGSSTLNPETEKVCQLLLVTLETSLYMELCVSQSCGIRPVLGRLEDFCKGIKAMLQAIEKHSSFEPFVRSLTEITSLLYPGLLHNNLLM

SEQ ID NO: 225409 - protein, 241 aa, Zea Mays
MGFSEPRYVGHMAFRGLAEYADGQPFEPKVNYIYGRGVRAGFVPVSATKVYWFICFNRQDPGPKITDPTALKTEALELVRGWPSDLLAVMRSTPEGAVVRTPLVDRWLWPGLAPAASRGGRVVLAGDAWHPMTPNLGQGACCALEDAIVLARRLADAGADGAQAAAAMRAYEAERWARVFPLTARAGLVGALVQWENAAVCAARDGVVIPRLVRLGPFLEHTNFECDLLEPAPGVAMTPAH

SEQ ID NO: 225410 - protein, 430 aa, Zea Mays
MNAILGKLTASTQELSYYHSEADIGVYLSYCDFQPYVRSALACTKELNKWFSKKFEKGPLQLVVQDDKLRGDPVNSHHFVVELSRINSIFAKSKRQYIEAQVEYAKEEAILSVLRTQLASQQSYIHQDSHSLRRKNSELAEELKDLSHQVQEYLSETVTGLCADLARLSGANILEGDHNLKLLRQDCYISHQKKFINHLVNQLAAHLFLKIACQLEEQIKISSAYSFLKAVELELQGYFSAFDGRLGRYNLIDQAASEMFEEGSVDDSDSYLHAVRDILSSHSSSQATSPEYVSSYGLIGQITELQDELQYLQHETENVLPRERGRCTDELCRMIQTLEQILAVSLSDEQPKLTPWPLAHSLEDLEMVSQQVSASVSEVTLARDEKAEKLKQPSRNAQQERQVFSDFFCHPERLENRVEELLSRFRALPE

SEQ ID NO: 225411 - protein, 537 aa, Zea Mays
MEGKLLKGEDLDFAFDRISAFSDNMENQEYIFLTEESLEDICESKLALRAEVSDLERQLASLEWRLDILTAQATTINQGKKSRSSANTRANGQLTGLDKMFAKRSLEMNAILGKLTASTQELSYYHSEADIGVYLSYCDFQPYVRSALACTKELNKWFSKKFEKGPLQLVVQDDKLRGDPVNSHHFVVELSRINSIFAKSKRQYIEAQVEYAKEEAILSVLRTQLASQQSYIHQDSHSLRRKNSELAEELKDLSHQVQEYLSETVTGLCADLARLSGANILEGDHNLKLLRQDCYISHQKKFINHLVNQLAAHLFLKIACQLEEQIKISSAYSFLKAVELELQGYFSAFDGRLGRYNLIDQAASEMFEEGSVDDSDSYLHAVRDILSSHSSSQATSPEYVSSYGLIGQITELQDELQYLQHETENVLPRERGRCTDELCRMIQTLEQILAVSLSDEQPKLTPWPLAHSLEDLEMVSQQVSASVSEVTLARDEKAEKLKQPSRNAQQERQVFSDFFCHPERLENRVEELLSRFRALPE

SEQ ID NO: 225412 - protein, 690 aa, Zea Mays
MAGPNEKAAAGGGGGERRKYPIHMEDYELYEEIGQGVSAIVYRALCKPLDEIVAVKVVDFERTNSDLNNIVREAQTMILIDHPNVVKAHCSFAKDQTLWVVMPYMAGGSCLHIMKSVHPTGFEEPIIATILREVLKGLEYLHHHGSIHRDVKAGNILVDSRGGIKLGDFGVSACLFDSGDRQRARNTFVGTPCWMAPEVMEQLHGYDFRADIWSFGITALELAHGHAPFSKYPPMKVLLMTLQNAPPGLDYERDKKFTRNFKQMVAMCLVKDPSKRPSAKKLLKQPFFKQARSTDFIARKLLEGLPGLGVRYQALKEKDQHLMAQKKMSDGKKEEISQDEYKRGISSWTFDMDDLRSQASLGTECEDSTLCKDSDISFYDLDSLQDQAPEGSHLLRDFSTKYDADIENDMTTKDKSAVSSPDQPASLVRNASMRGMPINGSFRKDNSTESFDLECQEKHLDIVPTSSSPERKFSFSSCSSNGLLLSKESSKQQTSIHNLDKCNGGHLHVSDETSSEAAPKTHKSAEDHDDRSKPPLIRGRFRVIPGHVDSKAQPPGLQKCHSMQTISRLPSLSIPSSAEVASTIIGGSFYMQLYSILQTNMLQRDQILNAMKQVSGCAMASPGVPSMASPCIPSTSRSTSPSGVPSVDRSMLEAAQEREKELLNEVLELQWRLLCTQDEVQKLKAKAAQH

SEQ ID NO: 225413 - protein, 64 aa, Zea Mays
MDVEWSFTKGRHTPTTLHSEIGSRSGANDVCSQSSLHSTRSAVDQERSRSFRMIKLLLHGFDAW

SEQ ID NO: 225414 - protein, 108 aa, Zea Mays
MDVEWSFTKGRHTPTTLHSEIGSRSGANDVCSQSSLHSTRSAVDQERSRSFSRDLFLFFPDGNMTCARTWKYPVECVDPRCYGKVLVAAAGRAIPSQPLTEYRMAVRI

SEQ ID NO: 225415 - protein, 108 aa, Zea Mays; identical to SEQ ID NO: 225414

SEQ ID NO: 225416 - protein, 246 aa, Zea Mays
MMMWFLTNPPTPSVIQIQSLDDLKWLPGDFSSRFKLKGVRDPRYTSALNHLRFYLPEVFPSLSKVLLLDHDVVVQNDLSGLWDLDMKGKVTGAVDTCTSSEGFRQLDSLIDFSNPSVFNELDPKACAFAFGMNIFDLNEWRKQGLSTTYHRWFQLGKSEKLWKAGSLPLGQVVFYNRTLPLDHRWHVLGLGHDSSIGRDELESASVIHYSGKLKPWLEISIPKYRGYWNRYLNYDNPHLQQCNIHG

SEQ ID NO: 225417 - protein, 526 aa, Zea Mays
MACSCTMRAGSRSTSPSTLGDSGACPCSLFPATEEVTSRFGHWLQNLFELIRMVHLSPPFIRKHLVVYQEMDSTIFLFLHGMAACWTGLLLTLKESTLLWMVRYLRSILNMLSTRFIGYPPIALQPSLGHFFSHVNEEWRKGYKTGVSHAISSKLSNVVVVSVSGGIHDYQIRSRLASLDGIVPSTHGFMVGSSSMKNVWLSMEHQSILWCNQLAVQVAHTLLSIIDPVDRQPFSSTQKRVFVFTKMLQSAVPQSLSSMTHVPASLSRNLPANENQDAGELHKKDSLSCPSSTEWTSDGLEKDLYIQSNSVTVLAMDGRRRWLDIKKLGSNGRGHFVFVTNLAPCSGVRIHLWPEKHHSPVQNELPASKKIVEVTSKMVQIPAGPAPKQVEPGSQTEQPPPSAFLLLSPGEMSGFRFMTISVAPRPTISGRPPPAASMAVGQFFSPEEGASSFSIGTIIRSSFAPKEIFLLEDHPLALNLSFSASLGLLPVTLSLKTAGCGIKNPGDQMEAERNSELLLLVCQSFF

SEQ ID NO: 225418 - protein, 958 aa, Zea Mays
MGGGGGFRGSCRVGAVLLFSAWVALAALSRLLRPVPNGCVMTYMYPTYIPIAATPRNISSDRYGLFLYHEGWKQIDFAKHIRGLRGVPVLFIPGNGGSYKQVRSLAAESFRAYQNGPLEPTFYQEASSSLPGDGLNNFSIPSRYGRMLDWFAVDLEGEHSAMDGQILEEHTEYVVYAIHRILDQYKESHLERSKGGAQSSPDLPSSVILVGHSMGGFVARAAVVHPNLRKSAVETILTLSSPHQYPPIALQPSLGHFFSHVNEEWRKGYKTGVSHAISSKLSNVVVVSVSGGIHDYQIRSRLASLDGIVPSTHGFMVGSSSMKNVWLSMEHQSILWCNQLAVQVAHTLLSIIDPVDRQPFSSTQKRVFVFTKMLQSAVPQSLSSMTHVPASLSRNLPANENQDAGELHKKDSLSCPSSTEWTSDGLEKDLYIQSNSVTVLAMDGRRRWLDIKKLGSNGRGHFVFVTNLAPCSGVRIHLWPEKHHSPVQNELPASKKIVEVTSKMVQIPAGPAPKQVEPGSQTEQPPPSAFLLLSPGEMSGFRFMTISVAPRPADPHCSYEVTSRASLSDAASRFFLLYSSEILGFMVAIMFFGIMRQTSAWECDSSMPSILSAIESNLGLPKAFMFLCFMPILVFCAFFIFTAEQKPPFGTFLLVTLICYIVANGFTILLILSSKLLLYVVAILHVFTKRRWQSWGNGVQSAFLGQFLSFSSFQSVKMLRNNPNIIVAVATLPLVCLVHPAIGLGLLLLSHAFHAHSNLCSFLAASFRSITQKKDLYKSKMGDGSVLLSKSKSDGLQQLLPMDDSPTASKSFTDSQLELFDYRHGVMILHLLSTLMFVPSLVAWLQRIGMGQNFPWFIDSAICVGVILHGLFGSQPNVSCCIFFKLPGRRGREIGLSFLYLVGGYYSFVSSMALAPYRALYAMATIGYICFISRILERRNMVRGDINSRRTRKHSHRH

SEQ ID NO: 225419 - protein, 163 aa, Zea Mays
MLTEALLPLFRQSSATSRILNVSSQLGLLNKVSDPSLRALLLDEDGLTEAGIEAMVSRFLAQVKDGTWGGQGWPKVWTDYSVSKLALNAYSRLLARRLQARGARVSVNCFCPGFTRTGMTKGWGKRTAEEAADVAARLALLAPAELPTGTFFKWCTPQLYSKL

SEQ ID NO: 225420 - protein, 307 aa, Zea Mays
MIVMKRIIASEITQQAQLQPFHFIPSGWHVPVTAIYNTRYGETEERQSELRKELHLRLGLPLDRPLLRISNALTFGGMGRRKKSMPRSGSSLLRDIHRELPSSGVSGGVMSLIDGSYEYYHYLHDGIDDNGWGCAYRSLQTIVSWYRLQQYSSIDVPSHREIQQVLVEIGDKDPSFIGSCEWIGAIELSFVLDKLLGVSCKVINVRSGDELPEKCRELARHFETQGTPVMIGGGVLAYTLLGVDYNGASGDCAFLILDPHYTGTDDLKKIVNGGWCGWKKSVDSKGRSFFLKDKFYNLLLPQRPNMV

SEQ ID NO: 225421 - protein, 896 aa, Zea Mays
MWDLSGNFFLSEDDIGKNRAVACVAKLQELNNAVLIYTLTEELTTEHLPKFQVVVFTDISLDKAFEFDDYCRNQQPPISFIKTEDGDLVVFSEVQGMTELNDGKPRTVMCAGPFSFCIEDTSNFGTYTKGGIVTQVKERKILKFKSLRDSIREPGNFPLSDCSKFTRPPLLHFAFIALDKFRKEFGRFPGVACGLDAQRFVEFTASINEATIDYKIEDELDENLLRLFASGSKAVLNPMATMFGGIVSQEAVKACSGKFHPLYRFFYFDSSESLPTHQLDPKDLKPLNSRYDAQISVFGSKLQKKLRDANVFVVGSGALGCEFLKNLALMGVSCSRKGKITITDDDVIEKSNLSRQFLFRDWNIGHPKSTVAATAASAINSCLHIDALQNRACLETEHVFHDAFWEILDVVINALDNVNARMYMDMRCLYFQKPLLESGTLGTKCNTQVVIPHLTENYGTSRDPPEKQAPMCTVHSFPHNIDHCLTWARSEFEGLLEKTPKEVNSFLSNPAQYAASMKKAGDAQARELLEHVCECLEKECCGTFDDCITWARLKFEDYFSNRVKQLTFTFPEDAATSMGAHFWCAPKRFPHPLEFSAADSSHIQFIMSASILRALSFGISIPDWAKDTDNLADAVSKVAVPEFKPKSGVKIETDVKAENISSASVDDAAVIEDLLSRLKACTKKLPPRFQMKPIQFEKDDDTNFHMDLIAGLANMRARNYGIQEVDKLKAKIIAGRIIPAIATSTAMATGLVCLELYKVLARGHPIEDYRNTFANLALPMLTTSEPLPPTVIKHGDMTWTVWDRWSIEGDITVAELLKWLSDKGLSAYSVSCGTSLLYNIMFTRHKDRLSKKIRDVAKEVAKVDIPEYRKHLDVVVACEDDNGKDVDIPLISIYFR

SEQ ID NO: 225422 - protein, 365 aa, Zea Mays
MIFDGHNGSGAAIYARENLLKNVLRAIPTCFCREEWLAVLPRALVAAFVKTDKDFQAVDETSGTTVTFVIIDEWVVTVASVGDSRCILESADGSIYFLSADHRFDSNPDEVKRVTACGSKVGKMDIVGGPEVGPLRCWPGGLCLSRSIGDLDVGECIIAVPHVKQVKLSNAGGRIIIASDGVWDDLTCEMALDCSRGFSSDVAANRIVNEATRPRGIRDDTTCIVIDILPPENIVPSPRKRPRRITFNNVFRKRHLDVPPETNRSEYAEPDVVEEIFEDGSPMLSKRLTTGYTLEKTFAPSSCAVCLVRLKSGQGISVHDNPLQYEKLQGWQGPFLCPSCHEKKEAMEGKRRPKGSSSNVFGHMC

SEQ ID NO: 225423 - protein, 189 aa, Zea Mays
MLVKFHEEMARPIQEATEFFNSMERQLGSTISDSNCEVAGSSEDEQDASWPEEIDPCAEDKELKHQLLRKYGGYLGGLRQEFSKRKKKGKLPKEARQKLLHWWELHYKWPYPSETEKMALAETTGLDPKQINNWFINQRKRHWKPASEDMPFAVMEGGFHVAQGTAALYMDRPAVPPFMADGGMYRLGS

SEQ ID NO: 225424 - protein, 212 aa, Zea Mays
MDSFGDLGGGGSSSSRAASAPFLQLPLPASTSSAQQQVLFPLPDGPQQQHHHHSSRIPLRQLLLLADPSSAAQHSASHRTKDMATVQGEMSSPAVDGDADAIKARIMSHPQYSALLAAYLDCQKVGAPPDVSDRLSAMAAANLDAQPGPISRRRGPTTTRADDPELDQFMEAYCNMLVKFHEEMARPIQEATEFFNSMERQLGSTISAAWML

SEQ ID NO: 225425 - protein, 173 aa, Zea Mays
MESLEHAMKRDAPIIAEYLGGAVNCDAYHMTDPRSDGLGVSSCIKQSLKDAGVAPEEVNYINAHATSTLAGDLAEVNAIKQVFKDPSGIKINATKSMIGHCLGAAGGLEAIATIKAITTGWVHPSINQFNPEEAVEFDTVPNVKKQHEVNVGISNSFGFGGHNSVVVFAPFKP

SEQ ID NO: 225426 - protein, 804 aa, Zea Mays
MDTFKSPLSAPSRQGLPQVSFDKKKTMERIGVDGDFIVAGNWKAVTAEHVLTKFENSRQGLLESLHQVEETIPEAVGSQITLIAQELEKAAFVLDQSEKEVGDEVNQLIQNESKSNGFLDENELELLHQIAVRVGITSSVAALTERRALRRLLERAHAEEDLKKESIAACLLQLIRKYSNIFKSETTDSTNSLCSSTPCSSRSNSGLIGMHRSLSSSTDLYGNCQSLEKQLPKVGSFSSKQMKGLSRSMPLPPEELRCPISLQLIYDPVVITSGQTYERACIEKWFDSGNTTCPKTRKQLSQLLRTPNYCIKGLIASWCEQNGVPAPSGPPESPELDHMRISCLESSTCVGTDGANTVLFEETAAKDDAKSDMEIFSRQNSGEATSKLRVDEVSPENCFTLQSSKEAAPETCGVVDSLDKGKGSHQDSKDDVPVSERCEQWLHVLNKNDAESMSERLKLVEQIRILLKNDDELRDYAGANGITEPLIHFLKMAIYRGDVRSQEVATMALFNFAVNNDRNKRLLLSAGVIPLIEQMIQERETCEAAIAMYLNLSCIPEAQAIIGSSVAIPFLVNGLGEGGSRSDTCRLDALLTLYNLSLHAPNIPSLMASGIIEGLRGVLTPSSPWTDKALAVLLNLAMTRRGKEEIAASAAMVGAIVLILDNGEPGEKEKAVSCLYVICSGDDGSSQTVLQEGVIPALVSVTANGTARARDKAQRLLRLFREQRQRELELEEMQPRVELHEVASQAAARQEEEEEEEEEMALAVTPAAAASKPRGGGKKPRLRRSGSRRFTKAFTCLLKKWSLR

SEQ ID NO: 225427 - protein, 74 aa, Zea Mays
MGLSQVFSCTSSMVLFLANTTSVDESGKQHFLDASVAYKRVVLNDIEYLARFGYSKEQVYLLLSCCPCEAGSLE

SEQ ID NO: 225428 - protein, 76 aa, Zea Mays
MYAITKAFCIAFVMTFFSVFDVPVFWPILLCYWIVLFVLTMKRQIMHMVKYKYVPFSFGKQRYGGKKRPGASASKE

SEQ ID NO: 225429 - protein, 316 aa, Zea Mays
MATPLRATAVLAWGSGEDGQLGMGGNEEKDWPHFVEALGPYAVTAVVAGSRNSLAICDDGRLFTWGWNQRGTLGHPPETKTESSPGPVDALAGFKIVQAAIGGWHCLAVDDKGRAYAWGGNEYGQCGEEPERKEDGTRALRRDIPIPQRCALKLKVRQVAAGGTHSVVLTQEGHVWTWGQPWPPGDIKQISTPVRVQGLEKVRVIAVGAFHNLALTEDVILWAWGNNEYGQLGTGDTQPRSQPIRVEGLSDLSLVDIAAGGWHSTALTIDGEVYAWGRGEHGRLGFGDDKSSHMVPLKVELLAGEDIVQSSFSMFA

SEQ ID NO: 225430 - protein, 762 aa, Zea Mays
MGYLRGVCSGSCAGPSDEISPLYSLWATFVGLYIANFVVERSTGWALTHPSTDLEDEKLKRHMKPDFLDMVPWYSGTSADLFKTAFDLMVSVTLFVGRFDMRMMQAAMKGPTGNTPNDDLLYDHFNEREDLWFDFVADTGDGGNSSYTVARLLAQPSIRTVIGGSMHTLPRGNLLIIGGDLAYPNPSSFTYERRFFRPFEYALQPPPWYRDEHIALDKPELPPGVSKMTEYDGPQCFIIPGNHDWFDGLHTFMRYICHKSWLGGWFLPQKKSYFALHLPKGWWIFGLDLSLHGDVDVYQFKFFADVCQNKVGENDSVIVVTHEPNWLLDWYWNETTGKNVSHLIQEYLKGRCKLRMAGDLHHFMRHSATRSEKNNFVQHLLVNGCGGAFLHPTHVFRNFERFSGTTYECKAAYPSYDESTGIALGNILKFRKKNWQFDIIGGFIYFILVFSMFPQCNLVRILNEETWSGRLKSFSGTIWSALLYIFEHSYVSSVGSLTLLTASYSFVPSKLSRRRRAIIGGLHVLAHLTAALLLMLLLELGIEICIRNHLLATSGYHTLYEWYRSMESEHFPDPTGLRARLEQWTLGLYPACIKYLMAAFDVPEVMAVTRINICKNGMMSLSRSVLIMYYTSVFIYFWIFSTPVVSLIFGSYLYICINWFHIHFDEAFSSLRIANYKSFTRFHVKKDGDLEIFTLAVDKVPKDWKLDPRWESEGRGPHQLSHDRKHPSKWRSASSTDPVRSVRVVDHFTIERTRTPDMEPSS

SEQ ID NO: 225431 - protein, 700 aa, Zea Mays
MKPDFLDMVPWYSGTSADLFKTAFDLMVSVTLFVGRFDMRMMQAAMKGPTGNTPNDDLLYDHFNEREDLWFDFVADTGDGGNSSYTVARLLAQPSIRTVIGGSMHTLPRGNLLIIGGDLAYPNPSSFTYERRFFRPFEYALQPPPWYRDEHIALDKPELPPGVSKMTEYDGPQCFIIPGNHDWFDGLHTFMRYICHKSWLGGWFLPQKKSYFALHLPKGWWIFGLDLSLHGDVDVYQFKFFADVCQNKVGENDSVIVVTHEPNWLLDWYWNETTGKNVSHLIQEYLKGRCKLRMAGDLHHFMRHSATRSEKNNFVQHLLVNGCGGAFLHPTHVFRNFERFSGTTYECKAAYPSYDESTGIALGNILKFRKKNWQFDIIGGFIYFILVFSMFPQCNLVRILNEETWSGRLKSFSGTIWSALLYIFEHSYVSSVGSLTLLTASYSFVPSKLSRRRRAIIGGLHVLAHLTAALLLMLLLELGIEICIRNHLLATSGYHTLYEWYRSMESEHFPDPTGLRARLEQWTLGLYPACIKYLMAAFDVPEVMAVTRINICKNGMMSLSRSVLIMYYTSVFIYFWIFSTPVVSLIFGSYLYICINWFHIHFDEAFSSLRIANYKSFTRFHVKKDGDLEIFTLAVDKVPKDWKLDPRWESEGRGPHQLSHDRKHPSKWRSASSTDPVRSVRVVDHFTIERTRTPDMEPSS

SEQ ID NO: 225432 - protein, 737 aa, Zea Mays
MKSLLCTHYGLHLLASISLTLLWRDQLDLEDEKLKRHMKPDFLDMVPWYSGTSADLFKTAFDLMVSVTLFVGRFDMRMMQAAMKGPTGNTPNDDLLYDHFNEREDLWFDFVADTGDGGNSSYTVARLLAQPSIRTVIGGSMHTLPRGNLLIIGGDLAYPNPSSFTYERRFFRPFEYALQPPPWYRDEHIALDKPELPPGVSKMTEYDGPQCFIIPGNHDWFDGLHTFMRYICHKSWLGGWFLPQKKSYFALHLPKGWWIFGLDLSLHGDVDVYQFKFFADVCQNKVGENDSVIVVTHEPNWLLDWYWNETTGKNVSHLIQEYLKGRCKLRMAGDLHHFMRHSATRSEKNNFVQHLLVNGCGGAFLHPTHVFRNFERFSGTTYECKAAYPSYDESTGIALGNILKFRKKNWQFDIIGGFIYFILVFSMFPQCNLVRILNEETWSGRLKSFSGTIWSALLYIFEHSYVSSVGSLTLLTASYSFVPSKLSRRRRAIIGGLHVLAHLTAALLLMLLLELGIEICIRNHLLATSGYHTLYEWYRSMESEHFPDPTGLRARLEQWTLGLYPACIKYLMAAFDVPEVMAVTRINICKNGMMSLSRSVLIMYYTSVFIYFWIFSTPVVSLIFGSYLYICINWFHIHFDEAFSSLRIANYKSFTRFHVKKDGDLEIFTLAVDKVPKDWKLDPRWESEGRGPHQLSHDRKHPSKWRSASSTDPVRSVRVVDHFTIERTRTPDMEPSS

SEQ ID NO: 225433 - protein, 193 aa, Zea Mays
MRKAYRDSIKVLEADIQHANTLASEFPRDYDGACLQMRLSYSPAAHIFLFLVQWTDCSLAGALGLLRILIYKVYVDGTTTMSTHERKSSIKEFYAVIFPSLLQLQRGITDVEDKKQKAVCMEKYRKKDEDGRDTLSDIDVEREEECGICMEMNSKVVLPNCTHAMCIRCYQDWVHCIISALRLNAVYVPDTIL

SEQ ID NO: 225434 - protein, 446 aa, Zea Mays
MGPPFFLLFLVLTAAAVVSSAPRREAFRRDPGHPHWHHGAFHDVEDSVRADVRRMLHTRAEVPFQVPLEVNVVLIGFNGDGGYRYSLDGHKLEEFLKMGFPLHRPSCFETGEPIDIEHHIMYNVISAGQPELISLEKSLKEAMQPAGIARDSEYGRELPLFEVEATAVESIFQRLYSFIFDMEPGYPANDMDRPVPVAIFIVNFDKVRMDPRNKEVNLDSLMYGTIGGLTEQELKKQEAEYIYRYRYNGGGATQVWLSSGRFVVIDLSAGPCTYGKIETEEGSVSYRSMPRLSQIIFPRGLAAPSASSTQDIFIGQLGGAIATTIEHVIAPDIRFETVDMAVRLLVPIIVLQNHNRYNILQEGHNYSIDVQAIEREVKKMVHPGQEVIIISGSHALHQHEKLAVAVSKATRSHSLHETKSDGRFHVRTKTYLDGAILKEHCNGCVQ

SEQ ID NO: 225435 - protein, 51 aa, Zea Mays
MMQYLTTKEKVQELQLNLHLKGSNMDLCVLKKGRTQDLPTTEDFLRLSATF

SEQ ID NO: 225436 - protein, 277 aa, Zea Mays
MDHTVHVWNVWDKGNTTARVLKHHTAAVKDVRWSLHRPFLLSGGLDCSLQLVDVVEGKVMEVFKEDQAVEVIKFNPSNPDLFLSGGSKGSLKLWDIRCGLVTKEFQRSLGTILDIDFSADGRQFISSTDTTRSNISENTIIVWDVLRQVPLSNQVYTEAFTCPCVRYHPREASFVAQSNGNYIAIFSARPPFKLNKYTRFEGHGVWGFPVKCSFSLGGRELASGSSDGSIYFYDYRSARLLRKIEAFKEACTDVAYHPVMPNVIAACSWAGEISVFE

SEQ ID NO: 225437 - protein, 397 aa, Zea Mays; identical to SEQ ID NO: 224465

SEQ ID NO: 225438 - protein, 267 aa, Zea Mays
MAQDPSRPHRHSSKDTAAQQPEPEHQHEHEQQPPAEILHQLAPQAQPQPPHDVHEPAAAASSSSSSDAGSSWLQLGIGGPSPSSPPRRKRPRRDDDDDDAGPSTATSSVQPAAAPPPQLPPQLLLSLQPAGRPSSSSSSAPAPAPARAVAPPPPAHEAGTWFLLRAAPNQREEPPLPHIPRSYLRVRDGRMMTVRVVMRYLVNKLGLDDDSQLEITCRGQRLQPTMTLQQVRDTIWRPAVPAEAAAVLPAPGSRSTDHIMTLHYCRS

SEQ ID NO: 225439 - protein, 84 aa, Zea Mays
MAHLYERRKFPYPGDDEAVEEFVKSGGALGTTIGPRGFADANMDSENMQKQLQSKKFEQEAQKLWIRMRNEVVQELQEKGFDIE

SEQ ID NO: 225440 - protein, 457 aa, Zea Mays
MLAARTPVSLSLHHRIVAGGHRGRCVGGSQRRRGGAPCRQFTQALQSLWRHSPPIPPPAPPAAGAATSGEAEPSRQPPVLENAAFEEYYKVQQIVREEEWDAFMSVLRKPLPATFRINACLAWHLNFSRKELRKNQALESFHEFLKHESEVPPLFLNVQPDHHILDMCAAPGSKTFQLLEMIHQSKELGLLPGALDQLGPVNGSVWPVGRGAGMDCSGSYKDPCKLQKLEFDRILCDVPCSGDGTIRKGHDMWRKWNSGMGNQLHLLQVNIAMRGIALLKVGGRMVYSTCSLNPVENEAVIAELLRRSGNSVELLDVSSELPELVRRPGLSTWKVQDRESWFQSHDEVPHNRKNVVFPSMFPASNSTEESHTVCGDVEVNINNMNSFSRNINIEETSKLNQDMDGVSVSPTKILECTSNIVSSKFPLHRCMRIVPHDQNSGAFFIAVLHKLSPLNVR

SEQ ID NO: 225441 - protein, 253 aa, Zea Mays
MRNKINLGSNQKVFPDAAAMANDSKQDDAFDLPSDDSDDNDFDPNMPEEHVVGKDEESSEEDEDGGSDSDDSDFLTCSDDSEPLIDKKVDDLRLPSEDSEDDDYDPAGPDSDKDVEKKSSSDESDFTSDSDDFCKEISKSGHDEVSSPLLPDAKVGDMEKITAQAKTTSSADDPMETEIDQGVVLPDSRRRQAERLDYKKLYDVDRGARQGERTGPDRERHRQLIIFVGWCKQAPHKSIYCSQLTSACFHHQY

SEQ ID NO: 225442 - protein, 555 aa, Zea Mays
MSNKRTPEEWSNALDTLKASLRSGTPGLDKSTQALVKFCYDNLESDMVRECFLTCALWPEDHNISKEELVQSWIGLGLLPDLSDIEEAHRFGLSVIAIMKAACLLEPGDNHRYNMFPSDTHVRMHDVVRDAALRFAPAKWLVRAGAGLREPPREEALWRGAQRVSLMHNTIEDVPAKVGGALADAQPASLMLQCNKALPKRMLQAIQHFTKLTYLDLEDTGIQDAFPMEICCLVSLKHLNLSKNKILSLPMELGNLSQLEYFYLRDNYYIQITIPPGLISRLGKLQVLEVFTASIVSVADNYVAPVIDDLESSGARMASLGIWLDTTRDVERLARLAPGVRARSLHLRKLEGTRALPLLSAEHAPELAGVQESLRELVVYSSDVDEITADAHVPMLEVIKFGFLTKLRVMAWSHAAGSNLREVAMGACHSLTHLTWVQNLPCLESLNLSGCNGLTRLLGGAEDSGSATEEVIVFPRLKLLALLGLPKLEAVRVEGECAFPELRRLQTRGCPRLKRIPMRPARGQQGTVRIECDKHWWNALQWAGEDVKACFVPVL

SEQ ID NO: 225443 - protein, 523 aa, Zea Mays
MDGFTLPPFESTCIFRDNDIIRGQRLKVTNSGKHIDYSKKEQNGSKKLKLSVIDIEAKKATPQHETTTTLVEQQKSEGNYQTELKCEAKVTNYDAQSDTKKLESRSARRKKIKRLMKQRGKLQIEKNVHGDSPIAADCPSSSNQDGLPVPSSNQNGSHVHFSSLKADEDESETSDEIVPVVVRPGHIRFEPAGREPDKSPAKELQGTFQWSGTLSKKKGQKWGINSSNKKNADVGYHAGIAGSNTEVNNLVMDIKVTENGFCAVSNRRIDEGSNVEMSSVKAVANEEKSRGVPFDFESLYPLTQLPKEGDLIAYRLVELSSMLCPELSSFRVGKVVLYDPISLRIILLPVQEYPITTEENEDKDEPDMLVDLSPYKEDGSLEIEYSSLLDVRLLKGIEPVPGAFSTPLAETCNEVGSALAKGRPVTLHKNEGNIESQKSPLVANNTNGKEHKLGKSEKTVWEKNDEPGDEVDVQQNGWGTWKQNSTSAWSYRALRSSALGPTMALLRGKNNQRGKPPYRKKGK

SEQ ID NO: 225444 - protein, 272 aa, Zea Mays
MDIKVTENGFCAVSNRRIDEGSNVEMSSVKAVANEEKSRGVPFDFESLYPLTQLPKEGDLIAYRLVELSSMLCPELSSFRVGKVVLYDPISLRIILLPVQEYPITTEENEDKDEPDMLVDLSPYKEDGSLEIEYSSLLDVRLLKGIEPVPGAFSTPLAETCNEVGSALAKGRPVTLHKNEGNIESQKSPLVANNTNGKEHKLGKSEKTVWEKNDEPGDEVDVQQNGWGTWKQNSTSAWSYRALRSSALGPTMALLRGKNNQRGKPPYRKKGK

SEQ ID NO: 225445 - protein, 500 aa, Zea Mays
MAGVPGTASAIFSTVKDVGANVIMISQASSEHSVCFAVPEKEVAAVSARLHDRFHEALAAGRLSKVEVINGCSILAAVGLRMASTPGVSAILFDALAKANINVRAIAQGCSEYNITVVLKQEDCVRALRAAHSRFFLSKTTLAVGIIGPGLIGRTLLNQLKDQVAALKENMNIDLRVIGITGSSTMLLSDTGIDLTQWKQLLKKEAEPADIDSFVHHLSDNHVFPNKVLVDCTADTSVASHYYNWLKKGIHVITPNKKANSGPLDQYLKLRTLQRASYTHYFYEATVGAGLPIISTLRGLLETGDKILRIEGIFSGTLSYIFNNFEGTRAFSDVVAEAKEAGYTEPDPRDDLSGTDVARKVIILARESGLRLELSDIPVKSLVPETLAACSSADEFMQKLPSFDEDWARQRSDADAADEVLRYVGVVDTVNKRGQVELRRYKRDHPFAQLSGSDNIIAFTTSRYKEQPLIVRGPGAGAEVTAGGVFCDILRLASYLGAPS

SEQ ID NO: 225446 - protein, 670 aa, Zea Mays
MSKVTDMMYNLVQKAQSRDDSYTIALEEVFEKHMVAAKDLIDGEDLARFLSQLHSDVSNLRAMLRAIYIAGHATESFSDFVVGHGELWSAQMLSYAIKKSYFGANVLHPRTIIPVMKDNIPIVIRNMFNLSASGTMICKQPANENGDLDACVKSFATIDNLALVNVEGTGMAGVPGTASAIFSTVKDVGANVIMISQASSEHSVCFAVPEKEVAAVSARLHDRFHEALAAGRLSKVEVINGCSILAAVGLRMASTPGVSAILFDALAKANINVRAIAQGCSEYNITVVLKQEDCVRALRAAHSRFFLSKTTLAVGIIGPGLIGRTLLNQLKDQVAALKENMNIDLRVIGITGSSTMLLSDTGIDLTQWKQLLKKEAEPADIDSFVHHLSDNHVFPNKVLVDCTADTSVASHYYNWLKKGIHVITPNKKANSGPLDQYLKLRTLQRASYTHYFYEATVGAGLPIISTLRGLLETGDKILRIEGIFSGTLSYIFNNFEGTRAFSDVVAEAKEAGYTEPDPRDDLSGTDVARKVIILARESGLRLELSDIPVKSLVPETLAACSSADEFMQKLPSFDEDWARQRSDADAADEVLRYVGVVDTVNKRGQVELRRYKRDHPFAQLSGSDNIIAFTTSRYKEQPLIVRGPGAGAEVTAGGVFCDILRLASYLGAPS

SEQ ID NO: 225447 - protein, 561 aa, Zea Mays
MASGGEGAGSGESPPAASVEAAAGEATLHIRCANGSKFTVQTDLGATVGGFKEVVAGSCDVPAPQQRLIYKGRILKDEQTLESYAASSAPAAASSLASSTLSSVPAGGLGDLFPGVGAPGSGRSSGIFGPGFPELEQVEQHLSQNPNLMREIMNMPAMQNLMNNPDLIRNMIMSNPQMREIMDRNPDLAHVLNDPSVLRQTLEAARNPEIMREMMRNTDRAMSNIESSPEGFNMLRRMYETVQEPFLNATTMSGEGNTASNPFAALLGNQGSNQPGQGQPATYTPTIGSESTTGTPAPNTNPLPNPWSTNAGSAQGATRSSGNTRTGASGHVGGTGATGGLGGLGSPDLSSLLGGLAGSPRTGASGGLGGLGSPDLGNMLGGSPDVSLFSQMLQNPAMMQMMQSIMSDPQTMNQLLSFNPNARNLMESNPQMREIFQNPEFLRQLTSPETLQQLLLFQQSLLGQLGQHQPNQGRNNSGSATGTPGNPSLDTLMSMLSGLGSGGGIGVPNTSNVPPEELYATQLTQLQEMGFIDTAENIQALLATAGNVHAAVERLLGNLGQ

SEQ ID NO: 225448 - protein, 495 aa, Zea Mays
MASGGEGAGSGESPPAASVEAAAGEATLHIRCANGSKFTVQTDLGATVGGFKEVVAGSCDVPAPQQRLIYKGRILKDEQTLESYGVETDHTIHLVRGVAPPAASSAPAAASSLASSTLSSVPAGGLGDLFPGVGAPGSGRSSGIFGPGFPELEQVEQHLSQNPNLMREIMNMPAMQNLMNNPDLIRNMIMSNPQMREIMDRNPDLAHVLNDPSVLRQTLEAARNPEIMREMMRNTDRAMSNIESSPEGFNMLRRMYETVQEPFLNATTMSGEGNTASNPFAALLGNQGSNQPGQGQPATYTPTIGSESTTGTPAPNTNPLPNPWSTNAGSAQGATRSSGNTRTGASGHVGGTGATGGLGGLGSPDLSSLLGGLAGSPRTGASGGLGGLGSPDLGNMLGGSPDVSLFSQMLQNPAMMQMMQSIMSDPQTMNQLLSFNPNARNLMESNPQMREIFQNPEFLRQLTSPETLQQLLLFQQSLLGQLGQHQPNHSFNCLI

SEQ ID NO: 225449 - protein, 521 aa, Zea Mays
MASGGEGAGSGESPPAASVEAAAGEATLHIRCANGSKFTVQTDLGATVGGFKEVVAGSCDVPAPQQRLIYKGRILKDEQTLESYGVETDHTIHLVRGVAPPAASSAPAAASSLASSTLSSVPAGGLGDLFPGVGAPGSGRSSGIFGPGFPELEQVEQHLSQNPNLMREIMNMPAMQNLMNNPDLIRNMIMSNPQMREIMDRNPDLAHVLNDPSVLRQTLEAARNPEIMREMMRNTDRAMSNIESSPEGFNMLRRMYETVQEPFLNATTMSGEGNTASNPFAALLGNQGSNQPGQGQPATYTPTIGSESTTGTPAPNTNPLPNPWSTNAGSAQGATRSSGNTRTGASGHVGGTGATGGLGGLGSPDLSSLLGGLAGSPRTGASGGLGGLGSPDLGNMLGGSPDVSLFSQMLQNPAMMQMMQSIMSDPQTMNQLLSFNPNARNLMESNPQMREIFQNPEFLRQLTSPETLQQLLLFQQSLLGQLGQHQPNQGRNNSGSATGKLLVTFSLFLLHLDQYIAISGC

SEQ ID NO: 225450 - protein, 574 aa, Zea Mays
MASGGEGAGSGESPPAASVEAAAGEATLHIRCANGSKFTVQTDLGATVGGFKEVVAGSCDVPAPQQRLIYKGRILKDEQTLESYDHTIHLVRGVAPPAASSAPAAASSLASSTLSSVPAGGLGDLFPGVGAPGSGRSSGIFGPGFPELEQVEQHLSQNPNLMREIMNMPAMQNLMNNPDLIRNMIMSNPQMREIMDRNPDLAHVLNDPSVLRQTLEAARNPEIMREMMRNTDRAMSNIESSPEGFNMLRRMYETVQEPFLNATTMSGEGNTASNPFAALLGNQGSNQPGQGQPATYTPTIGSESTTGTPAPNTNPLPNPWSTNAGSAQGATRSSGNTRTGASGHVGGTGATGGLGGLGSPDLSSLLGGLAGSPRTGASGGLGGLGSPDLGNMLGGSPDVSLFSQMLQNPAMMQMMQSIMSDPQTMNQLLSFNPNARNLMESNPQMREIFQNPEFLRQLTSPETLQQLLLFQQSLLGQLGQHQPNQGRNNSGSATGTPGNPSLDTLMSMLSGLGSGGGIGVPNTSNVPPEELYATQLTQLQEMGFIDTAENIQALLATAGNVHAAVERLLGNLGQ

SEQ ID NO: 225451 - protein, 450 aa, Zea Mays
MASWSWTSVHCSSYPLPGPSARFTPSLVSATTPALRRTRARGQLQRCLCSQYAGERQPPPPPPPQPEPDSPQQLERLFSNLNQTTMKHEPGSVTSAVFLVAGTTVGAGILAIPAVTQEAGFLASAVICILCWSYMVVTGLLVAEVNVNTMCELGSGGVSLVSMAMRTLGTFGVRTSCLSYLFIHYALLVAYVARSSNIITNSLGIPIWESATLFSLAFGGVCYFGSQRLIGAVNGVLVVGILASFTSLVNVVPVLCTNLEGDLSKVRTAIVAGTAIPLALFLVWDGVILGTLPDLAGSSTVSDPLELLRSSNGIVGPIVEAFSFLAIATSYIGFVLGISDFLADLLKLPSGQNKPLPYVLTLFPPLVLSLLDPEIFFKALDFAGTYGVLVLFGVFPAAMSWSERYSDELEAPVPPIVPGGKFTLSAVMGGALLVIVPELIKDVMQLQGLH

SEQ ID NO: 225452 - protein, 327 aa, Zea Mays
MATSGKKHLNSVTLLFKLPYYTQWGQSLLIAGSEPALGSWNVKQGVSLSPVHQDSELIWCGSVSVVAGFTSEYKYYVVDDKKNVLRWEAGEKRKLVLPEGVKEGDVIEIRDWWQDASEALFFRSAFKNVIFNATEGVKKESQSVSLNKSLDPEDIVVQFVISCPRLVSGSTVIVTGSNPQLGRWQTQDGLKLSYVGDSLWKASCALRKSEFPIKYKYCQISQAGNSTLELGPNREVNVDLSSPKQSRYIVLSDGALRDAPWRGAGVAVPMFSIRSDEDLGVGEFLDLKLLVDWAVNSGFHLVQLLPINDTSVHGMWWDSYPYSAPHV

SEQ ID NO: 225453 - protein, 656 aa, Zea Mays
MATSGKKHLNSVTLLFKLPYYTQWGQSLLIAGSEPALGSWNVKQGVSLSPVHQDSELIWCGSVSVVAGFTSEYKYYVVDDKKNVLRWEAGEKRKLVLPEGVKEGDVIEIRDWWQDASEALFFRSAFKNVIFNATEGVKKESQSVSLNKSLDPEDIVVQFVISCPRLVSGSTVIVTGSNPQLGRWQTQDGLKLSYVGDSLWKASCALRKSEFPIKYKYCQISQAGNSTLELGPNREVNVDLSSPKQSRYIVLSDGALRDAPWRGAGVAVPMFSIRSDEDLGVGEFLDLKLLVDWAVNSGFHLVQLLPINDTSVHGMWWDSYPYSSLSVFALHPLYLRVQALSDAIPVDVKEEIQQAKKQLDKKDVDYEAALSTKLSIARKIFNLEKEKVLNSSSFKQFLSENEEWLKPYAAFCFLRDFFETSDHSQWGRFSQFSKDKLDKLICEGTLHHDIIRFHYYVQYHLYIQLSEAATYARKKNVILKGDLPIGVDRNSVDTWVYPTLFRMNTATGAPPDYFDKNGQNWGFPTYNWEEMSKDNYGWWRARLTQMAKYFTAYRIDHILGFFRIWELPDHAATGLVGKFRPSIPLSQEELLSEGLWDFNRMSQPYIRQEILEVAVFIMMFMIQIFSSEILGQKCEIYLFFLRRSLDPFGQSLQPIF

SEQ ID NO: 225454 - protein, 183 aa, Zea Mays
MQELGLIGLRIQRMPSEPNLEFGIPSQYSYMTVCAPSCHDCSTLRAWWEEDEGRRSRFYKTVVGSDEEPPSRCTPEVVHFIVQQHFDAPSMWAIFPLQDLLALKDKYTTRPAPEETINDPTNPKHYWRFRVHVTLESLLNDKDIQATIKDLVTSSGRSFPGKKAEGADESGEKLSKVQLNGKA

SEQ ID NO: 225455 - protein, 201 aa, Zea Mays
MLACGEDLGLIPACVHPVMQELGLIGLRIQRMPSEPNLEFGIPSQYSYMTVCAPSCHDCSTLRAWWEEDEGRRSRFYKTVVGSDEEPPSRCTPEVVHFIVQQHFDAPSMWAIFPLQDLLALKDKYTTRPAPEETINDPTNPKHYWRFRVHVTLESLLNDKDIQATIKDLVTSSGRSFPGKKAEGADESGEKLSKVQLNGKA

SEQ ID NO: 225456 - protein, 327 aa, Zea Mays
MARSSADDMELKRGCEAGILAKGDRDKVVMCMRVAKSRGGGGGWAKGKLTSRHNMAKPRVLAVTAKAKGHRTKTFLRVLKYSNGGVLEPAKVYKIKHLHKIEVSQNDPSGCTFVLGFDNLRSQSVAPPQWTMRNKDDRNRLLMCILNMCKEHLGSIPKVVGMDVVEMAIWAKNTQAKVTQVSSKDGPVESLVLEDESHVIVEKDLVSQGEEEDIEALLGNYVMAIGEAEAFSERMKRELVALESANVYALLETESVVEEVLQGLEIASICVEDMDEWLGIFNIKLRHMREDIQSVCLLSPLLMYMGKSCFLRVVVIKIIFSFNARYI

SEQ ID NO: 225457 - protein, 327 aa, Zea Mays
MYFLWHFPAIGCLPTLVTIPVWIGLYRALSNVANEGLLTEGFFWIPSLAGPTTIAARQNGQGISWLFPFTDGHPPLGWSDTLAYIVLPVLLVISQYISTQVMQPPQSNDPNQQGAQAVTKFLPLLIGYFALSVPSGLRLYWLTNNILSTAQQVWLQKLGGAKNPVKEYIDKLSREETTTVQKNDSTVQSEPLSKHSKPQPSQEPKPSGPQRGERFRKLKEEESMRKEVMGQGKQSEQSSSESRVTDGTQNSDVSSGDQKDQQGSHENGPVVASINGGVNHIRNEKTQNLSSEKVCNYAKVARRGHTRCHPLGPPVQRRHHGAHSQLR

SEQ ID NO: 225458 - protein, 508 aa, Zea Mays
MAAPSHLHLHLPGCPQTLALPLPSPGGFSAWPGLRSCSRSRQPRIRPVAALGPADAGDLLGRVEAFLYTVADAAVNAEPVAAAADTGTKEAAAGDWLSGITNSMETVLKVLKDGLSALHVPYSYGFAIILLTVLVKAATFPLTKKQVESALAMRSLQPQVKAIQQRYAGDQERIQLETARLYKLSGVDPLAGCLPTLVTIPVWIGLYRALSNVANEGLLTEGFFWIPSLAGPTTIAARQNGQGISWLFPFTDGHPPLGWSDTLAYIVLPVLLVISQYISTQVMQPPQSNDPNQQGAQAVTKFLPLLIGYFALSVPSGLRLYWLTNNILSTAQQVWLQKLGGAKNPVKEYIDKLSREETTTVQKNDSTVQSEPLSKHSKPQPSQEPKPSGPQRGERFRKLKEEESMRKEVMGQGKQSEQSSSESRVTDGTQNSDVSSGDQKDQQGSHENGPVVASINGGVNHIRNEKTQNLSSEKVCNYAKVARRGHTRCHPLGPPVQRRHHGAHSQLR

SEQ ID NO: 225459 - protein, 345 aa, Zea Mays
MRSLQPQVKAIQQRYAGDQERIQLETARLYKLSGVDPLAGCLPTLVTIPVWIGLYRALSNVANEGLLTEGFFWIPSLAGPTTIAARQNGQGISWLFPFTDGHPPLGWSDTLAYIVLPVLLVISQYISTQVMQPPQSNDPNQQGAQAVTKFLPLLIGYFALSVPSGLRLYWLTNNILSTAQQVWLQKLGGAKNPVKEYIDKLSREETTTVQKNDSTVQSEPLSKHSKPQPSQEPKPSGPQRGERFRKLKEEESMRKEVMGQGKQSEQSSSESRVTDGTQNSDVSSGDQKDQQGSHENGPVVASINGGVNHIRNEKTQNLSSEKEAADDHSPDVHKLTDRENGNDAV

SEQ ID NO: 225460 - protein, 63 aa, Zea Mays
MSRGQRAYLNEAASGRHGDDAGQVVLEGGNVYVLVSRPSHSCKPSKCCRLKPIDRLARGASNL

SEQ ID NO: 225461 - protein, 983 aa, Zea Mays
MLYIYMLGYDVDFGHMETVSLISAPKYPEKQVGYIVTSCLLNENNDFLRMVINTVRNDIIGRNETFQCLALTMVGNIGGKEFSESLAPDVQKLLISSSCRPVVRKKAALCLLRLYRKNPDVVNIDGWADRMAQLLDERDLGVLTSVTSLFVSLVSNNVEAYWNCLPKCVRILERLARNQDIPQEYTYYGIPSPWLQVKTMRALQYFPTIEDPNARRALFEVLQRILMGTDVVKNVNKNNASHAVLFEALALVMHLDAEKEMMSQCVALLGKFIAVREPNIRYLGLENMTRMLLVTDVQDIIKRHQAQIITSLKDPDISIRRRALDLLYGMCDVTNAKEIVEELLQYLDTAEFAMREELSLKAAILAEKFAPQLLWYVDVILQLIDKAGDFVSDDIWYRVVQFVTNNEDLQSYAATKAREYLDKPALHETMVKVSAYLLGEYGHLLARRPGCSPKELFAIINDKLPTVSASTVAILLSTYAKILMHTQPPDVGLQQQILTIFKKYESYIDVEIQQRAVEYFELSRKGPALADVLAEMPKFPERESALLKKAEDAEIDTAEQSAIKLRSQQQTSSALVVADHPPANGFAPPVNNLTLVKMPSQTVSDTQESGVSYEEAPKPPVEAPKENGTPVEVQNRDTNITEINNEIKAEPPSTSHSTSPGDLLLADLLGPLAIEGPPAVEQNPAQGLNANQSPAGDLALATLDDQSNSVQPIVNVEEKFHILCTKDSGVLYEDPYIQIGLKAEWRAHHGRLVLFLGNKNTSALTSVRALILPPSHLKMELSSVPDTIPPRAQVQVPLEVANLLASRDVAVLDFSYAFGTSLVDAKLRLPVVLNKFLQTITLTPEEFFSQWKALTVHSLKVQEVVKGVKPMPLSEMANLFMSLHLAVAPGLDNNPNNLVACTTFFSEATRAMLCLIRVETDPQDRTQLRLTVASGDQYLTFELKEFIKEHLVDIPRTQVAPPRAAVQPQLPTTAPATYNDPVI

SEQ ID NO: 225462 - protein, 636 aa, Zea Mays
MREELSLKAAILAEKFAPQLLWYVDVILQLIDKAGDFVSDDIWYRVVQFVTNNEDLQSYAATKAREYLDKPALHETMVKVSAYLLGEYGHLLARRPGCSPKELFAIINDKLPTVSASTVAILLSTYAKILMHTQPPDVGLQQQILTIFKKYESYIDVEIQQRAVEYFELSRKGPALADVLAEMPKFPERESALLKKAEDAEIDTAEQSAIKLRSQQQTSSALVVADHPPANGFAPPVNNLTLVKMPSQTVSDTQESGVSYEEAPKPPVEAPKENGTPVEVQNRDTNITEINNEIKAEPPSTSHSTSPGDLLLADLLGPLAIEGPPAVEQNPAQGLNANQSPAGDLALATLDDQSNSVQPIVNVEEKFHILCTKDSGVLYEDPYIQIGLKAEWRAHHGRLVLFLGNKNTSALTSVRALILPPSHLKMELSSVPDTIPPRAQVQVPLEVANLLASRDVAVLDFSYAFGTSLVDAKLRLPVVLNKFLQTITLTPEEFFSQWKALTVHSLKVQEVVKGVKPMPLSEMANLFMSLHLAVAPGLDNNPNNLVACTTFFSEATRAMLCLIRVETDPQDRTQLRLTVASGDQYLTFELKEFIKEHLVDIPRTQVAPPRAAVQPQLPTTAPATYNDPGTMLAGLL

SEQ ID NO: 225463 - protein, 104 aa, Zea Mays
MKVLQDLVPGCNKVIGKASVLDEIINYIQSLQCQVEFLSMKLEAVNAQANQGVEVFPAKDYGSQTYNTAPGLTFDTQTSREYAQGTSTSEWLHMQIGSGYERVS

SEQ ID NO: 225464 - protein, 104 aa, Zea Mays; identical to SEQ ID NO: 225463

SEQ ID NO: 225465 - protein, 423 aa, Zea Mays
MKFMLKLCCNQKQIEPTSPDSEPPEPERCNVYSFCKTLTASDTSTHGGFSVLRRHAEECLPQLDMTQNPPWQELLAKDLHGNEWHFRHIFRGQPRRHLLTTGWSVFVSSKRLVAGDAFIFLRGENGELRVGVRRLMRQLNNMPSSVISSHNMHLGVLATASHAISTGTLFSVFYKPRTSRSEFVVSVNKYLEAKNHKVSVGMRFKMRFEGDESPERRLSGTIIGLGSMPANSTSPWANSDWRSLRVQWDEPSAILRPDRVSPWELEPLDATNPQPPQPHLRNKRARPPALLSIAPELPQVFGFLKSPAEPAQAFSFSRPQQTQELYHSNPSSIFSSSLNVGFSSKNDRSTPINSHLYWTMRQTRTESYSASINKAPTEKKQESATSGCRLFGIEIGSAVSPVATVASVGQDQPPALSVDVESD

SEQ ID NO: 225466 - protein, 85 aa, Zea Mays
MTQKITLAEALTECTVNITTLDGRNLTVQINNIIYPGYEEVVPREGMPIQKDSSKKGNLRIKFSIKFPSRLTSEQKAEIKRLLGS

SEQ ID NO: 225467 - protein, 231 aa, Zea Mays
MGVDYYKVLQVGRGASDDELKKAYRKLAMKWHPDKNPSNKKEAEAKFKQISEAYEVLSDSQKRAIYDQAGEEGLKAQVPPTGAGGPSGSSFYGGNASTFQFNPRSADDIFAEFFGFSSPFSTMGGMGGGAERGMRGSRFGMFGDDIFGSHPQFPGEASMHVPQRSQKVPPIENRLPCNLADLYKGTTKKMKISREVLDASGRTLVVEEILTIDIKPGWKKGTKITFPEKDK

SEQ ID NO: 225468 - protein, 77 aa, Zea Mays
MTTSTRPCAGAAAAFLLLVLFSSAAVSLATAAGRESKQGQHAAGASVYVVMVKPPAEGVDSKAYQMGILAAALGRTS

SEQ ID NO: 225469 - protein, 392 aa, Zea Mays
MSGQNEPTQLYSKKNWRLLRCQNGLRIYEELLEVEYLARSCSRAMRAVGVVEATCEAIFGLMMSMDATRYEWDCSFRQGSLVEEVDGHTAVLYHRLQLHWCPRLIWPRDLCYVRYWRRNDDGSYVVLFRSTEHPNCIRQRGFVRAFIESGGFKICPLKCRNGRPRTQVQHLMQIDLKGWFLNYSTSFQYHSLLQILNCVADDIHITPRIPAMESMADVNLAQKDEKLKEVDSKTKPEDQQQAENKNMGTIDEESDDDEDYHVPEADIEEITNKSDNEAKHTDEPPEKIDLSCFSGILHHDPDEKSRNCWTVPDSKLFKFVARISQMTNRRYLLQVISWSLQPLIGLRTPSVWIMLAGRKIVLLRLLLRKGCIHSLSTYSASLMAMMTSVTAG

SEQ ID NO: 225470 - protein, 197 aa, Zea Mays
MAKNYPTVSAEYSEAVDKARRKLRALIAEKSCAPLMLRLAWHSAGTFDVSSRTGGPFGTMKHQSELAHGANAGLDIAVRLLEPIKEEFPILSYADFYQLAGVVAVEVTGGPEIPFHPGREDKPQPPPEGRLPDATKGSDHLRQVFGKQMGLSDQDIVALSGGHTLGRCHKERSGFEGAWTTNPLVFDNSYFKNQSIP

SEQ ID NO: 225471 - protein, 243 aa, Zea Mays
MATAISFPRAPLVTPRACTPRRLVHVSAARASPPRGGGRVGRRSPTVPAVAGASSSSSGLAPDTSVPAWDALGGVSVLAAGTGNAVALTDLWDSAEGVAVVALLRHFGCFCCWELASVLKDAMAEFDSAGAKLIAIGVGTPEKARILADRAYSVLGLYHGLGRTLFSPASAKIYSRLDYIKKATENYTLEGTPADLTGVLQQGGMFVFRGKELLYSWRDQGTGDHAPLDDVHSACRKIPSRLT

SEQ ID NO: 225472 - protein, 543 aa, Zea Mays
MKASIKTTVGELLPVLTARPIDSDSVTGDRATDADAGGQSLANKLRSLSSEGFVQLLSAIFRIVQVHLQQAAEVKRIVEWVMGNLDGTLGVDASNPTLQHGGTVIPDTQENDSSRGSNTLTRSTSKIPFVQGKTNDFSIINSLKNVRADVLRENTEAVFAACDAAHGRWAKLLGVRSALHPRLRLQEFLIIYNITEEFIAATEKIGGRLGYNIRGILHQQSKQFVDYQHNVRMTKIKAVLDQETWVAVDVPEEFQAIVLSLSSTYSSVNGMEMPSTDDNSKFSDHRSTSQEPTYSAKNIADNGKVTSGTGENKVEFTSQTENNVAGNLKSTLQTIVHGGVGYHMVNCGLILLKMLSEYVDISKCLPSLSLEVVQRVVEILKLFNTRTCQLVLGAGAMQVSGLKSITSKHLALASQIISFMHSLIPDIRRVLFLKIPEARKHLLMSELDRVAQDYKIHRDEIHNKLVQIMRERLLANLRKLPQIVEGWNGPEDNDVQPSQFAKAVTKASGSNIPFTYYRSIFKIGSQYSLWQRIGMLLICASFS

SEQ ID NO: 225473 - protein, 356 aa, Zea Mays
MKASIKTTVGELLPVLTARPIDSDSVTGDRATDADAGGQSLANKLRSLSSEGFVQLLSAIFRIVQVHLQQAAEVKRIVEWVMGNLDGTLGVDASNPTLQHGGTVIPDTQENDSSRGSNTLTRSTSKIPFVQGKTNDFSIINSLKNVRADVLRENTEAVFAACDAAHGRWAKLLGVRSALHPRLRLQEFLIIYNITEEFIAATEKIGGRLGYNIRGILHQQSKQFVDYQHNVRMTKIKAVLDQETWVAVDVPEEFQAIVLSLSSTYSSVNGMEMPSTDDNSKFSDHRSTSQEPTYSAKNIADNGKVTSGTGENKVEFTSQTENNVAGNLKSTLQTIVHGGVGYHMWFNTVEDVIRIR

SEQ ID NO: 225474 - protein, 743 aa, Zea Mays
MASRPPLRTTSVASVSSSTESPTSTGPPGGVPQSITALLNNPLPSAAASSYSWLSWPPPTITLPDAAPPPPSHPCEVTRADFAPYLAAVSDPFARFADIRLHASAELAAASDAEGAPAVSSGLAACLREVPALFFKEDFALEDGPTFQVACPLDDEALQERLGQHLDVVEAHLVREIALRSESFYEAQGRLRGLDGEIVTTVGRIRELREVVRVLTGDLVGAARQVQELNATRGNLVTLQQKLTVILYVSQALTALKLLVAAADCAGALDVIDNLQNLLDTDELAGLYCFWHIRDQLGTSLDSVNSILSAEFVHAAVPDGKAVDVMILSTVKRKASSPLNGTDHEGNVDEEESFILRDRLLPLIICLLRTDKLPAVLRIYRDTLITVMKASIKTTVGELLPVLTARPIDSDSVTGDRATDADAGGQSLANKLRSLSSEGFVQLLSAIFRIVQVHLQQAAEVKRIVEWVMGNLDGTLGVDASNPTLQHGGTVIPDTQENDSSRGSNTLTRSTSKIPFVQGKTNDFSIINSLKNVRADVLRENTEAVFAACDAAHGRWAKLLGVRSALHPRLRLQEFLIIYNITEEFIAATEKIGGRLGYNIRGILHQQSKQFVDYQHNVRMTKIKAVLDQETWVAVDVPEEFQAIVLSLSSTYSSVNGMEMPSTDDNSKFSDHRSTSQEPTYSAKNIADNGKVTSGTGENKVEFTSQTENNVAGNLKSTLQTIVHGGVGYHMWFNTVEDVIRIR

SEQ ID NO: 225475 - protein, 208 aa, Zea Mays
MGQRRRGKSGEEASGRETTDRVRQRQYEARHLACREFASSTYCGTVANQSQGCAPPDCVVSMSLAPKRSRLPAPGDADELSVIEDQIAWIVHIITSIVKKSPQRGRGAALVVSLTLIKASTSRGLGHLPLIGVVVELVMEAKIEKMKYEHLTREAALAEKELLEEEYKKKFDEAKKELSLENDLAGMWVLVAKLKRGALDISDLNVDD

SEQ ID NO: 225476 - protein, 72 aa, Zea Mays
MAITSLLVLDPYFRGKKPRGDYGTASVEGRLDDGEEASGRETTDRVRQRQYEARHLACREGHLHTNRVCDNV

SEQ ID NO: 225477 - protein, 240 aa, Zea Mays
MAPTAESSSPPPQRRPRTGPPPGLKNLSNTCYLNCVLQCLASTPPLATFCLASGHSDICKKVSPNRDKECAFCVLERQIARLLRADAGALDSPAKVIRCMPLFAEHFRWGRQEDAHEFLRYVVDACHTAGLRTRKLLLAKGANGNCGEDGRGQGACLVMRETFGGALLSQVKCLVCNRESNKTDEIMDISLDLPGSSSVADALARFFKPEILEGANKYSCESHFHQGNDSSGNLSSLCLL

SEQ ID NO: 225478 - protein, 846 aa, Zea Mays
MAAADRQLVVAVEGTAALGPYWSTIVAEYVEKIVRSFCASELPGQKLVGTPPELALVVFHTHGPYSAFDVQRSGWTKDVDAFLSWLSGILFSGGGFSEASTCEGLAEALKILQGNPNTTQGHQNHEAQKHCILVAASNPYPLPTPVYCLPTQSTDHKENIETSKEPSIADAETVAKSFAQCSVSLSVISPKQLPTLKAIYNAGKRNLRAADPSVDHAKNPHFLVLLSENFMEARTALSRPLHGNLAPNQTITKMDTAPAVTMPGPTSNGNSSVNAMAGRQPIVGGISTTSVKVEPTTMPPIVSAPAFSHVTPISNVASQGISALQTSSPSLISQEANMGNDNVQEHKPIINPVQQPIRPGGHGSLLNNLSQVRLMNSTSLGGGATSMGLPNMGATPIQVHMSNMISSGMTSTPSVISSMSGPGQPISTQQMVQSTALGSFGSNTPTVTGNSTIAVSSSLTNNQSSMGMGQSVQSVAQGGLVSGSQLGQGGIVANQNVMSTLGPTAISSTPAMMPTPGMVPQTGVNSLGVNNNSAMNMPITQQHANAQQPPPKYVKIWEGTLSGQRQGQPVIICKLEGYRSGTASETLAADWPETMQIVRLIAQEHMNNKQYVGKADFLVFRTLNHHGFLVQLQEKKLCAVIQLPSQTLLLSMADKAGRLIGMLFPGDMVVFKPQASTQQTPMQQQQLQQFQQQQQQLQQHMHMQPQGLPLQQSQMQLQQQQPQMQPMQQQQPSQMQQQMQSMQQQMQPMQQQMQHQQQQMQQMQPQQQQMQQMQQQQQQMQPQQQQMQQMQQQQQQMQPQQQQQPQMVGTGMGQQFMQGHNRAVQMMQGKITPQGPGSMPGGGFLP

SEQ ID NO: 225479 - protein, 912 aa, Zea Mays
MAAADRQLVVAVEGTAALGPYWSTIVAEYVEKIVRSFCASELPGQKLVGTPPELALVVFHTHGPYSAFDVQRSGWTKDVDAFLSWLSGILFSGGGFSEASTCEGLAEALKILQGNPNTTQGHQNHEAQKHCILVAASNPYPLPTPVYCLPTQSTDHKENIETSKEPSIADAETVAKSFAQCSVSLSVISPKQLPTLKAIYNAGKRNLRAADPSVDHAKNPHFLVLLSENFMEARTALSRPLHGNLAPNQTITKMDTAPAVTMPGPTSNGNSSVNAMAGRQPIVGGISTTSVKVEPTTMPPIVSAPAFSHVTPISNVASQGISALQTSSPSLISQEANMGNDNVQEHKPIINPVQQPIRPGGHGSLLNNLSQVRLMNSTSLGGGATSMGLPNMGATPIQVHMSNMISSGMTSTPSVISSMSGPGQPISTQQMVQSTALGSFGSNTPTVTGNSTIAVSSSLTNNQSSMGMGQSVQSVAQGGLVSGSQLGQGGIVANQNVMSTLGPTAISSTPAMMPTPGMVPQTGVNSLGVNNNSAMNMPITQQHANAQQPPPKYVKIWEGTLSGQRQGQPVIICKLEGYRSGTASETLAADWPETMQIVRLIAQEHMNNKQYVGKADFLVFRTLNHHGFLVQLQEKKLSNFVILLRFIYCRFIHLVFCQLLYTVLISNWSWFQCAVIQLPSQTLLLSMADKAGRLIGMLFPGASTQQTPMQQQQLQQFQQQQQQLQQHMHMQPQGLPLQQSQMQLQQQQPQMQPMQQQQPSQMQQQMQSMQQQMQPMQQQMQHQQQQMQHQQQQMQQMQQQQQQQQQQQQQIQPQQQQMQQMQQQQQQQMQPQQQQMQQMQQQQQQMQPQQQQMQQMQQQQQQMQPQQQQQPQMVGTGMGQQFMQGHNRAVQMMQGKITPQGPGSMPGGGFLP

SEQ ID NO: 225480 - protein, 1265 aa, Zea Mays
MATQSHSSSAAAIDMYETASQPDASVAGDAYTFLEFNTQGDEFDYPDFPELSQPPPRSTPLTSSIPGAGASSSSWPAPPPPPSDAASAEPDLTSLDVPTPPASSSSPSPRSASKARSLAAADGLASGVAALSFEDPVGAGAGEDGYDYGKGDFVEHACRYCGIHNPACVARCNVPSCRKWFCNSRGNTSGSHIVNHLVRAKHKEVCLHKDSPLGETILECYNCGCRNVFLLGFISAKLENVVVLLCREPCLSVNALKDMNWDLSQWCPLIDDRCFLSWLVKVPSEQEQLRARQISAQQINKVEELWKTNPDASLEDLEKPGVDDEPQPVVLKYEDAYQYQNVFAPLIKLEADYDKMTKESQSKDNVTVRWDIGLNKKRVAYFVFPKEDNELRLVPGDELRLRYPGDSSHPTWQSVGHVIKLTAQEEVALELRASQGVPTELNVGFSVDFVWKSTSFDRMQGAMKTFAVDETSVSGYIYHHLLGHEVEHQIIRNTLPRRFGAPGLPELNASQVLAVKSVLQKPVSLIQGPPGTGKTVTSGAIVYHMAKQGQGQVLVCAPSNVAVDQLAEKISSTGLKVVRLCAKSREAVSSPVEHLTLHYQVRHLDTSEKSEFHKLQQLKDEQGELSSSDEKKYKALKRATEREILQSADVICCTCVGAGDPRLSNFRFRQATEPECLIPLVLGVKQVVLVGDHCQLGPVIMCKKAARAGLAQSLFERLVILGVKPFRLQVQYRMHPCLSEFPSNCFYEGTLQNGVTVNERHSSGIDFPWPVPNRPMFFYVQMGQEEISASGTSYLNRTEAANVEKIVTTFLRSGVVPSQIGVITPYEGQRAYIVNYMSRNGSLRQQLYKEIEVASVDSFQGREKDYIILSCVRSNEHQGIGFLNDPRRLNVALTRARYGIVILGNPKVLSKQPLWNSLLTHYKEHECLVEGPLNNLKQSMVQFQKPKKIYNDRRLLLGGAQGMHGANFGAGASSQAADKRSGRGKAGQSFVSYGPPNGVHKPGVHPAGYAVPRMPFPPFPGAPHSQPYAIPTRGLHGPIGAVPPVHQPGSRSFGAPRSNTGGPIGGHLAHQQNSQQAMGGIGSNFNYAGMENSSSQPSGVAQMSQSGLMTQMPVQGLSQTFRDGFSIGGMSQDFIVDDFKSQGSHVPYNIAEFSTQASQGGYGVEFTQAPQSGYSGNYMNQNTHPGYSHIGTTNDIVSQDHMAHGSHGMFTQVGYNDPSQDESSQIHYGMAAAGPLHSQSMMNPLYSQSYAHYNTQPHSLQPPPQ

SEQ ID NO: 225481 - protein, 240 aa, Zea Mays
MVVLLAVLIQAASLFKGPVPPVVAFALGSLGFMTPFPSEQYRELLDNVLNGPFSITLRNRIQCHVIRDEAKDEIVSEEPFLVLNEVTIDRGISSYLTNLEVYCDSSFVTCVQGDGLIISTTSGSTAYSLAAGGSMVHPQVPGILFTPICPHSLSFRPLILPEYVTLRVQVPFNSRGNAWASFDGKDRQQLSPGDALICSISPWPVPTACLVDSTTDFLRSIHEGLHWNLRKSQSFDGPRD

SEQ ID NO: 225482 - protein, 276 aa, Zea Mays
MPPGTKTFVRQKVTLSPSALPSNPVEEGSKTCDVNSGHKSSQSVSCGNEPSERGARSECCNGGQNCNSNDESEKGDLKTRCRSLDSDSNESNKSSSPGNKKDQSDSDGCCCQMDKFGMGEKKSCCSPSKINDSSGGAVLRYALHLRFLCPSKKKSSKSMLRCKSDLSTAPYSSNTLPEEERRFYLYNDLRVVFPQRHSDADEGEECSPSRCRRMKGMTQDATEQKVLEQQMVADPYQRLIALAPSFSGTESPLILLQREATSFGVDLIKSLGFDAC

SEQ ID NO: 225483 - protein, 477 aa, Zea Mays
MIGIKKMLIFMAIAASAFAFIGLGFAILLISVLAVVILWFYGSFWTTTCVMILGGVLFFLKRERITLLVACLYSMYCARCYVGWLGLLLGLNLSFFSSDILVQFLRDNADNKKFNGSSRYSERSSGRQGNIFEEFQPSANSTYQARYARASDRDPGDPSTSGPEKELTSEDEVARLLNCTDHYSALGFRRYENIDVSSLKREYKKKAMLVHPDKNMGNDKAADAFKKLQNAYEILLDSLKRKTYDDELRREDLLNYFRQSVSQKNGRNSTFQHGFSPSEGVDEGPYGLSRRIACKKCSDFHLWIYTGRAKSQARWCQDCKEFHQAKDGDGWVEQSFQPVLFGMLQKPDLPHAYVCAESYIFDVTEWFNCQGMRCPANTHKATFHVNANMAKQSSGKASTSTQRAGKAPSGVNMDGGGLNEEEFFEWFQNAVNSGMFETTFGAQGDPTSPGNGSNAKSSGSSSSNNNSRKKKKGKKQW

SEQ ID NO: 225484 - protein, 182 aa, Zea Mays
MRGMWEGGGRRQTRSAVSALWALRGPHGLKCHAPATTRVNTGPARPGPAQEPPSLDSSNKFPFPLLPIPTHPRRRANPSERESPEPRDQPAMALRALYNEIRSMKVRDVPAYLKPRLTWDNVKKSADQAVDRYIEKYIDTSSPDPLYHVCIGGMIFSYFVNLPWERAHLAHLEEMERTGGKH

SEQ ID NO: 225485 - protein, 132 aa, Zea Mays
MESPPDQAAAAAAARQDKEQRDYRLIAKAVDEAYRAVECDGGGYPFGAVVVHGGGDDEVVSSSHNSVRKDADPSAHAEVTAIRQACKKLGKTSLAGCEIYTSCEPCPMCLGLIRLAKIKEVFEKTKGKFRNK

SEQ ID NO: 225486 - protein, 105 aa, Zea Mays
MGNASGREEDAAAVDGDGADVEDGGGDSSVRSSERAFPPYGSVGANHVRRACSVGVVGGGGGAGSPPGSPGHSLSPRMFVPQGPMRRVVAIWRSLARFGIVLIRL

SEQ ID NO: 225487 - protein, 450 aa, Zea Mays
MNVEFSAMIRYMYLIILLPSLYLIIWMSAMKRTMRHLEEDDEIDDELDQIMALMMGQYKKRKNGQRKKRRGSVFGHKVHDRSRQEHDRKLFQDYFAENPTYPEKFFRRRFRMSSSLFKRIAKAVEKHDEYFVQDRNAAGVLGFSCLQKVTAAFRQLAYGVPADYVDEYLRIGESTAIESLRKFVKAVCEVFGPQYLRAPNEDDTARLLSIAEQRGFPGMLGSIDCMHWKWKNCPTAYQGTYCGHVKEPTIILEAVASHDLWIWHAFFGLPGSLNDINVLHRSHLFDRLVEGKAPAVNYTINGHKYDMGYYLADGIYPNWSAFVKSIKAPANEKDQNFTAAQESLRKDVERAFGVLQARFAIVRGPARFWDVATLRNIMKACIIMHNMIIEDERDAGRLEPPYEKSDAETNGWVSHVGTSNLSAFIDKHKDIAHSFFLWLHDPCTSTAKGC

SEQ ID NO: 225488 - protein, 842 aa, Zea Mays
MATVELPAAGMAGMLPPRNATAQVAPGNNFSNPASVVCYSPMMVTAYGIWQGVNPLEFSLPLFILQTAIIVATTRLLVLLLKPIRQPRVIAEILAGVILGPSVMGQVEVWGTTVFPVRSLLTLETVAHLGLLYFLFLVGLEMDVNVIRRSGKKALIIAVAGMALPFCIGTATSFVFRHQVSKNVHQASFLLFLGVALSVTAFPVLARILAEIKLLNSDLGRIAMSAAIVNDMCAWILLALAIAISEVNSSAFSSLWVLLSGVFFVLACFYGVRPLMWWIARRVPEGEAISDVHVTLVLTGVMVAGVCTDAIGIHSVFGAFVYGLVIPSGQLGVVLIEKLEDFVTGLLLPLFFAISGLRSPHQHFPGARSRHRGAPRPRVHHGQLRQGLVEMIVLNIGRDKEVLDDESFAVMVLVSVAMTALVTPVVTSVYRPARRLVGYKRRNLQRSKHDAELRMLACVHTTRNVPSIISLLELSNPTKRSPIFIYALHLVELTGRASNMLAAHHSAANQNRGSSSDHIFNAFERYEESVGGVSIQALTAVSPYQTMHEDVSVLAEDKHVSIIVLPFHKQQTVDGGMEPINASLRGFNESILSAAPCSVGILVDRGLSAAAARMASVHHVALLFFGGPDDREGLAYAWRMVEHPGVCLTVVRFIPPDYRAPALAPPQHMPASSVHARAITIVPKSERQMDEEYLNEFRTRNVGNNAILYMEQVVANSEDTLAAIRDLDSAHELYIVGRHPGEAGSALTSALAEWMESPELGPIGDLLVSSEFSKMVSVLVMQQYVITTPQPAAVGPAAAAPVTDDPVRQYVTNANQRTSVAGLGVGGNQMGRGGWGGGAGGF

SEQ ID NO: 225489 - protein, 216 aa, Zea Mays
MSAAAKGIAVALLNARISLKSFNHWSMPLMFPLVSLMLSKLSLVVPLSTIQAVRFQLLHTPPGIIHFAGDLKYAVGDVNTGENQVKEIKDLQRQFSNRPLWMAASIHRGEEEVILRIHEELVNVYPVLLLILVPRHPEDCKNISLALKKQKVNFVLRSTREVVSSITRVYMVDTLGELRMLYRVTPIAVVGGSFLPGLAGHNFSEAAAAGCAVMTE

SEQ ID NO: 225490 - protein, 74 aa, Zea Mays
MLLLLDLEAMLVGHKTFSSLASYQLKKLLWLKLPVTMVPQSLPKGSAGCNRNHVEGAWIPAIVGLPFFCVILVQ

SEQ ID NO: 225491 - protein, 580 aa, Zea Mays
MVAGTGISSPIKKRKFSPIIWDRDSPKPPHSGAARDKKSVESVPSELPPPPPLPQDHIPLSLSVEKSPMDVETTVGTESAEQLPEHEVNKVIEQEEDYPSPTMRNISTSRWAGANDDEEGGAAPMKKRSVSPADSSVPGQWKRASPEPGEVSGGRAMSRSSDSGKIGNDEKEDSEVDKDDYMDVDREHASDSGTENCMSDTDSDNEMCRPETPEPERPPHRCINMLQGCRSVDEFERLNKINEGTYGVVYRARDKKTSEIVALKKVKMEREREGFPLTSLREINILLSFHHPSIVDVKEVVVGSSLDSIFMVMEYMEHDLKGVMETMKQPYTQSEVKCLMLQLLEGVKYLHDNWVLHRDLKTSNLLLNNRGELKICDFGLSRQYGSPLKPYTQLVVTLWYRAPELLLGTKEYSTAIDMWSVGCIMAELLAKEPLFNGKTEFEQLDKIFRTLGTPSEKIWPGYAKLPGVKVNFVKQPYNRLRDKFPAASFSGRPILSEAGFDLLNRLLTYDPDKRISADDALKHKWFSEVPLPKSKDFMPTFPALNELDRRTKRYLKSPDPLEEQRLKELQGNIGNRGLFG

SEQ ID NO: 225492 - protein, 161 aa, Zea Mays
MGRGKIEIKRIENATNRQVTYSKRRTGIMKKARELTVLCDAQVAIIMFSSTGKYHEFCSPGTDIKTIFDRYQQAIGTSLWIEQYENMQRTLSHLKDINRGLRTEIRQRMGEDLDSLDFDELRGLEQNVDAALKEVRHRKYHVISTQTDTYKKKMRTEGVGF

SEQ ID NO: 225493 - protein, 114 aa, Zea Mays
MARSPAASSSSYTDSTGSSSDSGSSSSGIDRRRRRHRHRSSRRKEGTSSSALKARKDRRSRHKRRRHERERRRSASDDDSYSTSSYDSDREVSGRSRKHKKSSRSRKGEGAEQR

SEQ ID NO: 225494 - protein, 280 aa, Zea Mays
MGERRRRASTASLGGGGGAGGSGAVPARNEEDKAAEPPPPTLWFALKRSLHCRSELSEVHVPRANKASGPVVASGGHLSSIVTKRASARSGCSRSIANLRDVIHGSKRHPGQPPSCSPRSIGSSEFLNPIAHEVVLSTNSRCELKITGFGGCGGLAAVGTGAAAAHDACGGGDGGVVSSFVGTLRPGTPGPAWAGAGHGLPCSGSVRGGVRCTPPRSPCVLLERNGSVVSGHRASSCEETAKDGGAGKGSGGLSCHRCGEQFSKWEALEEHHLSRHAVSL

SEQ ID NO: 225495 - protein, 502 aa, Zea Mays
MEITPISQLRPGKLNYALHVRISRMWEFRGTNEQNDIKHLDLVLIDQKGNSIYAEIPPDAIDVLKPHLQEKKIVYISKITIERAKLGFRVVDNPYMVKLNKRTIVLEDKDEIQGFPKYTFSLTPLDKLDQYKNKTDRFIDVIAKISGVSNVAKVPTTSGDQQMRRVVLLEDLKGNMIELSLSRKRVLEFDGDQILDVGQQHHVIAIFVGTLVKLYKGEYTFLSGTSACRWYINENDIAEIKAFQKSFPLVQGQRYQCTTTIIGITENQTWCYKACKICNSAIIQKENGYKCTKEGCPSTQFEWKYKIPFIASDHTYNLEFMFFEKKGMELIGKSASTLRKQYEPKEIPPDITSWIGYKFTFVVRVLSKKSVKTIDPSFEVLMIKEKYQKEPIISFISSSGVVPAESSSSTMAEYKELPLLMPITSKDIEKRSDPLHNQNTPKKLKIWTLNHLAFGKNLRFQTKEALETQTMTIRKQLMTKMIFHNSRKSRVPTLKEKAKNDA

SEQ ID NO: 225496 - protein, 182 aa, Zea Mays
MFFEKKGMELIGKSASTLRKQYEPKEIPPDITSWIGYKFTFVVRVLSKKSVKTIDPSFEVLMIKEKYQKEPIISFISSSGVVPAESSSSTMAEYKELPLLMPITSKDIEKRSDPLHNQNTPKKLKIWTLNHLAFGKNLRFQTKEALETQTMTIRKQLMTKMIFHNSRKSRVPTLKEKAKNDA

SEQ ID NO: 225497 - protein, 466 aa, Zea Mays
MRPPSSRGSTRGCPSHSRVGPAMGLFSSAAKRCRKCKKFLRSAGACCCSPSASSAPAGGVRGNEEASTSALASAPDGKKKKRWRKRKFWRKKKKAKKESDDGSGELVDLVNSFSAKSDVCKNVNAAEEILRGCNQNMPSRALTFSQLGAATDGFSEQNLLGEGGFGRVYKGLLQDTREVIAVKQLDRNGFQGNREFLVEVLMLSLLHHPNLVKLLGYSTDSNQRILVYEYMPRGSLEDHLLDLPPSWKPLPWHTRMRVAVGAAKGIEYLHEVANPPVIYRDLKASNILLDREFNAKLSDFGLAKLGPMGDQSHVSTRVMGTYGYCAPEYAMTGKLTKMSDIYSFGVVLLELITGRRAIDVTRPSEEQVLVHWGLHAHATHVRAGNASAERQAEVHEAGRPVAGQEVPREGAVPGARRRVHVLAGGRCQPAGDQRRRLGALVPRRSAILPSPRHGSRAEGHSHRSRE

SEQ ID NO: 225498 - protein, 375 aa, Zea Mays
MGSAGKHQLLSFMDELIPTIRTALCDSTQEVRESAGLAFSTLYKSAGLQAIDEIVPTLLRALEDDDTSATALDGLKQILSVRTAAVLPHILPKLVQPPLSSFNAHALGALAEVAGPGLNSHIGTVLPALILAMDDEDADVQNSARKAAETVLLVIDEEGVETLIPELLRGINDSQASMRRGSAYLIGFLFKNTKLYLADEASDMMSTLIILLSDTDKATVSAALEAFSRVVASVPKEQLPTHIKLVRDAVSTARDKERRRRKGVPILVPGLCLPKALQPFLPIYQQGLISGSAETKEQAAEGLGELIDVTSEKTLKEVVVPITGPLIRILGDRFPWQVKSAILSTLTIIIMKGLSGRGLQLLWESLVLSAHGWIL

SEQ ID NO: 225499 - protein, 393 aa, Zea Mays
MALSIYTPTSSSLVPPSIQVRLTSRPPKPATFSLRRPHLAARAAAGNAPTSPVREVVTELDAVAGFSEIVPDTVVFDDFERFAPTAATVSSSLLLGITGLPDTKFKSAIDTALADGECNALEKAEDRMSCYLTKALANVGAELAHQVPGRVSTEIDARLAYDTQGIIHRVHELLNLYNQHDVSTDRLLFKIPATWQGIEASRLLESEGIQTHLTFVYSFAQAAAAAQAGASVVQMFVGRLRDWARHHSGDPEIDEALKNGEDAGLSLAKKVYAYIHRNGYKTKLMAAAIRNKQDVFSLLGIDYIIAPLKILQSLEESVTDPDVKYGYVPKLTPAIGKTYNFTEEELVKWDQLSLSAAMGPAAEELLASGLEGYVNQARRVEELFGKIWPPPNV

SEQ ID NO: 225500 - protein, 252 aa, Zea Mays
MASADAAKPASPPAADPPVDDPMDADPAPPAGEEEQATPQKQQPEKKRGGRRKKGEAAEKTPPSSKKSAGPTVERPSRERKTVERYAELAPRATPAKKSPAILQGSGTKLKDIPNVSFKLSKRKVDENLQSLHTVLYGRKSNNHFLKRNISQFSGFVWTDNQEKQRNRIKEKLEKFNKEKLLDFCEILDVIVKVTMKKEEVSAKLLEFLESPCVTRDVVLTDKKKGKKRGRKSKVGRETTAEGASTEKEKSP

SEQ ID NO: 225501 - protein, 307 aa, Zea Mays
MKKEEVSAKLLEFLESPCVTRDVVLTDKKKGKKRGRKSKVGRETTAEGASTEKKRKRAHKQAAEDGKENDGEDDDPTGSEDASTGEEADGDSEANDHALSDDEHDEPASKKKSSDVKQKKETGSDAKEKDAPGKKGSTKRASKPSQNSKNEPEVEIKKVGKREKSSKETDVSPDSNKSNKKISKSKKGDGKETQNNKAARSSNKSKGKVKGGSVAGTAPTTEQLHAVVSGILKEVDFNTATLADILRQLGTHFEMDLMDRKAEVKRIIEDVINSMSDDEGEEGSEDEAEDDGKADNLKSEPDGGEEK

SEQ ID NO: 225502 - protein, 460 aa, Zea Mays
MGATGTGVKEVDPDDEYDDGIDTQDEMEDAHLHSSDGGRKLGGGSHEGAEKKDEVATERHTEAGGGIAGSHDISSPDKKKVSGTGDKKHGPKKKPKRKKSGSICQMKFLNSTAQLVEPVRNEKFASFKLEYVEVEERPIGSEFWEPRFAGHQSLQEREESYKAHDQQLTCAFVKGPNGTSTGFDISDDDRKYMSKCHIAVSSCIFGNSDRLRTPFGKTITSLSKKTVCFAMFLDEVTLHTLESEGQKMDSMGFIGIWKIILIKNMPYNDMRRVGKIPKFLAHRLFPSSRFSIWLDSKLRLQTDPILILEYFLWRHGYEYAISNHYDRHCVWEEVAQNKKLNKFNHTIIDQQFEFYQADGLTRFNPSDPNKLLPSYVPEGSFIVREHTPMSNLFSCLWYNEVDRFTPRDQLSFAYTYLKLRRINPDRPFRLNMFKDCERRSIAKLFHHRSEESHSGAQLTR

SEQ ID NO: 225503 - protein, 318 aa, Zea Mays
MDSESSNLLPQYGDFPCRTSVQQNAQPPNVSTQLRDIVEGPQSTVQVKRRPVARRKLANFCTKEDCRLSQCWLAIKCDPVVNTGQKQQGLWNRLTEAYNHRRGNMPERSTKSLMSRWDTIKTQCSLFSGYMANVLRENSSGLSDADKDEPKWMDHSSNKQVRIIEVAPIGSNIIDLDPKDSFLGSTTSKQHLGQDASKGKTKKARSSSITVSSSDEYLAKMDDLSLQRLSVYQTTMAFEQQKAERDDQFRKQQLEIEQQKLAIERERLERQKRIDEKAEEERILAIDMSICNPAQRAYYKKLQQQILSKIQADMSNIE

SEQ ID NO: 225504 - protein, 712 aa, Zea Mays
MASKVRFTVGSQVWVEDAEVAWIDGLVEEVQGDELIINCTSGKKVTANVSSVYPKDAEAKRCGVEDMTRLAYLNEPGVLQNLKSRYGMNEIYTYTGNILIAVNPFQRLPHLYNNHMMGIYKGAEFGELSPHPFAIADHAYRLMMNCGKSQAILVSGESGAGKTESTKSLMQYLAFMGGKAQSGGRSVQQQVLESNPVLEAFGNAKTVRNNNSSRFGKFVEIQFDKNGKISGAAIRTYLLERSRVCQISDPERNYHCFYMLCNAPAEDRERYKLGDAASFHYLNQSSCIKLDAMDDASEYIITRRAMDIVGISSDEQDAIFRVVAAILHLGNVEFSEGSEADSSVPKDDKSQFHLRTAAELFMCDEKALEESLCKRVMVTRGESIVKNLDARAAALSRDALARIVYSRLFDWLVTKINTSIGQDLSSKLLIGVLDIYGFESFKTNSFEQFCINLTNEKLQQHFNQHVFKMEQEEYTKEEIDWSYIQFVDNQEILDLIEKKPGGIIALLDETCMLRNSTHEIFAEKLYQKFKGNLHFSRPKFSRSDFTIHHYAGNVTYQTDLFLDKNIDYAVNEHQVLLHASRCSFVSSLFPHEVSAKSTKFTSIGSSFKQQLQALLETLSATEPHYIRCIKPNNVLKPAIFENSNVLQQLRCGGVLEAIRISCLGYPTRRRFDEFVDRFGVLLPEVLGESYDEVTATNMLLDKVNLTGYQYYL

SEQ ID NO: 225505 - protein, 605 aa, Zea Mays
MEGHGVPKQFQGRFHVVPKHSDWFSPGTVHRLERQVVPHFFTGKSPGHTPEKYVMLRNKVIAKYLENPSKRLAFAECQGLVGSTSELYDLSRIVRFLDTWGIINYLAAGSVHRGLRMATSLLREEPTGELQLLTAPLKSIDGLILFDRPKCSLPVEDISRMAATSSNSEAVDFDAAFSDLDGKIRERLSESSCSYCLQPLPSLHYRSQKEADIFLCSDCFHDARYITGHSCLDFQRVDGDNDESENDSDKWTDEETLLLLEGIEKYNDNWDDIAGHVGTKSKAQCIYHFIRLPVEDCLLENVEIPNAPIPFRPQSNGYQCLDSNGSTSGAPVQNIQQGNELPFINSSNPVMSLVAFLASSIGPRVAASCAHAALSFLTRDEDSRVSSEGSHAGGLGNGANSNFQNHNGNVKYAAMLGLSAAAMKSKLFADQEEREVQRLTATVINHQLKRLELKLKQFAEVETLLLKECEQVERVRHRISAERVRMRSALLGPTGSGLPGGSCSTMPSNPAGMSPRPVGVPGYMPQTSMPATYANNLQGHGNPQMPFLHQRPQMLSFGPRLPLSAIQTQPSPQSSNMFNSGMPNSIAPNHHQLLRSSSGNNSSAG

SEQ ID NO: 225506 - protein, 81 aa, Zea Mays
MATALKSFLNSPVGPKTTHFWGPVANWGFVVAGLVDMNKPPEMISGNMTAGTWRRKSQRHNSKEGEVLFLYLRVSYFMWMT

SEQ ID NO: 225507 - protein, 365 aa, Zea Mays
MAASAAAQRRSAGSRTTYERAELEALRDAPSKEAHARLWADVRATLVASGFSGEYDGLLVAEEDVRSRRGNRGMKAMSVRKWPEEAAAAARFLEIGAHRNGDLAVCHEHRFVSAHDHAGTSGVVEESFHQGEDVECEDDSDDDYNGILKPAFAVDGDPDFESGEPLDGFEYLRRVRWEANQIPRVKVAKIYSSAARNEQTPYMPEIPDIPKCLPDLRASKQWEDRFIVDFEETRMVLSELDNSDEPSVSSGTKISTKPGSGTEPQTDPTLTMIRSMDAVSRAATLRNYIDMIQSLDALSRNNCMWLFALCVAVHTPLDAETCASLRSLLRKCASILATKTEMDDEVVMLNILMTISGRYFGQDES

SEQ ID NO: 225508 - protein, 78 aa, Zea Mays
MAYFTISAVAVAMEAAMIGKYGSQQFQWMKTCHLYKRFCAQAGGAVACAVAASLNMVGVSLVSAFNLFRLYGSGKGRK

SEQ ID NO: 225509 - protein, 117 aa, Zea Mays
MAACYSLLQGGRCLVSILTGGGVLINRPMAWAIFSCDQVMAYFTISAVAVAMEAAMIGKYGSQQFQWMKTCHLYKRFCAQAGGAVACAVAASLNMVGVSLVSAFNLFRLYGSGKGRK

SEQ ID NO: 225510 - protein, 55 aa, Zea Mays
MMMDDWHFAAWFFFWFSFGDTSTVVTGCTWLIWLVLVNGVDSTFSAESCHDMQPY

SEQ ID NO: 225511 - protein, 468 aa, Zea Mays
MFADLCYFSVKSVQLTFVFLVLPCLLLGYLGQAAFLMENLDKSQQVFFLSIPSQAFWPVVFIATLAALIASRAMTTAIFSTIKQATALGCFPRLKIIHTSRKFMGQIYIPVMNWFLLVSCLAFVAVFGSINEIGNAYGIAELGVMMMTTVLVTIIMLLIWQVNIVIVLCFLNLFLGLELFFFSSVLGSAADGSWVLLVFAAVLYLVMYIWNYGTKLKYETEVKQKLSMDLLIQLGCNLGTVRAPGIGLLYNELVRGVPAIFGHFLTTLPAMHSMIIFVCIKWVPVPVVPQNERFLFRRVCPKNYHMFRCIARYGYKDVRKENHQAFEQLLIESLEKFIRREAQERSLERSLESDHNDDKDSEEEIASSSSRVIDESGGADNSALGSSMSLEEGSSMDNELSFIHKAKESGVVYLLGHGDIRARKESFFVKKLVINYFYAFLRRNCRRGIATLSIPHTRLMQVGMQYMV

SEQ ID NO: 225512 - protein, 561 aa, Zea Mays
MKAESGGVVRRSLQKTESAEMRWVVPGGANEDVEIESSDDGSVDTSATASGSRGGGCSDEDEGYENDEMLRQLLVRTGPRADSFDVEALDVPGVYRHQEFTLGSSIVLTLQTLGVVFGDVGTSPLYTFDVMFNKYSITAKEDVLGALSLVIYTLILIPFLKYTLIVLWGNDGGEGGTFALYSLICRNAKASLLPNQLPSDTRIANFNLKVPSVELERSLKIKERLETSSMLKKLLLMLVLFGTSMVIADGVVTSAMSVMSAVNGLKVGIASVNEGEVVMITVAFLIVLFSLQRFGTSKVGLAVGPALFVWFCCLAGIGMYNLRVYGPEVLQAFNPVYIYYYFERNPTEAWMSLGGCLLCATGSEAMFADLCYFSVKSVQLTFVFLVLPCLLLGYLGQAAFLMENLDKSQQVFFLSIPSQAFWPVVFIATLAALIASRAMTTAIFSTIKQATALGCFPRLKIIHTSRKFMGQIYIPVMNWFLLVSCLAFVAVFGSINEIGNAYGQHRHSSMLSQPLSGAGVIFLFLSFGKCSRWKLGAFGICSCIVFGNVHMELWNQIEVRN

SEQ ID NO: 225513 - protein, 262 aa, Zea Mays
MGLVCRVHSTSKSKFKLLYFELEDNGGLSLALQEDSAKTGKVTSAGMFFLGFPVYRFEQNNSAAAAKDPDSAFFKRLDGFQPCEVNELKAGSHYFAVYGDNFFKSASYTIEVVSAEPFSAQKEKLRSVEAKIIAKRSELSKFESEYREVLAKFTEMTSRYAQEMQTIDDLLKERNAIHASYTNNPTLQRSSSSSKGKSPSKGSRSEDDQTVKKEKKSKSQPMEGSKSDDEGPENKKEETPKDRIRRKKWFNIHLKVDKRRPC

SEQ ID NO: 225514 - protein, 344 aa, Zea Mays
MAAAALLRRIPAARAPATAFMAARPVSDSTAALTIETSVPFTSHLVDPPSRDVTTTPAELVTFFRDMSLMRRMEIAADSLYKAKLIRGFCHLYDGQEAVAVGMEAAITRSDSIITAYRDHCTYLARGGDLVSAFSELMGREAGCSRGKGGSMHFYKKDANFYGGHGIVGAQVPLGCGLAFAQKYKKEETATFALYGDGAANQGQLFEALNISALWKLPAILVCENNHYGMGTAEWRAAKSPAYYKRGDYVPGLKVDGMDVLAVKQACKFAKDHAVANGPIVLEMDTYRYHGHSMSDPGSTYRTRDEISGVRNGTQLKGLESCFWLTTWQLLLSSRIWRKKSGNK

SEQ ID NO: 225515 - protein, 87 aa, Zea Mays
MSSPHHPQVLTTARAQQCSLLQVPGFSGSRRPTSRTCRRHLAQAAAWRTSRTHSPFLPITCGQHLKRRKRRHKKTRTSRRKAGAAHR

SEQ ID NO: 225516 - protein, 948 aa, Zea Mays
MSSISILHRSCLRLGLLPFSPLRARATTLRLPLPLPQPRRHLHLPRRSAMSSAASRLSHIAAATGGGGGAAGESNESPPAASAATQEDDGLSSGDMGYRLPPKEIQDIVDAPPLPVLSFSPNKDKILFLKRRALPPLSDIAKPEEKLAGLRIDGNSNTRSRMSFYTGISIHKLLDDGTLGPEKEVHGYPVGARINFVTWSQDGRHISFSIRVDEEDSKSGKLRVWIADVESGEARPLFKSPEIYLNAIFDSFVWVNDCTLLVCTIPATRGDPPHKPSVPSGPKIQSNESKNVVQARTFQDLLKDEYDAKLFDYYATSQLVLASLDGTVKPIGPPAIYTSVDPSPDDKYIMLSSIHRPYSYIVPCGRFPKKVELWTVDGKFIRELCDLPLAEDIPITMSSVRKGKRSINWRPDKPSMLYWVETQDGGDAKVEVSPRDIVYMENAEPINGEHPEILHKLDLRYAGTSWCDESLALVYESWFKTRKIRTWVLSPDKKDVSPRVLFDRSSEDVYSDPGSPMMRRTVMGTYVIAKIKKEDGNIYVLLNGMGATPEGNIPFLDLFDINTGSKERIWESDREKYYETVVALMSDKTDGELLLDQLKILTSKESKTENTQYYLQTWPEKNQVKITNFPHPYPQLASLYKEMIRYQRKDGVQLTANLYLPPGYDSSKDGPLPCLVWSYPGEFKSKDAAGQVRGSPNEFPGIGATSPLLWLARGFVILSGPTIPIIGEGDEEANDRYVEQLVTSAEAAVEEVVKRGVAHPDKIAVGGHSYGAFMTANLLAHAPHLFCCGIARSGAYNRTLTPFGFQNEDRTLWEATNTYVEMSPFMSANKIKKPILLIHGEQDNNSGTLTMQSDRFFNALKGHGALSRLVILPFESHGYSARESIMHVLWETDRWLQNYCVNGTSKVDSVSEADSKNKTLSASGGSAAREGLNPEELSSLPRSLLWVG

SEQ ID NO: 225517 - protein, 1015 aa, Zea Mays
MIKSCTCTGRLSSSSAHNLTDTYISMTCKSCTGESTEDRGGPSCSGKLNNMGLELPRPIDLEVKWMTVKKRQRDTRRARASFGEDTSRDGIGSFCLSGCATNQEMAQDAPVSESEKFGVSILGRRFSDPMENVPIKKRRFHMDFSPSPPFTPLLVDPYEKIPGSSSKAVRSYEKHYKLKTQQIEYKVGNKGRFGDDDFSGIDILASAACESEMSGGILDGECSTLAHLPEERKLENTTGSSKLSLLHNMEDTLNIPGTSHCIYDMPLGSSRSAPDMKSLFVATPTILENLVESASAPKVNCSLYSALNNANEIEIVSDAKSTSVAIANSSDNPEKTIGCLKDTVVQTNHANATNAKSTSVAIANSSDNPEKTIGCSQDTVVQTNHANATRDSRLHWDLNVAMEAWGTDCGAVEDPLVATVSDHDDARNDMNKPGTSHHFESRDGSVVDHSVDTHMDDALKHVSANTKDTCDSPADSPSHPSRNLQLLESGYVGSDALAETMDLPDQKNSRFASAMDSHIRSDPEPALIMEHFASASHVEKINGSHPEPVQCDGLSNMSSVNVHIGSNSLQTSELGTTLKPLASILVSEESKNLPTVGTSHKKVTDFGWSDNKLEEASEQSISESKNQELLDVDSETSKKGEHDTGIFYANERTKYAENLIHPEDNHGSSNCDMAHVHEENGAVAMINSKDSLITCANSSTVETYYISDAAPQVPVPSSECHKLECFTDAGSTVDSKSAAHSYQNGCENELGKVISNVRSDQCYETDTSHISKNLAGVEKVYVEEDDSQYEDGELRESGDCYWVDDGYEDVKHANWHYQVSDYKNEEATPGLTSLHTDSVANNVVIPVANDNGPQSRKEDIAVSPVSSKCSWLTNCLDGGSIADGKSQSIHLRGDTNMYGSNPSRVAVRSATTVSQSERCNDALGDMLNIRMKNTGWDMMPEDQKHSQHDARDVTDSSNRCVLSSDAARDDDSLQKKGLLNRDLQGVERQKSFDRPQRNELSRLKIWKGNGLSWIA

SEQ ID NO: 225518 - protein, 1202 aa, Zea Mays
MMGTECIMATLGGDPEPSIPPGFGPFVALALQGIQNNAKSADAHSSSAQAAHCMEKDVEVLEHGSAHGWSDTPASTSGTHSCRRSLRNRPPIDYSQFDLISDEESDVESAEKGVGLVRHRRQLPKGVLRGCAQCADCQKVVARWNPSGARRPVLEEAPVFYPSEEEFKDTLKYIESIRSTAEPYGICRIVPPPSWKPPCLLKEKNIWECSKFCTRVQKVDKLQNRKSSKKGRRGGQNQERFGFEPGPEFTLQTFKKYADDFREQYFKKEVPADSPPSVEDIEGEYWRIVEKPTEEIEVVYGADLETGTFGSGFPKSSPEVKSDVEHKYLESGWNLNNLPRLQGSVLSFEGGDISGVLVPWMYVGMCFSSFCWHVEDHHLYSLNYMHWGAPKMWYGVPGKDAVNLEAAMRKHLPDLFEEQPDLLHNLVTQFSTSLLKSEGVPVYRCVQHEGEFVLTFPRAYHAGFNCGFNCAEAVNVAPIDWLPIGQDAVELYRKQARKITVSHDKLLLGAAREAIRAHWDILFLKRNTADNLRWKSMCGLDSTICKSLKARIDLELAQRQNICSPSQSRKMDAEFDSTDRECALCYYDLHLSASGCPCCPGKYTCLVHAKQLCSCDWDKRFFLFRYDINELNMLADALGGKLSAIHRWGVSHLGLSLRSCVKREKDQDSKTPRRVADGPRRSYMSQASTVSLAPSLVCNEQNNNGNKMLDKASLETDTCPFTEQIKSGTISLQEAHMKTEVSCTLNSSVIPEGHKSSLSLPVPSGHSLSSNFATRSLSTAGESVKNTYDLVVFKGSRESSRAGDCISSPGVHHNIPPIMIDQGSNMNPSMESSNNSHRLMASNTNATQFYSYKDQMHVTPETRASVMTEKDSSQASAASSQPFAGTVLRAQSVSQEASPSVFTSKPLIDSSLVKNTYVGLSSGGAHIGHPNFGNQQPSDECLKRKSESLSGSEARGHSAALVQPALGNHNGSGGAHKGLRMANVVHRFKSLVESLEIGVVLSGRLWSSSQAIFPKGFRSRVKYFSIVDPTQMAYYISEILDAGPQGPLFMVTLENCPGELFINVSPAKCWSMVRERLNMEIRRQLSTGRANLPALQPPGSVDGFEMFGLLSPAIVQAIEARDRDRICTEYWRSRPHVVTEDRATAPPQAQGPLHALRGLFQRANRNELLALRSLLVSNISPDDFSRRQATQILDEEIAKQWR

SEQ ID NO: 225519 - protein, 666 aa, Zea Mays
MCGLDSTICKSLKARIDLELAQRQNICSPSQSRKMDAEFDSTDRECALCYYDLHLSASGCPCCPGKYTCLVHAKQLCSCDWDKRFFLFRYDINELNMLADALGGKLSAIHRWGVSHLGLSLRSCVKREKDQDSKTPRRVADGPRRSYMSQASTVSLAPSLVCNEQNNNGNKMLDKASLETDTCPFTEQIKSGTISLQEAHMKTEVSCTLNSSVIPEGHKSSLSLPVPSGHSLSSNFATRSLSTAGESVKNTYDLVVFKGSRESSRAGDCISSPGVHHNIPPIMIDQGSNMNPSMESSNNSHRLMASNTNATQFYSYKDQMHVTPETRASVMTEKDSSQASAASSQPFAGTVLRAQSVSQEASPSVFTSKPLIDSSLVKNTYVGLSSGGAHIGHPNFGNQQPSDECLKRKSESLSGSEARGHSAALVQPALGNHNGSGGAHKGLRMANVVHRFKSLVESLEIGVVLSGRLWSSSQAIFPKGFRSRVKYFSIVDPTQMAYYISEILDAGPQGPLFMVTLENCPGELFINVSPAKCWSMVRERLNMEIRRQLSTGRANLPALQPPGSVDGFEMFGLLSPAIVQAIEARDRDRICTEYWRSRPHVVTEDRATAPPQAQGPLHALRGLFQRANRNELLALRSLLVSNISPDDFSRRQATQILDEEIAKQWR

SEQ ID NO: 225520 - protein, 421 aa, Zea Mays
MVKRSKKSKSKRVTLRQKHKVLRKVKEHHRKKRKEAKKEGKAGQRKKVEKDPGIPNEWPFKEQELKALEARRAQALQELELKKEARKERARKRKLGLLEDEEIANLASAASAQGSEFAAKDAAKDKAPLTVAKSNDHSERSFYKELVKVIEASDVILEVLDARDPLGTRCIDMEKMVRKADPSKRIVLLLNKIDLVPKEAVEKWLTYLREEMPTVAFKCNTQEQRTKLGWKSSKLDKTNIIPQSSDCLGAENLIRLLKNYSRSHELKLAITVGIVGLPNVGKSSLINSLKRSRVVNVGSTPGVTRSMQEVQLDKKVKLLDCPGVVMLKSSNSGVSVALRNCKRVEKMEDPVTPVKEILGICPHEKLLSMYKVPSFSSVDDFLQKVSTVRGKLKKGGVVDVEAAARIVLHDWNEEMLWRTQM

SEQ ID NO: 225521 - protein, 712 aa, Zea Mays
MASPAGGESPAKPVLLHGDLDLWILEARLLPNMDMFSEHVRRCFAACRPPSSCGTKHPPPAAAGRRHHHHHRNIITSDPYVTLSVSGAVVARTAVIPNSQDPVWEERFAVPLAHRAADLEFQVKDNDTFGAQLIGTVAVPADRVVSGDEVEDWFPVIGTNGKPYKPDTALRLRFKFQPIADNPAYRHGIAGDPDHRGIQDSYFPLRHGGQLTLYQDAHVREGDLPEIELDNGKTFQHNACWEDICHAILEAHHMIYIVGWSVYDKVRLVREPSPSRPLPEGGDLTLGDLLKFKSQEGVRVCLLVWDDKTSHDKFFIKTGGVMATHDEETRKFFKHSSVICVLSPRYASNKLSIFKQQVVGTLFTHHQKCVLVDTQARGNKRKITAFIGGLDLCDGRYDTPEHRLFKDLDTVFQNDYHNPTFSAGAKGPRQPWHDLHCRIDGPAAYDVLTNFEQRWRKATKWRDRFRRVSHWKDDALIKLERISWILSPSPNVPNNHPSLWVSKEEDHENWHVQVFRSIDSGSLKGFPSDCKAASKLNLVCRKNLVIDKSIHTAYVRAIRSAQHFIYIENQYFLGSSYAWPSYVNSGADNLVPIELALKIASKIKAGERFAVYVVIPMWPEGVPTAASVQEILFFQAQTMEMMYKIIADELKATDNKDMHPEDYLNFFCLGNREEPPSNGSPESEKSTDKSAGLSFEISTVHDLCSRKRDDCG

SEQ ID NO: 225522 - protein, 86 aa, Zea Mays
MEQQRPASMTRAVPESNNNQHHSPLEGRMRHTPAADKRLDGPKNLPPLAMQRRSDGKGTRVNRRCRRSSCARSASPFFTFYRGAKD

SEQ ID NO: 225523 - protein, 51 aa, Zea Mays
MDPLKKMMARGVFSDLQNFSGHMEHLVSADDLNRMARRLRSSEIHLRSTDF

SEQ ID NO: 225524 - protein, 61 aa, Zea Mays
MALPSCSWYGCSLSGSTRGCEPAANTQLVFLIVKCSEMDECDVCNSFSLLCCISSDDACDG

SEQ ID NO: 225525 - protein, 172 aa, Zea Mays
MMHTNSYKTDGGRRTWDNTTPVNNVDSANVVLQGGEAPRTTANTTSEDCIQQVHQSPGSPQVVWQDNIDPDNMTYEELLDLGEAVGTQSRGLSQECISLLPITKYKCGFFSRKKTRRERCVICQMEYRRGNLQITLPCKHVYHASCVTRWLSINKVCPVCFAEVPGEDSLRQ

SEQ ID NO: 225526 - protein, 94 aa, Zea Mays
MAGIIIKMLVLCAGWEIARGIVFSSLGSPALCVPVPCFVLFGFSFYASSPVLLQIERIFSSRGVLQIERGYIATQHNTQVSLYDTSSSPHEIYC

SEQ ID NO: 225527 - protein, 300 aa, Zea Mays
MDRQRGRAPRTHHLPLAAGRAAGNPRRRTSGTTYSRWPGFFVTIWIAAVMFKSNDILCKQTALKRERKIPVLVGITILFVVHVSGFYWCYKNGDLIRPLMMLPPKEIPPFWHAIFIILVNDTMVRQTAMVVKCLLLMYYKNSRGRSYRRQGQMLTIVEYFLLLYRALLPTPVWYRFFLNKEYGSLFSSLTTGLYLTFKLTSVVEKVQSFLTALRALSHKDFHYGSYATSEQVVAAGDLCAICQEKMHVPILLRCKHIFCEDCVSEWFERERTCPLCRALVKPADLRSFSDGSTSLFFQLF

SEQ ID NO: 225528 - protein, 123 aa, Zea Mays
MRRSKSRAGRGERIRASDDAATIMDAGGWAARLEAPPPVAVVTGASRGIGRAIAVALGGAGCKVVVNYAKSGVEAEEVCREIEASGGTAVSFAADVSCEADVESMMRAVSRVEYKIHPSGAVA

SEQ ID NO: 225529 - protein, 957 aa, Zea Mays
MAFFSNSGSKADSEGYNLNEKADDDGIHESIRDGNDGLNSRQWNLNEKAEDAYHSEAEQYESGQSGLYASRQHVQRGGRSSGGPWGTNFLKDSRSKQTAKEVASNSGRGMDAANSHDDMDGSREDDELNRANGEVPAEEMLSDDYYEQDGEDQIESLHRGGMKQSSCSTSGGAAKSGSRQMKKMSKYNAYDNDEYNDENDDDSDADEDDPADMDFEPDGETDKATDKDKFMDSENSDGDDDDDLELSDDEDDFVENRRQPKRLKIVATKTSKGGQLPMPVQPKRGVSHSDEEYFSGKDSDVPSDSDFKHIPKKPDRLHQKPVGRSDVAPISSHNELRTSGRRRTVKKISYAESEESDDSEEKSNKRQKLIKEEPEEEDGETIEKVLWHQPKGVAEEAIRNHRSAQPTVASLTSDFDQQWDELEFYIKWKGQSYLHCQWKILSELQSVSGFKKVINYTKRVSEEQRYKRALSREEVEVERIFADRVSKADGDDLVPEYLVKWQGLPYAESTWEKDTDIDFAQDAIDEYKAREAASAILGKTVDFQRKKSKASLRRLDGQPEWLKAGKLRDYQLEGLNFLVNGWRNDTNVILADEMGLGKTIQSVSMLGFLHNAQEINGPFLVVVPLSTLSNWAKEFRKWLPNMNVVVYVGNRASREMCQQHEFFSDKKGGRHVKFHTLITTYEVILKDKAVLSKIKWNYLMVDEAHRLKNCEASLYTTLLEFSTKNKLLITGTPLQNSVEELWALLHFLDPVKFNSKDSFVERYKNLSSFNETELANLHKELRPHILRRVIKDVEKSLPPKIERILRVEMSPLQKQYYKWILERNFQNLNKGVRGNQVSLLNIVVELKKCCNHPFLFESADHGYGGDSIGDRNKVERIVMSSGKLVLLDKLLVRLRETNHRVLIFSQNTSLFGDFSFRGLMVVQEQIFVIKPWNTLMLLEVMISVFFYPHVPEDLVLI

SEQ ID NO: 225530 - protein, 93 aa, Zea Mays
MFPCLGDWAGVPQKSYLLSLRAPCTYIWRWSRWPSIAKLSFCRRKSFGASYFFLLMERILVLLDCLDQCQVKFGSSSFEQVSRFGSGSCEELL

SEQ ID NO: 225531 - protein, 1612 aa, Zea Mays
MSSIEDRSLLRTTRFARRRVIRCVVASPGCPNRKSRTASPNVKVAAYSNYAPRLLVESSSKKSEHHDSSRHREETIDTYNGLSGSDAAELTSNRDVEIEVDLQHISEEELPGKVSINASLGEMETVDEAEVEEDKFEVDTSGIVLRNVAVREVDPKDEHNAKDVFVVDSSGTAPDNAAVEEVVDEAEVEEDMVDVDILGLDLNNATIEEIDLMEEALLENFDVDSPGNASSGRTYGGVDELGELPSTSVDCIAINGKRRSLKPKPLPIVRFQEQEQIVLSIVDEEGLIASSCEEGQPVVDYDKQEENSTAFDEQKQLTDDFPEEGISIVHFPEPNNDIVGSSKFLEQKQELDGSYKQDRSTTGLHEQDQSVVSSHGQDKSIVGVPQQIQYNDQSIAGSHRQDQSIAGAPEQIQSVAGYIKPNQSIVGSCKQHELIIPEPKKIESIISYNEIDQSIVGSHKQDKSVVSVPEQIQSIVSHSKPNQSTVDSYRQAESIIGVPEKVQSITSYDKLDQSIVGSLKQDEPIISVPEKIQSIVHYTKPNQSIVGLPKQQQSIVHIVEPKQSIDGFPKQDLSIVGISNEFQTKQLATVGTHDGLLMKGVEAKETSQKTEGDTLQATFNVDNLSQKQEGLTKEADEITIIEKINDEDLVMIEEQKSIAMNEEQTIVTEEDIPMAKVEIGIDKAKFLHLLSEEESSWDENEVGIIEADEQYEVDETSMSTEQDIQESPNDDLDPQALWSMLQELAEKNYSLGNKLFTYPDVLKADSTIDLYFNRDLSAVANEPDVLIKGAFNGWKWRFFTEKLHKSELAGDWWCCKLYIPKQAYRMDFVFFNGHTVYENNNNNDFVIQIESTMDENLFEDFLAEEKQRELENLANEEAERRRQTDEQRRMEEERAADKADRVQAKVEVETKKNKLCNVLGLARAPVDNLWYIEPITTGQEATVRLYYNINSRPLVHSTEIWMHGGYNNWIDGLSFAERLVHHHDKDCDWWFVDVVVPERTYVLDWVFADGPPGSARNYDNNGGHDFHATLPNNMTEEEYWMEEEQRIYTRLQQERREREEAIKRKAERNAKMKAEMKEKTMRMFLVSQKHIVYTEPLEIHAGTTIDVLYNPSNTVLTGKPEVWFRCSFNRWMYPGGVLPPQKMVQAENGSHLKVTVYVPRDAYMMDFVFSESEEGGIYDNRNGLDYHIPVFGSIAKEPPMHIVHIAVEMAPIAKVGGLGDVVTSLSRAVQDLGHNVEVILPKYGCLNLSNVKNLHIHQSFSWGGSEIKVWRGLVEGLCVYFLEPQNGMFGVGYVYGRDDDRRFGFFCRSALEFLLQSGSSPNIIHCHDWSSAPVAWLHKENYAKSSLANARVVFTIHNLEFGAHHIGKAMRYCDKATTVSNTYSKEVSGHGAIVPHLGKFYGILNGIDPDIWDPYNDNFIPVHYTCENVVEGKRAAKRALQQKFGLQQIDVPVVGIVTRLTAQKGIHLIKHAIHRTLERNGQVVLLGSAPDSRIQADFVNLANKLHGVNHGQVRLSLTYDEPLSHLIYAGSDFILVPSIFEPCGLTQLVAMRYGTIPIVRKTGGLISRAAARQGSSTLSSMWTMTRNEPEIEALSPTGLALTELIATVLTTR

SEQ ID NO: 225532 - protein, 80 aa, Zea Mays
MVACDFDLNVTFISTRWEGSATDARVLRAAMNSGFQVPPGKFYLVDGGYANTPSFLAPYRGVRYHLKEYGAGRRRPQNYK

SEQ ID NO: 225533 - protein, 134 aa, Zea Mays
MIYKLEIMTIELFSMYGKQFKIDPQDFQDSEPDILANSASSIIERIKENSDQCAAALRSLCRRKKGLTVEEASLIGVDSLGIDVRAFSGLEVKTVRFSFNAQALSERSAEKKIRRMLFPRYQRKNVKASTEDES

SEQ ID NO: 225534 - protein, 242 aa, Zea Mays
MPATMRAIHPIYFAKCLTKAIHNNNGEKMDSPSNGLSIVGYLRPAFIEEESYLRSMFHGDNGGYSSDWKVNETDEYNRETRPVSGTNRLIDDDKSRFDFNHAETRTDSMIYKLEIMTIELFSMYGKQFKIDPQDFQDSEPDILANSASSIIERIKENSDQCAAALRSLCRRKKGLTVEEASLIGVDSLGIDVRAFSGLEVKTVRFSFNAQALSERSAEKKIRRMLFPRYQRKNVKASTEDES

SEQ ID NO: 225535 - protein, 369 aa, Zea Mays
MLVSLWLTDCGRGIGSGLYRQQWFNDSGAEACFNTGNDATFQYGIYEQAVLLTTEDSAVKRYIYSLFWGFQQISTLAGNLVPSYFIWEVLFTMAIIGLGLLLFALLIGNMQNFLQALGRRRLEMQLRRRDVEKWMSHRRLPEDLRRRVRRAERFTWAATQGVNEEELLSNLPEDIQRDIRRHFFRFLNKVRLFTLMDWPILDAICDKLRQNLYISGSDILYQGGTVEKMVFIVRGKLESISADGSKAPLHDGDVCGEELLTWYLEHSSANRDGGKIKFQGMRLVAIRTVRCLTNVEAFVLRASDLEEVTSQFARFLRNPRVQGAIRYESPYWRTIAATRIQVAWRYRKRRLKRAEKSRLSEETYASLGS

SEQ ID NO: 225536 - protein, 857 aa, Zea Mays
MGSHDGEDEELPPPPPVPPDVIPIKAEDAVGESPANHILKPKRLLMDRPGIGRKGQPTQLYSNHFKVAVKSTEDVFFHYYVNLKYEDDRPVDGKGIGRKVIDKLQQTYRAELSNKDFAYDGEKSLFTVGGLPQKKNEFTVVLEDVSTGKTAANGSPGGNDSPGGGDRKRVRRPYQTKTFKVEINFAAEVPMSAIGQVIRGEESENSLEALRVLDIILRQHSAEQGCLLVKQSFFYNNPSCFVDLGGGVMGCRGFHSSFRGTQSGLSLNVDVSTTMIVKPGPVIDFLLSNQNVNDPSRIDWQKAKRALKGLRIRTTPANSEFKIFGLSERICKEQTFPLRQRNGSNGDCDTIEITVYDYYAKKGIDLKYSGDFPCINTGKAKRPTYFPIELCSLVPLQRYTKALSTLQRSSLVEKSRQKPEERMTVLNDALQRSNYDSDPMLRACGVSVAPKFTQVEGRILQAPKLKAGNGDDIFSRNGRWNFTNRKFYETCSVNKWAVVNFSARCDVRNLIRDLMRNASAKGIQMEEPFDVFEESPSMRRAPVSRRVDDMFGQIKSKLPGAPRFLLCLLPERKNCEIYGPWKRKCLAEFGIVTQCLAPLRVNDPYLLNLLMKINAKLGGLNSLLQVEASSSIPHVSQVPTIILGMDVSHGHPGQDRPSVAAVVSSRQWPLISRYRASVHTQSARLEMMSSLFKPRGTDDDGLIRESLIDFYTSSGKRKPEHIIIFRDGVSESQFTQVINIELDQIIEACKFLDEKWSPKFTVIVAQKNHHTKFFQTASPDNVLPGTVVDSKVCHPKNFDFYMCAHAGMIGTTRPTHYHVLHDEIGFSADEMQEFVHSLSYVYQRSTTAISVVSVFVF

SEQ ID NO: 225537 - protein, 234 aa, Zea Mays
MIRKLAEEDPDEYSNKDKTDEEKSEMEEKKGQYAKFWNEFGKSIKLGIIEDATNRNRLAKLLRFESTKSDGKLASLDEYISRMKSGQKDIFYITGSSKEQLEKSPFLERLTKKNYEVIFFTDPVDEYLMQYLMDYEDKKFQNVSKEGLKLGKDSKLKELKESFKELTDWWKKALESGFNLPDPKEFASSIYKSVQKGLDLSPDATVEEDEAEEQPEVEEKEPEPEPSSYDKDEL

SEQ ID NO: 225538 - protein, 389 aa, Zea Mays
MALRAVELRRFLLRRIGGGEAALPPLAWRGRPASTSAPADDELAGKSAYEVLGVGETSSSAEIKASFHRLAKETHPDVAAAAGSRRFLQILAAYEILSDSQRRAHYDSYLRSQRRVVGKHPRPSQFVYPSGSGSGIVVPRESNVVEWLKWYRLTIDDIVTKKRVATGSGYFERLESELYTAIHAAYYGPDVDSMDVLPDCFEAEERSAYETSELLHLVSGRDLFGIVTVTDSVKELSDVCREKLVPSGCRSSEFTHVVSRNANKNSISMNPVDMNKQEMRYENDVPSSDSFKDIELQICGKLVATATRSPNCDCIDKSDLEEDHIHVYLVPNANISDLTHGKLLLGTITGLATTGEEGSCCVYDGHNIKTHIIMKHRTLMKYGCPEDHG

SEQ ID NO: 225539 - protein, 526 aa, Zea Mays
MVWEVDDGKLSERTISDELPQESSKAEQDVSRPEQDGTCMNGNTGTAISSGATLPDTSESDQGPPKEKTEQPCYADDITDTDQLKSDHNEGAEFDTAKPEKKAAVDSDKSAKLKLSDKCEAPVHSDADTKKEASAEGTDGAADDTSTAADCTPKPKRGRPPGPKSSQKKAAGKDQSSGSDLKKVNEAGDSAGKLAKRSAKDEKSTKKAGEGESSKKTQKYNSKQQKDENLSEDPAKDLSLKEMITPKSSTKVPGRTKGQSTENSTPKMKQEQETEEPPRSRKSKGLDKSLVGARIKVWWPDDKMFYNGVVESFDSVSKRHKVAYDDGDVEVLLLRDEKWEFISEEKGASVASETPGGRKRKADAVKEENTETPKSDAVDHPKKRGRPKGVRSSNGTPSNSATPSTKGKTAGKNTKETPKTGPNLIKELEKSSKDKASVSTETKDELPKDDRSASRPKEAISKGKDSKDEGKSTEGKARPGRKLKNAGTPAGDADKEKGKEKEVKAAEIEQEAPGNASTGKKRRRKA

SEQ ID NO: 225540 - protein, 762 aa, Zea Mays
MAEDPAAEQETRQLEDRLREVGERLQAPPDDAEDLLNLLIEVEECLLKVEQSPPESTSNALQLATAALVKKELLAHADSNIRLAVASCISEITRITAPDAPYDDDAMKDVFSLIVEAFKHLDDIESPFFGRRTSILDTVAKVRSCVVMLDLECDDLINDMFHHFLRTVNSGHSEAVICCMETIMRLVIEESEDVQPQIASCLLQNVRKEEKESSSASFELAEKVIGTCREKLKPVFLQSLKGTSLSEYSQIVASVCEDVSDDREDNNADPSGKDTVDDGKLSERTISDELPQESSKAEQDVSRPEQDGTCMNGNTDTDQLKSDHNEGAEFDTAKPEKKAAVDSDKSAKLKLSDKCEAPVHSDADTKKEASAEGTDGAADDTSTAADCTPKPKRGRPPGPKSSQKKAAGKDQSSGSDLKKVNEAGDSAGKLAKRSAKDEKSTKKAGEGESSKKTQKYNSKQQKDENLSEDPAKDLSLKEMITPKSSTKVPGRTKGQSTENSTPKMKQEQETEEPPRSRKSKGLDKSLVGARIKVWWPDDKMFYNGVVESFDSVSKRHKVAYDDGDVEVLLLRDEKWEFISEEKGASVASETPGGRKRKADAVKEENTETPKSDAVDHPKKRGRPKGVRSSNGTPSNSATPSTKGKTAGKNTKETPKTGPNLIKELEKSSKDKASVSTETKDELPKDDRSASRPKEAISKGKDSKDEGKSTEGKARPGRKLKNAGTPAGDADKEKGKEKEVKAAEIEQEAPGNASTGKKRRRKA

SEQ ID NO: 225541 - protein, 368 aa, Zea Mays
MEARYGGVSMLGHGDMSFPYLIESFPMLLLCSEDNHLEPLVDFLEHIGIPKPKIASVLLLFPPIILSDVENDIKPRIREWEKAGIEHDYITRMLLKYPWILSTSVIENYSKMLLFFNQKGISSTVLAIAVKSWPHILGSSSKRMNSVLELFRVLGISKKMVVPVITSSPQLLLRKPDQFMQNVLFFREMGVDKKTTGKILCRSPEIFASNVDNTLKKKIDFLINFGVSKHHLPRIIRKYPELLLLDLNCTLLPRINYLLEMGLSKKDLCSMISRFSPLLGYSIELVMKPKLEFLLRTMKKPLKAVVEYPRYFSYSLEGKIKPRFWLLQSRNIDCTLTEMLAKNDELFAEEYLELGGLLEKPVQSSIGG

SEQ ID NO: 225542 - protein, 276 aa, Zea Mays
MLLKYPWILSTSVIENYSKMLLFFNQKGISSTVLAIAVKSWPHILGSSSKRMNSVLELFRVLGISKKMVVPVITSSPQLLLRKPDQFMQNVLFFREMGVDKKTTGKILCRSPEIFASNVDNTLKKKIDFLINFGVSKHHLPRIIRKYPELLLLDLNCTLLPRINYLLEMGLSKKDLCSMISRFSPLLGYSIELVMKPKLEFLLRTMKKPLKAVVEYPRYFSYSLEGKIKPRFWLLQSRNIDCTLTEMLAKNDELFAEEYLELGGLLEKPVQSSIGG

SEQ ID NO: 225543 - protein, 373 aa, Zea Mays
MAAAATFGFLHPLIRKPLVPPLYILPLPTQPHAKTHPRSLPLLFLLPRRRRGGPIAALPNTTSSSTNASASPTYDVREAEAAVADLLREGGASADDAAAIAARAPAYAAMLADGVRELDELGLWASWSSGASARLGLSGVVEMEMGRLGFRRKVYLMGRSRPDHDVVPLLESLGVRLSSAKLIAPYVASAGLTVLIDRVKFLKEMLFSSSDYAILIGRNAKRMMTYLSIPADDALQSTLSFFEKMEARYGGVSMLGHGDMSFPYLIESFPMLLLCSEDNHLEPLVDFLEHIGIPKPKIASVLLLFPPIILSDVENDIKPRIREWEKAGIEHDYITRMLLKYPWILSTSVIENYSKMLLFFNQKGFPVQSSLLL

SEQ ID NO: 225544 - protein, 568 aa, Zea Mays
MKRGFSWNQRGECPSFETDCVITIDDIYKWLISTFFLWFVLAIYFDNILPNVNGVRKSVFYFLMPSYWTGKGGKMEEGGLFSFFGSSRPADDATPTDEDVLAEQNLVKEQAANNAVDPNVAVQIHGLRKTYPGTFSIGCCCKCSKSKPFHSVKGLWVNLEKDQLFCLLGPNGAGKTTTISCLTGITPITGGDAFIYGHSVRSTVGMSNIRRMIGVCPQFDILWDALTAKEHMELFASIKGLHPAAITSVAEESLAKVKLSQVTNARAGSYSGGMKRRLSVAIALIGDPKLVFLDEPTTGMDPITRRHVWDIIEEAKKGRAIVLTTHSMEEADILGDRIAIMAKGKLRCIGTSIRLKSKFGTGYIANVNFSGNGHMQSPNINSNTEAPVNPNIEAVKWFFKERLDVNPKEESRTFLTFVIPHHKEPLLTRFFGELQDREGEFGISDIQLGLTTLEEVFLNIAKQAELETSTAEGTLVTLNLSSGTTIQIPKGARFVGIPGTETEEHPRGIMVEVYWDQDENGSLCISGHSDEMPVPVHAELRRPPSLSRRASMDRGRPVGYMIDLNQVP

SEQ ID NO: 225545 - protein, 176 aa, Zea Mays
MANAGGGAAEEGEWLKVAQLRALVQEDHRAKEVDNLTLRRFLRARGHNVDKAAAMLLKFLRWRAEAAPGGGTVREEQVRGELEQDKIYMGGVDRTGRPIIVGLLAKHYSANRDMAEFKVLWSTSSTRSVPGSPEGRRSSSPSWISRAGATQTATSGPTSRPLRSCRTTTRSGWARR

SEQ ID NO: 225546 - protein, 413 aa, Zea Mays
MSKMHPEFRYKTEFQSHEPEFDYLKSLEIEEKINQIKWCQATNCALFLLSTNDKTIKFWKVQEKKVKKVSEMNLDRSTAPTNGSPGGTGYLRPSLSNGNVLKPGGLPLLRLPVVTTQETSLAASCRRVYAHAHDYHINSISNNSDGETFISADDLRINLWNLEISNQSFNIIDVKPTNMEDLTEVITSAEFHPTHCNTLAYSSSKGSIRLVDLRQSALCDNHSQIFEQHEAPGSRSFFTEIIASISDIKFSKDGRHILSRDYMTLKLWDVKMNSGPVATFQVHEYLRPKLCDLYENDSIFDKFECCQSGDGLRVATGSYSNIFRVFGCRSGSSEATTLEATRNPTRRQVQTTSRATRSLSTLTRAVRRGGESTGIDANGNSYDLSTKLLHLAWHPSENLIACAAANSLYMYYA

SEQ ID NO: 225547 - protein, 285 aa, Zea Mays
MAARRSRGWARGAAAFAAVALAVGAGRRYGWDGASAVAAFREAQGALGHWAAPAYVAAHALTLALCPPYAIFFEGGAALIFGFLPGVACVFSAKVLGASLSFWIGRAIFRYFTSAMEWLQRNKYFHVVVKGVERDGWKFVLLARFSPLPSYIINYALSATDVGFFRDFLFPTVIGCLPMILQNVSIVSLAGAAVASTTGSNKSHIYSYLFPAIGIVSSVLISWRIKQYSSALAVPEELQSSPTNGDHNGDAKLASAPSKNTGSGKTRKRRMYAPWLPRASGESCP

SEQ ID NO: 225548 - protein, 480 aa, Zea Mays
MSRQVVVRQCCQVWLVLNGKHISTSNDHLEYSENIGYGGGSSGILASIHELGEESDGYVTPRSDLVDETMDEESAEMNDSDQLVTEDETLTEQGTEESVTSEDMENFFQENADQSDEIQNFRNIADKAEKIMEEIDRLQKKLKQLQGEERNHDERSLSPRQMAASLKRKSLSEPRYPELQIPENIEQFSMSQIEKATDNFHSRNFIGGGGYGPVYKGKVGSTSVAIKLLKPRGRQGFSEYQQEVVVLSKLEHPHIVRLIGVCPESCGLVYEHLPNGTLKDRLSKGLLWKDRVRILGELRSALAYLHSRRPHAIIHADVKLTNILLDAGNASRLGDFGTARAVHVKPLEEETIGRRTNPMGTAGYMDPVFFMTGELTTESDVYAFGMVILQMLTGLLDLNVAEQAREAVKMDAVHSVLDASAGPWPEVQAEKLMKLALRCCSLERRRRPAITSDAEWRSLDILRAMVNPASKSWKWNSHAS

SEQ ID NO: 225549 - protein, 269 aa, Zea Mays
MDEEEVHIAVGKNSRKEKANILWAAANFPRATIVLVHVHWPSKWMPFMGGKVLYKFADEKEKEMHRGREMKVMVNMLSQYKKMCGTRKVSAHYLTHDDTVAGVVNLIKKLKIKRIVIGSRNMSRQVVVRQCCQVWLVLNGKHISTSNDHLEYSENIGYGGGSSGILASIHELGEESDGYVTPRSDLVDETMDEESAEMNDSDQLVTEDETLTEQGTEESVTSEDMENFFQENADQSDEIQNFRNIADKAEKIMLERFQVQSDTNEQGLS

SEQ ID NO: 225550 - protein, 71 aa, Zea Mays
MVLKTELCRFSGQKIYPGKGIRFIRADSQVFLFANSKCKRYFHNRLKPAKLTWTAMYRKQHKKILNRGEYG

SEQ ID NO: 225551 - protein, 246 aa, Zea Mays
MFSLLQGGFAPYKIVKIAEMGGIISGDSPRHSSPASKLEKKMVDAMQQRALKGTSVKSFNSVIMKFPKIDESLRNCRTIFQEFDEDSNGEIDQLELKRCFQNLGIESTDEEIKDLFEACDIYEHMGMKFNEFIVFLCLVYLLNDPAVSEARKRMGLGNLEPTFETLVESFVFLDKNKDGYVSKSEMIQAINETIGGERSSGRIGMRRFEEMDWDKNGTVTFKEFLFAFTRWVGIDNEDDDDEDKEE

SEQ ID NO: 225552 - protein, 213 aa, Zea Mays
MFSLLQGGFAPYKIVKIAEMGGIISGDSPRHSSPASKLEKKMVDAMQQRALKGTSVKSFNSVIMKFPKIDESLRNCRTIFQEFDEDSNGEIDQLELKRCFQNLGIESTDEEIKDLFEACDIYEHMGMKFNEFIVFLCLVYLLNDPAVSEARKRMGLGNLEPTFETLVESFVFLDKNKDGYVSKSEMIQAINETIGGERSSGRIGMRRFAMVKK

SEQ ID NO: 225553 - protein, 357 aa, Zea Mays
MTASPSPLSSGVYWAGSETAVPLALLDRGGKKNKREAGRSSRGEDRRMQQQMAATVEEQMMVKAIREESSWEVLPKRIQAALVSKEEWHRRVVNYCIRKRLPWSSCFARKVCKEGDYYEDLMRYLRKNLALYPYHLADFICRVMRISPFRYYCDVLFEAMKNEQPYDSIPNFSAADALRITGVGRNEFIDIMNKCRSKKIMWKLNKSIAKELLPAEPADLAIEPWWGVRFVNFTLEEFKLSEDETSAIDKICKEEVNSYVLFDPEVVRGLYRRGMVYFDVPVYPDDRFRVSRLEGFVSNKDQSYEDPIEELLYAVFVVSSENATVAELATTLQVDLYQLQAAASFACRLGWAVKLLD

SEQ ID NO: 225554 - protein, 245 aa, Zea Mays
MTASPSPLSSGVYWAGSETAVPLALLDRGGKKNKREAGRSSRGEDRRMQQQMAATVEEQMMVKAIREESSWEVLPKRIQAALVSKEEWHRRVVNYCIRKRLPWSSCFARKVCKEGDYYEDLMRYLRKNLALYPYHLADFICRVMRISPFRYYCDVLFEAMKNEQPYDSIPNFSAADALRITGVGRNEFIDIMNKCRSKKIMWKLNKSIAKELLPAEPADLAIEPWWGVRFVNFTLEEFKKTRHQR

SEQ ID NO: 225555 - protein, 358 aa, Zea Mays
MTASPSPLSSGVYWAGSETAVPLALLDRGGKKNKREAGRSSRGEDRRMQQQMAATVEEQMMVKAIREESSWEVLPKRIQAALVSKEEWHRRVVNYCIRKRLPWSSCFARKVCKEGDYYEDLMRYLRKNLALYPYHLADFICRVMRISPFRYYCDVLFEAMKNEQPYDSIPNFSAADALRITGVGRNEFIDIMNKCRSKKIMWKLNKSIAKELLPAEPADLAIEPWWGVRFVNFTLEEFKKLSEDETSAIDKICKEEVNSYVLFDPEVVRGLYRRGMVYFDVPVYPDDRFRVSRLEGFVSNKDQSYEDPIEELLYAVFVVSSENATVAELATTLQVDLYQLQAAASFACRLGWAVKLLD

SEQ ID NO: 225556 - protein, 177 aa, Zea Mays
MTASPSPLSSGVYWAGSETAVPLALLDRGGKKNKREAGRSSRGEDRRMQQQMAATVEEQMMVKAIREESSWEVLPKRIQAALVSKEEWHRRVVNYCIRKRLPWSSCFARKVCKEGDYYEDLMRYLRKNLALYPYHLADFICRVMRISPFRYYCDVLFEAMKNGNHTTVFQISVLQML

SEQ ID NO: 225557 - protein, 90 aa, Zea Mays
MSPTPAPAARAGEELPSTEVVVVRHGETAWNASRVVQGQMDPELNEAGRRQAVVVTSVRSAQPHPPIAPTIYPYFLLLPGPKQNLTTKLL

SEQ ID NO: 225558 - protein, 192 aa, Zea Mays
MSPTPAPAARAGEELPSTEVVVVRHGETAWNASRVVQVVLTEALRERHMGYLQGLRWDAAVDKSPDSLHIVKVIEGSDPDSRNQELPGGGESLNQLNERCVCFLNKIAQEHAGERVVVVSHGAAILELCRHTDPPGSCVRRHVPNTSLSVFRVSAATGQWALERCGDVGHLKGDGDGDSFLEGSFGGDGASA

SEQ ID NO: 225559 - protein, 420 aa, Zea Mays
MSGGGGGSPNNTEWRFNQTLRNVQGMLKGRSFPGKVLLTRRSEPLSPPDYSPSFESEHDEDERKEGSRQEGEGQASGNSFDNASSKKSNILSTSSSNSLPDAQGLVSGARATDSARIAKFTTELSRPAVILDKLRELSWSGVPPYMRPNVWRLLLGYAPPNKDRREGVLTRKRLEYVECVSQYYDIPDSERSDEEITMLRQIAVDCPRTVPDVTFFQNHQIQKSLERILYTWAIRHPASGYVQGINDLVTPFLVVFLSEHLDGNMDTWSVDNLSAQAISNIEADCYWCLSKFLDGMQDHYTFAQPGIQRLVFRLKELVRRIDEPVSKHIEEQGLEFLQFAFRWFNCLLIREVPFHLVTRLWDTYLAEGDYLPDFLVYISASFLLTHLPTRTWAHHELEMVLSRAYMWHTMFKSSPSHLAG

SEQ ID NO: 225560 - protein, 375 aa, Zea Mays
MSSEPIGCSLADAASSCEYTHFLREASRCYPSLHVIYINTSLETKAHAHELVPTITCTSSNVVPTILQAFSQIPNVNVWYGPDSYMGANIADLFQRMATMSDEEIAKIHPDHNRKSLSSLLPRLHYYQSGNCMVHDMFGHEVVEKIKEQYCDAFLTAHFEVPGEMFSLAMEAKQRGMGVVGSTQNILDFIKDHVMGALDKNVDEHLQFVLGTESGMITSIVAAVQELLHFYSSQERANIKVEIVFPVSSDAISKTSNGSHHVGSSMATDLDNLTIVPGVSSGEGCSIHGGCASCPYMKMNTLGSLIKICHQLPDKNNKLSVYQANRINVRTPLGKSVAEVGCEPILHMRHFQKTRRLPNKLVHQVVHGNGDKPLQ

SEQ ID NO: 225561 - protein, 330 aa, Zea Mays
MNQDEELFTVSNSSLSEFAVLGFELGYSMENPNSLVIWEAQFGDFSNGAQVIFDQFLSSGESKWLRQTGLVVCLPHGYDGQGPEHSSARLERFLQMSDDNPYVIPEMDPTLRKQIQQCNWQVVNVTTPANYFHVLRRQIHRDFRKPLIVMSPKNLLRHKDCKSNLSEFDDLAGHPGFDKQGTRFKRLIKDQNNHKDLEEGINRLVLCSGKVYYELDEERRKTERTDVAICRVEQLCPFPYDLIQRELKRYPNAEIVWCQEEPMNMGAYSYINPRLLTAMKALGRGGIEDIKYVGRAPSAATATGFYSVHVQEQTELVQKALQRDPINYPF

SEQ ID NO: 225562 - protein, 1258 aa, Zea Mays
MALASQPPWWLTTEACDLPSAPAAGLGEWVAFLFLSTCSQQMLLSAASAVFLVALLCLGAAKLISTRRRRHGGGALNGDKQPLLDRAGGRAGVRVGAGFVVALAASGVLAAFYASLLVLSLVNRGGGEGEALEAVFLALQCAAHLAAAAVVAHEKRFRAAAHPLALRLYWLAAPALTALLAGTSVARLVVAAARLPDDALAIAALVLSLPLPVLSILGSTGISVAVVNDATGAAEEETASNKATEKNVTPYATASWASRATWAWMNPLVQRGHRAALELSDVPTLAPSHRPERMHELFTLHWPSAWASKDNNPVRHTLFRTFWAQFLLNALLALLRLTVMYVGPTLIQSFVDFTSAGGQRPFGEGARLVATLLAAKCAEALCSHQYNFHCQKLGMQIRGALIVALYRKGLRLSCSARQKHGLGMIVNYMAVDAQQLSDMMLQIHYLWLMPLQVKVCGSTAYVAQTAWIQNGTIEENILFGKPMHRERYKEVIRVCCLEKDLEMMEFGDQTEIGERGINLSGGQKQRIQLARAVYQDFNIYLLDDVFSAVDAHTGTEIFKECVRGALKNKTIVLVTHQVDFLHNADIIYVMKDGMIVQSGKYDELLQAGTDFAALVAAHDSSMELVESAAPASERELPLSRQPSSKNAASNGDSSSSSIVAPKAEKASARLIKDEERASGHVSFTVYKQYMTEAWGWWGPLVVVAVSVVWQCSLMASDYWLADQTSDGNETSFQPSLFINVYAIIAAVSVVLVAARSFIVAFIGLQTADRFFKQILNSILHAPMSFFDTTPSGRILSRASSDQTNVDLFLPFFVWMSVSMYITVISVLIVTCQVAWPSVIAIIPLVILNIWYRGYYLSTSRELTRLESITKAPVIHHFSETVQGVMTIRCFRKEENFLQENLNRVNSSLRMDFHNNGANEWLGFRLELIGSFVLCFTAVLMVTLPSNFVKPEYVGLSLSYGLSLNQVLFWAIWISCFIENKMVSVERIKQFTNIPSEATWRIKDCLPDSNWPTKGDINVIDLKFRYRHNTPLVLKGITISIHGGEKIGVVGRTGSGKSTLIQALFRIVEPSEGRIIIDGVDICTLGLHDLRSRFGIIPQEPVLFEGTIRSNIDPLEQYSDDEIWQALGRCQLKEAVASKPEKLDASVVDNGENWSVGQRQLLCLGRVMLKHSRILFMDEATASVDSQTDAVIQKIIREDFAACTIISIAHRIPTVMDCDRVLVIDAGLAKEFDRPANLIERPSLFGALVQEYANRSSDV

SEQ ID NO: 225563 - protein, 565 aa, Zea Mays
MDAIKSHAKKVDLVDETLRPPLVPSEKHNAFRVRNVASRCKTDLADATKIRRCTSPSLGQTSAIEGTPAPKRAQSADRRRPTPSTPPSKVSTPSTPVSRSITPVRDTTRDLHKSSKRIASTKAPDGLWPAMRNLSSSFQSESVAAPTTRNDKVVTALDCSKGQVSVLTERKRSPFRRKNIGEHCENAQPSEEPPKRLIEQHRWPAMIAGQAPKNLMSRSIDLSDKANIPVASSNTSRCPSPMKTPSVEASVKLSNQSLDEVARSLAIQSSRKDDKVDSQTIERSKSLSRPNRTVTFPVPILQRSSSPSRALPATSSTSRAFQSPSRTRPSTPCQSQSVGAIQSSVPSSLINYMVDARKGKKNASQIENIHQVRLLHNRHLQWLFINAYAEDALSFQKATVENTMYNVWRNTVNLRDSVNMKRIMVQHFQQELRLYNILKEQIAYLEQWPTLERENSISLLGATEALKASTLRLPVTLGAKANTIALKNAVSSAVDVMQVLGSSVCCIHSKITDSTSLVSELSVIAGQEKIMLDECRELLATAAKLQVQESSLRTHLVQQRQRLQD

SEQ ID NO: 225564 - protein, 476 aa, Zea Mays
MFIEEVMDLVELTSLRGALVGLPGVSGLSTEQRKRLTIAVELVANPSIIFMDEPTSGLDARAAAIVMRTVRNTVNTGRTVVCTIHQPSIDIFEAFDELFLMKRGGEEIYVGPVGQNSSKLIEYFEGIEGISQIKDGYNPATWMLEVSSSSQEEILGVDFSEIYRQSELYQRNKALIEELSTPPPGSSDLNFPTQYSRSFFTQCLACFWKQKKSYWRNPTYTAVRLLFTVVIALMFGTMFWDLGRKTNKQQDLFNAMGSMYAAVVYIGMQNSGSVQPVVVVERTVFYRERAAGMYSAFPYAFGQVAIEIPYIFVQTLLYGVLVYSMIGFEWTVAKFLWYLFFMYFTLLYFTFYGMMAVGLTPNETIAVITSSAFYNVWNLFSGYLIPRPKLPVWWRWYSWICPVAWTLYGLVASQFGDIAHPLEDSPTGQTVAQFITDYFGFHHDFLWVVAGVHVGLTVLFAFLFSFAIMKFNFQNR

SEQ ID NO: 225565 - protein, 683 aa, Zea Mays
MQLSSGRGLSSKLPRATRVLVSGGERANKIGANPSVSKDQERIVTQPQRGMLGPSMLPNVTPDQQKVDSTSKLGSSAPDELMLTAPSMLKSTTDTCAQRVGQQKNKANLLMDTEKSAFDALSSQITSCNALMGESFKKGQLDSVVNPQLTSQRDNFPANQGAQNDHQKNHQELQTVDIAADMDIEYDASNLSRRGIQEARNQNHGKHMIPFSAIGSSVTAMSLHSGPTVQSSQTPQVGGYTSPVQIPESAVESSKGALGHGAQKEHAGATGVGDWNPHNQQVQNLGNGATDKAVSSIGRLRSEGLPANDQSTSARDGGGSRPNKGEKERRKKNYDPNVFFKVNGKLYQKLGKIGSGGSSEVHKVISSDCIIYALKKIKLRGRDYPTAYGFCQEIEYLNKLKGRSNIIQMIDYEVTDKSLLLESTVSPRDGRIKDDHYIYMVLEYGEIDLANMVAQKWKERNNSTMKIDENWLRFYWQQILEAVSTIHEERIVHSDLKPANFMLVRGSLKLIDFGIAKAIMNGTTNIQRDAQVGTLNYMSPEAFMCNDTDSDGNIIKCGLPSDIWSLGCILYQMVYGKTPFADYKTFWDKYKGVTDRNHKIMYEPVDNPWLIDLMQRCLAWDRNERWRTPQLLKHPFLNPPVPRDLPPSDDDPYRLLIERIRVHWDNPMVQKLRSLIEELDGDQ

SEQ ID NO: 225566 - protein, 671 aa, Zea Mays
MECNKDEAQRAKGIAKKKFEAGDLQGARKFALKAQTLFPALEGVDQMIATFDIYLASEGKVAGEKDWYSILSVPMNANDEKIKKQYRKLVLQFHPDKNKSVGAEGAFQMVQEAYTVLSDRTKRAVYDQKRNVRTFQQRTAQSGKASTVPGASNGFYNFAANAATASKRTVNKQTVGSATHAPSAPSTATRAPVAKPDTFWTSCNKCKMNYEYLRVYLNNHLRCPSCRQPFLAKEVQKPPAGNVVQDSNISGANQNTTTNRNLRWGPFSRAAGAASATASSAAAAQAANVVHQTYEKVRREREEAQAAATREEALRRKYNPLKRHASMSGNANLGPGDATSGKKTRTMTKDAEVGSSSTISSPGANFFRVPGVNISFSNNIGAYEFQGVDGGPNWKPRPLIRLSLVKTFSQMDLRGLLLEKTKTELKNKLTVIKSKTSQVASEKASKKIAVKENGGDNEALGPEDPTANKDSHDSEQIGSNTSTDAENEDDDPLSYNVPDPDFHDFDKNRTEECFQSDQIWATYDDEDGMPRYYAFIQKVLSLKPFKLRISYLTSRANSEFGPSNWVSSGFIKTCGDFRIGKYESCDIVNMFSHQMKWDKGPRGLIKIYPQKGDIWAVYRNWSSDWDEDTPDNVLHAYNVVEVLDAYDEVHGISIIPLVKDVRRRSCKCPQR

SEQ ID NO: 225567 - protein, 134 aa, Zea Mays
MRMQHLKRSHKKMHRSPRLKNKRSPKKSAKKPEKRAVSQRLVTHRTVHSTCPVCTGLSGGTTGQSAQRGRSQALSGCSTGLSGVRQRSDPTVDCYSCQRSADVACTGHSTVAVRWCTGLSGAPDDRSCCFLSNG

SEQ ID NO: 225568 - protein, 376 aa, Zea Mays
MPATVFASPSIAASPSPSLSPWSPRPPPRRVHVRVRVRPPPPRSGSSGGDEPSTATPWASPDWLTSLSRAVGRSGGDDSGIPVASAKLDDVRDLLGGALFLPLFKWFREEGPVYRLAAGPQDFVIVSDPAVARHVLRGYGSRYAKGLVAEVSEFLFGSGFAIAEGDLWTVRRRAVVPSLHKRFLSIIVDKVFCKCAERLIDKLEPYALSGEPVNMEARFSQLTLDVIGLSLFNYNFDSLTTDSPVIDAVYTALKEAELRSTDLLPYWKVGFLCKIIPRQIKAENAVMIIRNTVEELIMKCKEIVEAENEQIEGEEYVNEGDPSILRFLLASRDEVSSVQLRDDLLSMLVAGHETTGSVLTWTIYLLRSDCTEESSR

SEQ ID NO: 225569 - protein, 113 aa, Zea Mays
MEQYEKVEKIGEGTYGVVYKALDKATNETIALKKIRLEQEDEGVPSTAIREISLLKEMNHGNIVRLHDVVHSEKRIYLVFEYLDLDLKKFMDSCPEFAKNPTLIKGTWFYLLK

SEQ ID NO: 225570 - protein, 777 aa, Zea Mays
MASSSSPPPPKLPIPGRRNILITSALPYVNNVPHLGNIIGCVLSADVFARYCRLRGYNAIYICGTDEYGTATETKAMEEKCTPKEICDKYHAIHNEVYKWFNIKFDKFGRTSSPEQTEVCHAIFHKLMENNWLTENTMQQLYCDTCQKFLADRLVEGTCPNKVCNASARGDQCETCSTLLNPTELIDPKCKVCKNTPRIRDTDHLFLELPLLRDKLVNYINETSVAGLWSQNAIQATNAWLKEGLKPRCITRDLKWGVPVPHEKYKDKWWKNPDNVELFQFMGKDNVPFHTIMFPSTLLGTGEKWTMMKTISVTEYLNYEAGKFSKSKGIGVFGNDAKDTNIPPEVWRYYLLMNRPEASDTLFTWADLQAKLNSELLNNLGNFINRVLSFVAKPAGAGYGSVVPDAPNAGAHTLTKTLAEKTSKWVEQYLDAMEKVKLKQGLKSAMGISSDGNAYLQESQFWKLYKEDPAACAIVMKTSVGLVYLLACLLEPFMPSFSDEVLRQLNLSPEENLSLSEEKGEIAKAKTPWNFVPAGHRIGKPAPLFKELKDEDVALHREKYAGSQAERSSKAAADAEANKVANQLKGTKLSDGGTKKEPKKQSGGSKSKTAEADITVAKLDIRVGLIRKAEKHPDADSLYVEEIDVGEDAPRTVVSGLVKFIPLEEMQSRKVCVLCNLKPVAMRGIKSHAMVLAASNEDHTKVELVEPPESAAVGERVTFAGYAGEPEASLSGKSKTWEKLAAELHSNGELVACYRDVPFTTSAGVCRVKTIANGEIR

SEQ ID NO: 225571 - protein, 425 aa, Zea Mays
MNRPEASDTLFTWADLQAKLNSELLNNLGNFINRVLSFVAKPAGAGYGSVVPDAPNAGAHTLTKTLAEKTSKWVEQYLDAMEKVKLKQGLKSAMGISSDGNAYLQESQFWKLYKEDPAACAIVMKTSVGLVYLLACLLEPFMPSFSDEVLRQLNLSPEENLSLSEEKGEIAKAKTPWNFVPAGHRIGKPAPLFKELKDEDVALHREKYAGSQAERSSKAAADAEANKVANQLKGTKLSDGGTKKEPKKQSGGSKSKTAEADITVAKLDIRVGLIRKAEKHPDADSLYVEEIDVGEDAPRTVVSGLVKFIPLEEMQSRKVCVLCNLKPVAMRGIKSHAMVLAASNEDHTKVELVEPPESAAVGERVTFAGYAGEPEASLSGKSKTWEKLAAELHSNGELVACYRDVPFTTSAGVCRVKTIANGEIR

SEQ ID NO: 225572 - protein, 315 aa, Zea Mays
MKLTVKTLKGTHFEIRVQPNDTGKTSGSTGTSSSQHSNTPATRQAPPLEAPQQAPQPPVAPITTSQPEGLPAQAPNTHDNAASNLLSGRNVDTIINQLMEMGGGSWDKDKVQRALRAAYNNPERAVEYLYSGIPVTAEIAVPIGGQGANTTDRAPTGEAGLSGIPNTAPLDLFPQQGASNAGGGAGGGPLDFLRNNPQFQAVREMVHTNPQILQPMLVELSKQNPQILRLIEENHDEFLQLLNEPFEGGEGDFLDQPEEDEMPHAISVTPEEQEAIGRLESMGFDRARVIEAFLACDRNEELAANYLLEHAGEED

SEQ ID NO: 225573 - protein, 175 aa, Zea Mays
MSLAPSIPSIKVKVGPVSVAPPHRACRSFAVVRSSKAEGPIRRPAAPPLSPPPKTPALSTPPTLSQPPKPAAPPTSSESTPPSPQPKAAVATAPAAALQRPLAGAVTLEYQRKVAKDLQDYFKKKKLDEADQGPFFGFVPKNEISNGRLHVLLCYTYGVRKQILETQAFSIQRRI

SEQ ID NO: 225574 - protein, 172 aa, Zea Mays
MTTSGAPKRPSFKRSSPGKKSRLRTRRVAAGGREGEAEAEAAGTSALARALLPASVGLDAVPPVGRALPRDFFEVDALDLAPRLLGKLLRRDEVVLRITEVEAYRPNDSACHGRFGITARTAPVFGPGGHAYVYLCYGLHMMLNVVADIEGVGAAVLIRSCSPVSEEENGNL

SEQ ID NO: 225575 - protein, 121 aa, Zea Mays
MDNKRSATTEGEKSMSATEVVANVLAENTKKNLFLQNVGIQNVGPRSSLRNIEAQLEVEKRANSDLKSIVDAQHEQLDALLKQMQETEENRIREQEEVKKKQAEMETKMQLVLSQIHSRLR

SEQ ID NO: 225576 - protein, 721 aa, Zea Mays
MLGKNSKALDEFNCLLRDLSTKLEYAEQKIISGRQEMLQIKQEKEEMDRSYKGQLYSNDTTIKEKDSLIKQLEGSLDDNKSRLIYLDSRLQCMEQELKLKDDVCISLKGNLASSESEKNSLELMNKGHILEIKKLCQDNKDLNELFSSFMVKVTELDKEHASMSSHVSRLISSFERFYEMAQEEKMLMARSSKDKFEHLQSQYVDLTSENNALKTEIEELKSRLIELQRTQEIVMVQHVEECQVAEDKIRRLESEAEVSASNINQLEKLASELQGRIQKLLEDSTFAENHKQELLQKILKLESDNQELLGQMQSIMEEKSNNAESLHGEITKRDQQVDTLENQINQLRSVLDEKEQLYLCSVQKEKTLEEQKLQVEALLSATECKLSDAKKQYDLMLEGEKIELSKHLKELSLKNDQAINEIRKKYELEKIEITNAEKEKAEKLIREIENKCNEKISQNKHDSQRYLICLKEEHGTTVARIQQDNEHKESTLRAYHKEELQRIQSQAENEMRERLSLLRKEHEVQIKSLRMHHEEECQRMQEELELQKSKEEKQRALLQLQWKVMGESQRVDQEVNSKKEYSVSSIRRSDPYGRKEQEVQLVSPETNRKDVNLPGILQSPISNMLRKVEKVSQDIPKHRKVTHHEYEVETANGRITKRRKTRSTVMFGEPNSQKPLHNTTDKDVKKLKKVPTRSRAHPANIGELFSEGSLNPYADDPYAFD

SEQ ID NO: 225577 - protein, 100 aa, Zea Mays
MATRAAAAATLTAATSSLLRRSTSLRPQGLRVPHRVPPQRFVRHIASSSNEEAAARAAAATADAGGPTISLRRKSLRASYMKMKMCWHLEILIHKPLCTF

SEQ ID NO: 225578 - protein, 95 aa, Zea Mays
MATRAAAAATLTAATSSLLRRSTSLRPQGLRVPHRVPPQRFVRHIASSSNEEAAARAAAATADAGGPTMPICLSSAPACTWWKADEVAPWLNYEG

SEQ ID NO: 225579 - protein, 70 aa, Zea Mays
MDVERRHGKFKPVIKKAMVELDAAPFKKYASLRDEWAIKNRYISPGPIQFSGPGSDDSNHTLMLELGAEL

SEQ ID NO: 225580 - protein, 207 aa, Zea Mays
MGRAASHITLECALQTHPNAALIGEEVAAKKETLKNVTNYITDIICKRADLGYNYGVILIPEGLIDFIPEVQKLIAELNEILAHDVVDEAGAWKSKLQAESRELFEFLPKTIQEQLMLERDPHGNVQVAKIETEKMLISMVETELEKRKAEGRYSAHFRGQAHFFGYEGRCGLPTNFDSNYCYALGYGAGALLQSGKTGLISSLCPP

SEQ ID NO: 225581 - protein, 287 aa, Zea Mays
MSITDYLLNLENLLCGCGGFYLQDWSLAWYDSMFVYPLCRKYLMLHFFSMALVSQILSTIGSILVKIHGGSSGIGTFAIQIAKYLGIKVFVTAGSEEKLVACKVLGADVCINYRTEDFVERIKQETNGKGVDVILDNIGGSYLQRNLNSLGVDGRLFIIGFQGGIAAEVNLQAVLACRLTIQAAGLRNRSLANKAEIVSEVEKNVWPAVAAGKVKPVIYKTFPLCEAAEAHRLMEASTHIGKILLLPLHLWRLCSYSRRSQFKNICNFCDSLHGCCTGVACLFLYIL

SEQ ID NO: 225582 - protein, 240 aa, Zea Mays
MKADRNGHITDFLEKPKGADLESMQVDMGLFGLSPEFASTYKYMASMGIYVFKADVLRKLLRGHYPTANDFGLEVIPMAAKDYDVQAYLFDGYWEDIGTIKSFFEANLALTDQSPNFYFYDPVKPIFTSPRFLPPTKVENCKVLNSIVSHGCFLTECSVEHSVIGIRSRLEPGVQLKDTMMMGADYYQTEAERLSELSVGKVPVGVGENTKIRNCIIDKNARIGKNVVIMNSEALKSIHL

SEQ ID NO: 225583 - protein, 354 aa, Zea Mays
MGGVTSTIAARFAFFPPTPPSYTVVVADAATGRLAIPEISRAPSRRRRRDGAGAGGSSSASSVVAAAEEEDGAEVVRLRTRRGNEIVGVYVRHARASATVLYSHGNAADLGQMYGLFVELSRRLRVNLFGYDYSGYGRSTGKPTECNTYADIEAAYNCLKEKYGVADEDIILYGQSVGSGPTIDLASRLPDLRAVVLHSPILSGLRVIYPVKRTFWFDIYKGTSDDVVDCSHGKQLWEHCKVKYSPLWLSGGGHCNLELYPDYIKHLKKFVSSVSKKASSKPDPKETTTKDDTTSKETEEAYPEKPQEAKKCPQISRKSLDSRFGKSKTVDVPDKPRMSSDDIDKFRRSRCLVW

SEQ ID NO: 225584 - protein, 156 aa, Zea Mays
MGGVTSTIAARFAFFPPTPPSYTVVVADAATGRLAIPEISRAPSRRRRRDGAGAGGSSSASSVVAAAEEEDGAEVVRLRTRRGNEIVGVYVRHARASATVLYSHGNAADLGQMYGLFVELSRRLRVNLFGYDYSGYGRSTGKTLKQHITASRKNMV

SEQ ID NO: 225585 - protein, 74 aa, Zea Mays
MLGLVMPVFCTDCRTVPERGYYSMEVKQLYYIMLRGTASAVPAAERKGLLNKKKKNQEATVSIHQRHSYLTENW

SEQ ID NO: 225586 - protein, 678 aa, Zea Mays
MVNQVHVVGEGLIGRTLISGEHQWISDDIPFSFSQISDEDNLGLCQGYTWWQHQFLSGIKTIAVVPMPAFGVAQFGSMQKVSESLQFLDQVKGATFLMESLSWSPSTKDAQKDAFMYNPQFQLDSSTTREGLPRTKAEPENSRLENAISIDSLKNFAITSNGLNPHVVAMPVNSKSISTVKLIQSDSNLRYNNISENAQQFKSAKQPDSSWASAATCFSNLTNLQRIERGLSCTPNKLRHCLQSEKSSGFLDSYSSIVSTDAELKCTLFDNATPFVQSDVIQEVGTSGSTRACGLHELPNEIWAEIASGEMKPVIKEVNENNGFLESTAFDPVMNDWWGDTALLAGNTSHLSATTMNSVSGQASSEQLSIEDRGLFSESVFEELLGFDGNVGPVMDSTEPLAGFVSGCHLPRYNLQGSLSVCKAQVPPLILPSGSCTSENVVMGSSKEAPVSLQNLSMDDCGSLNTASSKISQVKKPEGEKVVKKRARPGESTRPRPKDRQQIQERVKELREIVPNSAKCSIDALLDRTIKHMLFLQSVTKYAEKIKQADEPNMISKDNGSVLNDNSHGVVLKDNPSGGSNGGATWAYEVAGQTMVCPIIVEDLAPPGQMLVEMLCEERGFFLEIADTIRGFGLTILKGLMELRDGKIMARFLVEVKKLLFWDAFSFMVRFSNESRVL

SEQ ID NO: 225587 - protein, 75 aa, Zea Mays
MISCINKVLSYLRGCSICSISLAYTPYLYIPFNPPGIPLSPNQPSNEFQCCISLLPHFRVTNLIRACLGEGEWRG

SEQ ID NO: 225588 - protein, 295 aa, Zea Mays
MVATTFIVFGNIFLVSFGNHQSPVYTPEQLIAKYSNLVFVLYCMSLVFVVAFNHYLYRSGETIISNSSKNAGTYWRTMLPFSYAVVSGAIGSCSVLFAKSLSNMMRLTMNSRYEFHSWFTYSIVLLFLCTAGFWMGRLNEGLSLFDAILIVPMFQIAWTFFSICTGFVYFQEYQVFDTLRIIMVVLGMTFVFVGISLLAPDDTKADTKDGSSTAEESIIDMDRNGKMQMEETDTDDSNSFVTSVKAKAKRVLLKAKVIGFLSGSDSTIDLSQICLSPDLVCSLHAPCPLALGRTQ

SEQ ID NO: 225589 - protein, 228 aa, Zea Mays
MATRYWIVSLPVQSPGAIASSLWSRLQDSISRHSFDTPLYRVRAAEYNNVRSQLSAINRKQSGRSSKKLYEDNEYALYTVTLFAKVVDNFKVRAREKGFQIRDFEYSPEAQESRMQEMEKLLRDQEAMRTTLLQWCYASYSEVFSSWMHFCAVRVFVESILRYGLPPSFLSAVLAPSTKSEKKVRSILDELSGDAHSLYWKSEDDVGVAGLGGETEAHPYVSFTINFV

SEQ ID NO: 225590 - protein, 495 aa, Zea Mays
MGSKQPLCICGGRLASVYPFPRPDSWELLTLGFPILGVEWQKMENPDLRKAMGMKPDQKGVRVRRVEPTAPESGCLQPSDIILSFDGVDIANDGTARQAVPVPYTLILDVRMLSGGGGGGNGSSGGGGEGMDGGQRGDGRCDRASCSSGDDRHGRMAEERWQTWSHGSRGTADVVAWQRRCRAQPGGGRRQQKRRVEADGDNDRREEERKQSWDSCVHLGDGGGIRWGPPPTLVYDPKTLVVANYMKEHGYLFLHTAVDTISKQVLVSDINIGYEEIVNTQVLAFNGQPVKNLKNLATMVENCKDEFLKFDLEYDQDYIPTVFDNFSANVVVDGTTVNLGLWDTAGQEDYNRLRPLSYRGADVFVLAFSLVSRASYENIMKKWIPELQHYARGVPVVLVGTKFDLREDKHYLMDHPGLVPVTTAQGEELRRQIGAMYYIECSSKTQQNVKAVFDAAIKVVIQPPTKLREKKKKKSRKGCSMVNILSGRKMLCFKS

SEQ ID NO: 225591 - protein, 379 aa, Zea Mays
MAHGGGAGKAKVTPNLAVDGEGTRTLNRTVLQRLDPAVEDILITAAHVTLYDFDTDVNQWDVEGSLFVVKRNAQPRFQFIVMNRRNTDNLVEDLLGDFEYQLQAPYIMYRNAAQEVIGIWFYNSQECQEVANLFSRILNAFSKVPPKPKIPPVQSEFEEVEAAPVLVDGPLEPQTSNIMSTTTHIQEDPLSAFFSAAANAGGNSAVAVARQPIQLFGATPVATHAATSITTIQSPGLHYLLPSQASSVSGMPADAHGSIGRSTNLVNPSLFSPLTSSQTTMVCTNSVVAIAPPQHPQTAQQPQSAPLLQPFLLPTASPSPPYGTPLLQPFPPPNPSPSLASAPVLSPALSRDKVRDALLRLVENDEFIDLVYGEIMNRQ

SEQ ID NO: 225592 - protein, 141 aa, Zea Mays
MKSSGANADSAKSADNTDDAVDADFPNCILKCKSVFKCKLCPRIMCLNVEMVKIHLKSKRHARSEKLLGEGRLKLMLNSDGELEEEQETHAERHARTIALSQQVQKQKKDSGRQRQNRRKKKRSRVNLEEAQNNKKQRKAK

SEQ ID NO: 225593 - protein, 324 aa, Zea Mays
MRGQTQTASAGGRWRGDGAAAWCWWWVAVVLLLGHLPSCARAGLLESNPGLAYNFYKNSCPSVDSIVRSVTWAQGCDASILLDTAQSEKTAAPNLSVGGYEVIDAIKAQLERACPGVVSCADIVALAARDAVSYQFKASLWQVETGRRDGTVSLASNTGALPSPFAGFAGLLQSFSDRGLNLTDLVALSGAHTIGVASCSSVTPRLYQGNASSVDPLLDSAYARTLMSSCPNPSPASATVALDGGTPFRFDSGYYTRVQQRQGTLASDAALAQNAAAAQMVADLTNPIKFYAAFSMSMKKMGRVDVLTGANGQIRKQCRQVNTS

SEQ ID NO: 225594 - protein, 179 aa, Zea Mays
MVGRVDFEKTVEHWQQDKWTGCFPVKWHIVKDVPNSLLKHIILENNENKPVTNSRDTHEVKLEQGLQVLKIFKDHVCKTSILDDFGFYDNREKMMQERKAKQQQSLKKVIDVKLPSVTDMERSPKGETGSTELTGVGTDVLNKERLLGKAGEKNGEKGNDVAPQDLKTQTEKLAGLNGC

SEQ ID NO: 225595 - protein, 56 aa, Zea Mays
MRCSSNCCGTYFRSQAMFQQKLERDVRCIRVSMYTNQRDAVLYISLCVCVRVFIFV

SEQ ID NO: 225596 - protein, 98 aa, Zea Mays
MLYMAPSDGKWGEHELDYLLFMVRDVKLNPNPEEVADVKYVNRDQLKELLRKADAGEDGVKMSPWFRLVVDNFLMGWWDHVEQGTLQGAADMKTIHKL

SEQ ID NO: 225597 - protein, 722 aa, Zea Mays
MMLFYRTLVEGYTSRTMQGPHHGMLPSSMKPPSRRPLPLDADDTIKPEQQKPKVPVLEEHLVGQLSKEEQDTLDAKFNEASVADKKVQELEKEILDSREKTEFYRTKMQELILYKSRCDNRFNEVSESMSADKREVQSLSAKYDERCKKVGDVASKLTMDEATFREIQEKKLEIYNAIVKLQKGDDSDEKFQERANKIQSDLEELVKSLNEQCKRYGLRAKPTTLVELPFGWQPGIQETAYAWDEEWDNFGDEGFSIIKELTVEVEPPVVAKSQPTEDVKASSNGASTEKEDNKGDKSAAAVEQVVKPETAPSNIKPESAKSPPVSPVKNKEDGPDEHDKKQSGTNDVSPRESISNRGAMDSPTHGDKTHDGHSWGMDNDSLWNFDHKEGENGDSDLFFGPQGLPPIRTGGSSSGNSVVKEQKPFFDSVPGTPVEKSVFDSIPGTPFQKSVFDSIPGTPVQKSVFDYSVPSTPMQNSVFDYSVPSTPMQKSLFDSVPGTPVQRSVFDSVPSTPMQRSVFDSVPSTPTQKPFFDSFPSTPMQRSLFDSGPSRAESPTASSMYGKEQKGFFDSSVPSTPMYNSSFTPRYSEAGDDSFDTMSQYSSFGMHESNSFGQRDSLSRFDSFSSNADNGGNDTFARFDSFRSTSDQGGGNSFMRYDSMNSSSDHDGIGTFARFDSMKSSNYNSRGYSFDDEDPFGTGPFKSTETTSHSPTKHGTDTWSAF

SEQ ID NO: 225598 - protein, 769 aa, Zea Mays
MLSFKEFCIAVYLMERHREHRPLPDTVTDAIWAEGTALPSTGQFAENPSAPAPQASAGYTSRTMQGPHHGMLPSSMKPPSRRPLPLDADDTIKPEQQKPKVPVLEEHLVGQLSKEEQDTLDAKFNEASVADKKVQELEKEILDSREKTEFYRTKMQELILYKSRCDNRFNEVSESMSADKREVQSLSAKYDERCKKVGDVASKLTMDEATFREIQEKKLEIYNAIVKLQKGDDSDEKFQERANKIQSDLEELVKSLNEQCKRYGLRAKPTTLVELPFGWQPGIQETAYAWDEEWDNFGDEGFSIIKELTVEVEPPVVAKSQPTEDVKASSNGASTEKEDNKGDKSAAAVEQVVKPETAPSNIKPESAKSPPVSPVKNKEDGPDEHDKKQSGTNDVSPRESISNRGAMDSPTHGDKTHDGHSWGMDNDSLWNFDHKEGENGDSDLFFGPQGLPPIRTGGSSSGNSVVKEQKPFFDSVPGTPVEKSVFDSIPGTPFQKSVFDSIPGTPVQKSVFDYSVPSTPMQNSVFDYSVPSTPMQKSLFDSVPGTPVQRSVFDSVPSTPMQRSVFDSVPSTPTQKPFFDSFPSTPMQRSLFDSGPSRAESPTASSMYGKEQKGFFDSSVPSTPMYNSSFTPRYSEAGDDSFDTMSQYSSFGMHESNSFGQRDSLSRFDSFSSNADNGGNDTFARFDSFRSTSDQGGGNSFMRYDSMNSSSDHDGIGTFARFDSMKSSNYNSRGYSFDDEDPFGTGPFKSTETTSHSPTKHGTDTWSAF

SEQ ID NO: 225599 - protein, 473 aa, Zea Mays
MAEMAERSVAGELPEEPRPPHGEEDDEEEEEGDVCRICRNRGDEDHPLRYPCACSGSIKFVHQDCLLQWLDHSNSRQCEVCKHAFSFSPVYADNAPTRLPFQELIVGVGMKACHVFQFILRLAFVLSVWLMIIPFITYWIWRLTLVRSIGEAQRLFLSHISAQLILSDCLHGFLLSAIIVLIFLGATSLRDYIRHLRELGGHDAERDDGGRERHGARAVRRLAGPNNRVPADGNIDELAEAQGIGAGELLRRNAENVAARLERLEAQVEQMLDGLDDADGAEDVPFDELVGMQGPVFHLVENAITVLASNAIFLIVVIFVPFSLGRIVLYYLSWFFSSASTPMLAKMMPFTETAISIANDTLKSALNVVKNFSSDSNNEGVIGHVIEVVTQSLKINATGLSVIQVTGKSSLMKGTAIGSSYLSDLTTLAVGYMFIFCLVLLYIGSLALLRYARGERFTIGRLYDAGHNNCAED

SEQ ID NO: 225600 - protein, 175 aa, Zea Mays
MLGESRKYGTTIVPGLYAPVHLHFFVARMDMAVDCKLNEVHNQVVEVNVKVESAGTHNMHNNDFYAKEKLLKSMRDCDPSSLRHWIAPLQHYTALMDLQDYSENGTVTVVYRVILKGTDGEAYRDATGTTQFHEGRREDAVAAAEEAAFSKACAWFGFGLYLYHQDESHYDDHFH

SEQ ID NO: 225601 - protein, 219 aa, Zea Mays
MEGGGHPTHADEEPPKEKAPPPKEKAAQGNLFISGALMLGESRKYGTTIVPGLYAPVHLHFFVARMDMAVDCKLNEVHNQVVEVNVKVESAGTHNMHNNDFYAKEKLLKSMRDCDPSSLRHWILWQRKFQAPLQHYTALMDLQDYSENGTVTVVYRVILKGTDGEAYRDATGTTQFHEGRREDAVAAAEEAAFSKACAWFGFGLYLYHQDESHYDDHFH

SEQ ID NO: 225602 - protein, 145 aa, Zea Mays
MFLVLVEFFVLKLTGNLSLGALMLGESRKYGTTIVPGLYAPVHLHFFVARMDMAVDCKLNEVHNQVVEVNVKVESAGTHNMHNNDFYAKEKLLKSMRDCDPSSLRHWIVRVVFLFYIFFVIPTIELGIQYLFIIFMLMQSNNDGK

SEQ ID NO: 225603 - protein, 431 aa, Zea Mays
MAESSFSSVSSIKKQPQPNFLLESTNSLNHRGSEASGTVTSTTTAGASSTPATQLVLNKGPVSSAATQNEKPLPLQVLVPSKSEVQKQASLTGSATTEAVSVSRPLTAPQVPAAKQSAPVTSTAQNAPFLSRSMSAVGRLGNEPSANAPSFVPRSRTYRNAMMEKSSGGGSCFTHQQGSSEQAVAPWQSMFTSQPFIRPSETLSWKEETLLRSGFTFGTVKPESLNPYQGREENSQQASSNSSDCAPSSSNIRSEIEKLNLSGRPRSKQLLSEISTRFTPYQPQGLVADEFPHLDIINDLLDEEQSDRRRVLQPDFVQQSYMPHGASTPDYGEPYLFDQSEQYFDEEPPRFYSPLSSAPRRLRDLSYSHFDLPSHSSSSQFDDLMMSQWPYSRTDISMPSFGSDTSGYPYQVWDLANGSSRYPSYRPANGH

SEQ ID NO: 225604 - protein, 221 aa, Zea Mays
MASDRIMVDTLTEDNGGDARSSSSEEMPSDQQSHPGDSLAEWRSSEQVENGTPSTSPAYSDNDDDDCGPRPSDLYGKFTWRIDNFSQINKRELRSNSFDVGGFKWYILIYPQGCDVCNHLSLFLCVANHDKLLPGWSHFAQFTIAVINRDPKKSKYSAFQIHCIGFGRKSMIGGGKSLWNCQNYMMALLLRMFLPSKPKFKLSGRRQTVHFVALMAITEGN

SEQ ID NO: 225605 - protein, 959 aa, Zea Mays
MDSISDTLHRFWKKEHDWGWKKFMELSKLHDGFIVEDVLTIKAQVQVIREKTDRPFRCLDGHYRRELIRVYLSNVEQVCRRFIDERRSKLSRLIEDKLGWSSFSGFWLAMDPSVRRHMTREKTETILKVIVKQFFIEKEVTSTLVIDSLYSGLKALEYQSKNKKAIPKLTETDARSTPMVLIDQDMFVLADDVIFLLERAALDTLPHQHLPTKDDKSSQNRTKDGNSGQEFSKDSIERDDRRLIELGWKTLELFSLAHIFSRIQVAHQEAVALKRQEELIREEEEAGLAEIELKAKRSAAEKEKRAKKKQAKQKKNSRKGNKGKSGKSNINKEIIMDHSHSDDRILDDFCGQIEEMPLNADNPEEVSDISDSRDDNSDMLHVDIEDRESSPVNWEIDASETQTTIPGSSEVQNDHAGKRTSTVDDSSSSCSSDSVPSVTVNGSYKGGAWTSVRSSSNRGNNRRNKDTEARAGFAQGGSCSSHNGFIGSGSNASGHSKERHEPEDDKVVLQRKQHAQWNIDIISSSKSRMAESSFSSVSSIKKQPQPNFLLESTNSLNHRGSEASGTVTSTTTAGASSTPATQLVLNKGPVSSAATQNEKPLPLQVLVPSKSEVQKQASLTGSATTEAVSVSRPLTAPQVPAAKQSAPVTSTAQNAPFLSRSMSAVGRLGNEPSANAPSFVPRSRTYRNAMMEKSSGGGSCFTHQQGSSEQAVAPWQSMFTSQPFIRPSETLSWKEETLLRSGFTFGTVKPESLNPYQGREENSQQASSNSSDCAPSSSNIRSEIEKLNLSGRPRSKQLLSEISTRFTPYQPQGLVADEFPHLDIINDLLDEEQSDRRRVLQPDFVQQSYMPHGASTPDYGEPYLFDQSEQYFDEEPPRFYSPLSSAPRRLRDLSYSHFDLPSHSSSSQFDDLMMSQWPYSRTDISMPSFGSDTSGYPYQVWDLANGSSRYPSYRPANGH

SEQ ID NO: 225606 - protein, 207 aa, Zea Mays
MELSKLHDGFIVEDVLTIKAQVQVIREKTDRPFRCLDGHYRRELIRVYLSNVEQVCRRFIDERRSKLSRLIEDKLGWSSFSGFWLAMDPSVRRHMTREKTETILKVIVKQFFIEKEVTSTLVIDSLYSGLKALEYQSKNKKAIPKLTETDARSTPMVLIDQDMFVLADDVIFLLERAALDTLPHQHLPTKDDKSSQNRTKYCSEMGP

SEQ ID NO: 225607 - protein, 231 aa, Zea Mays
MIVQSARPYGQRAVLKFAQYTGAHAIAGRHTPGTFTNQLQTSFSEPRLLILTDPRTDHQPIKESALGNIPTIAFCDTDSPMRYVDIGIPANNKGRNSIGCLFWLLARMVLQMRGTILPGHKWEVMVDLFFYRDPEEAKEQEEEAAVAPEFAAITDYQGADQWVGGDQWTADVAAPSVAPTGAEWGAAPAPVPTGDGWDQTGAPVPADGAVPPVIAPTGWDQAAQPTAQGWE

SEQ ID NO: 225608 - protein, 112 aa, Zea Mays
MADEEGGSGVAGGRGGEALAASAPNGDRSGNSPLAVPSFSADDRGFHRSSTMPLPVVIKNDEIANETAGPSSSERSRTERRRQNNPADDPAKQLLDERIPIKKKASEIHICL

SEQ ID NO: 225609 - protein, 968 aa, Zea Mays
MASRGAVAPAVDPSSPSSRAWGGEDETPGAGKVKLMCSYGGRIAPRPGDGALRYVGGQTRLISVPRAASFGELLRKVEAVDEASASSGGVLLRYQLPGEDLDSLISVSGPEDYDNMMEEYEKLAAAAPDGSAKLRVFLFPASGSDAAGSGSGSHLVAAVDESGQRYIDTINCVSAEAMAVAMRPKDSVASAGSSAHNSEASEYSGLVEEPSTLPPHQVAPAYATPHQPPQVTTYVQQQPQVTHYVQHQHPQSAAYVQQVPQSYIEPQQVQYINTQQFGGHGVPQSVNYVPVHMNQFMPSIPVTGSLATTAAQGSTFRPASAGAEPVLETTQFTRPVQAQVDHSYRVVQTPLSQLPPLSSVHQQANDAQRQRFGVQQAMISAVSMPVVTSSGTIPVVVSSATVPSLRYDDCTMCQKALPHAHSDNIIREQGNSRATGNLEAAPMFYSPHQDSGSNKSSLGASSGTPTNYVAEPRAGNTAVMTQFNSTLPARKPAVQATASPDTGVPVQPTVIPLPVSSAPAPDGVFVGHSPQAGAEDPVRYQQQLFSYSMQPAQVLVNGPQGIDASAYKDSNHPAAEPLREYAHNLLHDYARAIDVHTQAVHLGPIAPPESTVHGKPSTYGIIDHAKVGKLPLNIDGSSIYKSQAGGYHIGITNAFAAPAFNQEENISRHSEKPRYAFDIGTQNVHPDIIQQPPNLAVQSNLIAPIEPPGSNEKVTVLPSNSGAQVPSGSPVQRPKEMANHLVSIPPNGSNKFPLQSTVGIDRVEGTQEPAYADSLFSNQDPWKAVGNASLVPPRPNKLTKESVVSGGQYIDGHMPDMNMHAAIPSEEDSCFKDMHTVKLNKGPGEDSIKRQLQAVAEGVAASVLQPPFPEKTVVFSGDHIDSHGAEVDVKFQDEGNNQSDKISQGVQVLDDNDNLQIIKNSDLEELRELGSGTFGTVYHGKWRGSDVAIKRINDRCFAGKASEQERMD

SEQ ID NO: 225610 - protein, 1219 aa, Zea Mays
MASRGAVAPAVDPSSPSSRAWGGEDETPGAGKVKLMCSYGGRIAPRPGDGALRYVGGQTRLISVPRAASFGELLRKVEAVDEASASSGGVLLRYQLPGEDLDSLISVSGPEDYDNMMEEYEKLAAAAPDGSAKLRVFLFPASGSDAAGSGSGSHLVAAVDESGQRYIDTINCVSAEAMAVAMRPKDSVASAGSSAHNSEASEYSGLVEGMSPRAVPPPASAATEYSYSEPSTLPPHQVAPAYATPHQPPQVTTYVQQQPQVTHYVQHQHPQSAAYVQQVPQSYIEPQQVQYINTQQFGGHGVPQSVNYVPVHMNQFMPSIPVTGSLATTAAQGSTFRPASAGAEPVLETTQFTRPVQAQVDHSYRVVQTPLSQLPPLSSVHQQANDAQRQRFGVQQAMISAVSMPVVTSSGTIPVVVSSATVPSLRYDDCTMCQKALPHAHSDNIIREQGNSRATGNLEAAPMFYSPHQDSGSNKSSLGASSGTPTNYVAEPRAGNTAVMTQFNSTLPARKPAVQATASPDTGVPVQPTVIPLPVSSAPAPDGVFVGHSPQAGAEDPVRYQQQLFSYSMQPAQVLVNGPQGIDASAYKDSNHPAAEPLREYAHNLLHDYARAIDVHTQAVHLGPIAPPESTVHGKPSTYGIIDHAKVGKLPLNIDGSSIYKSQAGGYHIGITNAFAAPAFNQEENISRHSEKPRYAFDIGTQNVHPDIIQQPPNLAVQSNLIAPIEPPGSNEKVTVLPSNSGAQVPSGSPVQRPKEMANHLVSIPPNGSNKFPLQSTVGIDRVEGTQEPAYADSLFSNQDPWKAVGNASLVPPRPNKLTKESVVSGGQYIDGHMPDMNMHAAIPSEEDSCFKDMHTVKLNKGPGEDSIKRQLQAVAEGVAASVLQPPFPEKTVVFSGDHIDSHGAEVDVKFQDEGNNQSDKISQGVQVLDDNDNLQIIKNSDLEELRELGSGTFGTVYHGKWRGSDVAIKRINDRCFAGKASEQERMRTDFWNEADKLASLHHPNVVAFYGVVVDGPGGSVATVTEYMANGSLRQALQRHEKIFDRRRRLLIAMDVAFGMEYLHGKNIVHFDLKSDNLLVNLRDPQRPICKVGDLGLSKVKCQTLISGGVRGTLPWMAPELLNGSSSLVSEKVDVFSFGIVMWELLTGEEPYAELHYGAIIGGIVNNTLRPPVPESCDPQWRSLMERCWSAEPSERPSFTEVGKSLRAMASPTKAQQSK

SEQ ID NO: 225611 - protein, 266 aa, Zea Mays
MHFAAVAYVGESTMEPLRYYHNITSNTLTVLEAMAAYNVNTLIYSSTCATYGEPDTMPIVETTPQNPINPYGKAKKMAEDIILDFTKSKKQSDMAVMILRYFNVIGSDPEGRLGEAPRPELREHGRISGACFDAALGIIPGLKVRGTDYSTADGTCIRDYIDVTDLVDAHVKALGKAQPGKVGIYNVGTGQGRSVTEFVEACKKATGASIKVEYLARRPGDYAEVYSDPSKILRDLNWTAQYTDLGQSLAQAWKWQKAHPNGYASA

SEQ ID NO: 225612 - protein, 126 aa, Zea Mays
MQLLLVLLLLLFQSSGHLVTSVSLKGLEKHPKNLLRLQRTPSCRISLGWRAPWSCCARCHCLQQKPPSRPRPLHGPEPWPVGQVKKNLQSLALALDSCYFLIACTTCIKNTYTSMPSSSPGRNMFA

SEQ ID NO: 225613 - protein, 169 aa, Zea Mays
MERRRSRHALLLLSAVMASLVTGSTAGIYHIVGAGKGWRMPPNRTYYEDWARTRQISIVFLYRSGVHNIVEVPTRELFDACSMRNITSRYQSGPTIIELTDPGERFYFCGVGEHCEAGQKLAINVLLVPPPPPDTDDDCSSAARLPGHAGAGLAAACMCLVSALLTMAV

SEQ ID NO: 225614 - protein, 124 aa, Zea Mays
MNSYCQGQQGSIISREENVRVMIIDTFEEVKSKRDRKKTRWQGNLYQGQMWLAGQQMEDLAPNLFLMVSKCIINKRTILEALTDSRWIQDLRGVLSWEVFMEITLLWKLSKGLTCSPALPDRHF

SEQ ID NO: 225615 - protein, 203 aa, Zea Mays
MWLSLGGFQEKGPDDSHQYNTHVLIDDTGKVRSSYRKIHLFDVDVPGNMVYKESRFTAAGDTIVAVDSPFGRLGLTVCYDLRFPELYQILRFKHQAQVLLVPSAFTKITGEAHWEILLRARAIETQCYVIAAAQAGKHNEKRESYGDSIIIDPWGTVIARLPDRLSTGFAVADLDLSKVEAVRTRMPISEHRKFDSDWKPTPL

SEQ ID NO: 225616 - protein, 555 aa, Zea Mays
MHLTVMSLSAAVANGAAAYRYDTIQPVARLRFCGLRRKAHRLHSPRYSRHLVAARRSVVVAATAGNGAAASGTFDYDLVIIGAGVGGHGAALHAVEKGLKTAIIEGDVVGGTCVNRGCVPSKALLAVSGRMRELQDEHHMKSLGLQVSSPGYDRQVVADHANNLASKIRSNLTNSMKALGVDILTGIGTIVGKQKVRYGKVGFPDNEITARNIIIATGSVPFVPKGIEIDGKTVFTSDHALKLESVPEWIAIVGSGYIGLEFSDVYTALGSEVTFVEALDQLMPGFDPEIAKLAQRILISPRKIDYHTGVFASKITPAKDGKPVLIELIDAKTKEHKETLEVDAALIATGRAPFTKGLGLENINVVTQQGFVPVDERMQVMDATGNVVPNLYCIGDANGKLMLAHAASAQGISVVEQISGRDNILNHLSIPAACFTHPEISMVGLTEPQAREKADKEGFEISVVKTSFKANTKALAENEGDGLAKMIYRPDTGEILGVHILGLHAADLIHEASNAIALGTHVQDIKFAVHAHPTLSEVLDELFKAAKIMFHPWRP

SEQ ID NO: 225617 - protein, 426 aa, Zea Mays; identical to SEQ ID NO: 225027

SEQ ID NO: 225618 - protein, 975 aa, Zea Mays
MEACCWSRHEQKFSFRLWNHSMGWFRAQFWWWTRFCTSSSQPWKFPGADISDFFNFGLDEEKWKDFCKQLDQLRLESTMQSRIRVYESGRSEQDYDPDLPPELAAVTGHPDISADSRNKMVNGHTDFSAQGRGPANVRTPLMTGRPIQVETNYTDRFPSVDSRSHRMRESDSVIEIVCQGRDSMDDETVDQTEKDSQGGNKGAHCIEGKPYSSDKINNSDHNSNSVKKTQHKGQLPVSSESDMLSMDANTHSPPSYKTRGSPRGAWPLKGSSLGQNSIREIESSNEVIPRQSSSKRCHDSQKENLIEGSENKADSDSEGSLAANDDVADKLSTEDHFDDAGGGGGGDDDKLTLVGRVEMDVDDATSDPNMPSDANHDDNLVHSDTKQKHISVVEQPTEHNSSEPDELRNTENSKGRSGSSKDQQKHLESGEEVLQDKQLRRVNNVRMHHDAEEHKLRQKDEHSRDAKSDLERSRLPSRGREDIHQSYANRDRVDIQGRSYNKVRETEILPRRDDGVHSRRAKEEDLRLEYNVEGGARHRNKVRPIDRNDRDEDHSRKRLDDGDRRGSRQRERGDVVLNRRESDDSLIKRKKDDENLRRLKPENEDMVATHGYKARDDSNRRKKERDDGIDQKRRDDSGRLREKDDDRYHVKQKDGNWRQREREDRQRPKQENTLTVQREEGRGTGRGSRMMDDKLVSGGRKKDEPRSSLLSKDTQERTRQNEPSRRGQGVEENNMQNKGRFDDNSNSERNSRQEKQNNNRLSGSSDARHAGRDKHRESTRKGRGSELAEHDLHRSSKRRCEDHESHRSGKVETKEVNEQESSRGHAALSKKGQNPQPDNSLLNEVEEDAISDDENHEDSRRGRSKLERWTSHKEIEYSNIDDDSTQTFPTIKADVEADETSDKMTEECERDRHLDTVERLKRRSERFKLPMPGEKDAPQSKKVDTEVQPPQNESSAVDMEVKPERPARKRRWTGS

SEQ ID NO: 225619 - protein, 879 aa, Zea Mays
MVNGHTDFSAQGRGPANVRTPLMTGRPIQVETNYTDRFPSVDSRSHRMRESDSVIEIVCQGRDSMDDETVDQTEKDSQGGNKGAHCIEGKPYSSDKINNSDHNSNSVKKTQHKGQLPVSSESDMLSMDANTHSPPSYKTRGSPRGAWPLKGSSLGQNSIREIESSNEVIPRQSSSKRCHDSQKENLIEGSENKADSDSEGSLAANDDVADKLSTEDHFDDAGGGGGGDDDKLTLVGRVEMDVDDATSDPNMPSDANHDDNLVHSDTKQKHISVVEQPTEHNSSEPDELRNTENSKGRSGSSKDQQKHLESGEEVLQDKQLRRVNNVRMHHDAEEHKLRQKDEHSRDAKSDLERSRLPSRGREDIHQSYANRDRVDIQGRSYNKVRETEILPRRDDGVHSRRAKEEDLRLEYNVEGGARHRNKVRPIDRNDRDEDHSRKRLDDGDRRGSRQRERGDVVLNRRESDDSLIKRKKDDENLRRLKPENEDMVATHGYKARDDSNRRKKERDDGIDQKRRDDSGRLREKDDDRYHVKQKDGNWRQREREDRQRPKQENTLTVQREEGRGTGRGSRMMDDKLVSGGRKKDEPRSSLLSKDTQERTRQNEPSRRGQGVEENNMQNKGRFDDNSNSERNSRQEKQNNNRLSGSSDARHAGRDKHRESTRKGRGSELAEHDLHRSSKRRCEDHESHRSGKVETKEVNEQESSRGHAALSKKGQNPQPDNSLLNEVEEDAISDDENHEDSRRGRSKLERWTSHKEIEYSNIDDDSTQTFPTIKADVEADEVGKSQVSAAAGNSDINSNVDTGQTSDKMTEECERDRHLDTVERLKRRSERFKLPMPGEKDAPQSKKVDTEVQPPQNESSAVDMEVKPERPARKRRWTGS

SEQ ID NO: 225620 - protein, 357 aa, Zea Mays
MGKHSAESGVSMLLHGDLDIQIIEAKCLPNMDLMTERMRKCFTGYGACSNDCGKSEPPHPDMRKIITSDPYVSVCLSGATVAQTRVIANSENPKWDEHFYVQVAHSVSRVEFHVKDNDVFGAELIGVASIPVEHIMPGDLVGGWFPISGQYSNPMKPSPELHLSIQYKPIDTNPLYKDGVGADGHQSVGVPNAYFPLRKGGKVTLYQDAHVPDNFQPHIEMDDGRTYEQNKCWEDICHAIIEAHHLIYIVGWSLYHPVKLVRESTKPVPNGNPVTIGEILKRKVQEGVRVIVLLWDDKTSHDKFLLKTVECRMVSCIHMMRKLENISDIQVSIVCCLLAMPATNLAFSSSRNRRCPL

SEQ ID NO: 225621 - protein, 498 aa, Zea Mays
MGKGGPRPAEAKKSAPALRSLASVFMHADVADVVLMVLGLVGAMGDGMSTPVMLFITSRIFNDLGSGPGLLQEFSSKINENARNLVFLALGNWLMAFLEGYCWARTAERQASRMRERYLRAVLRQDVEYFDLKVGSTSEVITSVSNDSLVVQDVLSEKVPNFVMNCSMFLGSYAVGFALLWHLTLVALPSVLLLIIPGFMYGRILIGLARRIREQYTRPGAIAEQAVSSVRTVYSFVAERSTMAQFSAALQESARLGVKQGLAKGVAIGSNGITFAIWAFNVWYGSRLVMYHGYQGGTVFAVSAAIVVGGLALGSGLSNVKYFSEASSAAERVQEVILRVPKIDSESSAGDELANVAGEVEFKNVEFCYPSRPETPIFVSFNLRVPAGRTVALVGGSGSGKSTVIALLERFYDPSAGEVTLDGVDIRRLRLKWLRAQMGLVSQEPALFATSIRENILFGKEDATGEEIVAAAKAANAHNFISQLPQGYDTQLGRRGGR

SEQ ID NO: 225622 - protein, 559 aa, Zea Mays
MLLKGASAHALLQRVLNPPDPDAIEEALESLVQIHALEKTASGRYEPTFYGCLLNSLPLSFDSSVLALKFCELGAIHEGILISIMLDIQPLPILHTFGYRELCQKYIDNYFKGNGSVQIGKKEATTIGNLCAFQFWERVFKDKHRLEYLKYVAKTQEPEESHTFLTKPEEEWCAVHNLLPAAFKNISEIYDVVVMQLHRFRPSFLVKINPPKFLQPSEFNHTCLHREILDLEEDVDSLSLETENAHSDSQKRCAATPYVSPTDFETSTIVEMLKTLVKMKTQHAENKISYKGRLGSNVKPTLGTQACVFFANGSCNLGDVCRFSHSSLAPKPVCKFYLTLQGCRNGRSCPYSHDSGSLVSAPVTSGICSQESRGTSLCDTRLLPADGDGHILVVNDKTLQFSIPKGLKILENLADPSSLITGLEHELPVPWAKLKRVFWFDGFGNDESATEQALLQKFFASIAIKILSEQLSGLQVILIMKNTRYIQLQVERLARECFFFLSESFLSDEANLGWFSDTSTHTRRMQVAAPVTYVFNLHPPSSTQFGDYPAELREALRRD

SEQ ID NO: 225623 - protein, 769 aa, Zea Mays
MFFWKGLRKATLLLAYQSFGVVYGDLCISPVYVYKNTFSGKLRLHEEDEEILGVLSLVFWSLTLIPLLKYIILVLGADDDGEGGTFALYSLMCRRSRMGLLMNSINDGCLSVYSQEEEPREEELKSSLAIKSFIERHYSLRVLLLLFVLMGTSMVIGDGVFTPTMSVLSAVSGLRIKFPELHESKKLFIIHIAHNDLLLLGADASQYFPDYTVLLACFILVVLFALQHYGTHRVGFLFAPILLAWLGCIGGIGIYNIFRWNPSVVRALSPYYIYNFFRKAGKDGWSSLGGIVLCITGAEAMFADLGHFSKLSLRLGFTIVVYPCLVLAYMGEAAYLSKHREDLQSSFYKALPDRVFWPVLIIATLATVVGSQAIISATFSIISQSRALGCFPRIKIVHTSSHVHGQIYIPEVNWALMFLCLAVTVGFRDTEMIGNAYGLAVILVMFATTCLMFLVITVVWSRSVALAALFTAGFGSVELTYLSACLAKVPHGGWLPLLLSLGTLLAMSTWHYGTKRKREHEAQSKVRLDRFLGLSAGMGLVRVPGVGFVYAASAAAGGVPPVFAHFVTNFPAFHRVLVFVSLQTLAVPRVPPGERFLVGRVGAPAHRMFRCVVRYGYKEGRRDHFNFENQLLMKVVEFLQLQDAAAAAKAGGCVSGSGELSVIPAHVDAGSAPPSCSEIDAGRRVRFEEPSGAAAGSEEEVKTLLEELESGVSYMIGHTCVQAHESSPAVKKFAINVVYGFLRRNSRRPAVELGIPNTSLIEVGMTYKI

SEQ ID NO: 225624 - protein, 318 aa, Zea Mays
MIRSKEAHTNAVILESLADIPDAEVKPPDNVLFVCKLNPVTQDEDLYTIFSRFGTVTSAEIIRDYKTGDSLCYAFIEFDTKEACERAYFKMDNCLIDDRRIHVDFSQSVSKLWGQFRQSKRNAKKDGCFKCGAPDHLARDCDQDGEQKNKGPSYVLKDENTQRGGNHRRSYDLVFDEDEADCSEERDHENGHRRKNRRIDDRKSELPPRGGRDRNSHERTHSDEKGSKHGKDDRNRGDRKHDDYHSYSRSGDRSSGRNDDRDYSKRHDRSRSGEEEKGYRRRDKSDDSKHRREDGGHHVRNQQSDDRSYKERRHRDGR

SEQ ID NO: 225625 - protein, 70 aa, Zea Mays
MTEPLSNGAVYQSVPESYVLPEHQRPRSSPPSSAAAIPVVDLGGDDPDRTAEQIVAAGKEFGFFQKKRNL

SEQ ID NO: 225626 - protein, 1045 aa, Zea Mays
MGYTYTPTYYSGLQDTIASLCKSILPSFRVGRRLTADQAAARRHAEQLKWQQESFHRILHLAALHREGIAPASDVAAFRGTMLAALVAPPQHLEQPAVLRDKLLFLQELLYAKCVSAAEYNASKAPLVQRLAAFGVIVDCPDAEVSAEEWSEIDLRDPPPPATAAASDKPKHKAFVTPWKSRSKKDQDVNSSASRPPLAPVDHNNATNAPVFMTESSPSETVPSGKAEKGKRRHLAGMFHSGGSGTENKEPAGEEGVVEKETVRGKKKSSWGFDGIKKWTKAGACNSGEAAATGEQPQHVPPRSSYSECQLEASPMAASGPDAKRAKTRLHSDTDNDSASELLRDKVLVENTKKELSRIQAELSSTNRNLNFSNQQMEAISTKLPVDKSDLKSYFPKAWCDQHGDGVITAAKEGFKQHVEEMEKQRDITGSEGWATFEDIDLDDNFNPRAFSRHQPDSAFADVLETNLSSMQSASTRGRQRSCDVTKQVPVADTWAPVPWRCGPRRRLARSSLHDMAASVLQAERHLLLLGSGRNRPLLRMLPPRVLFPHRRRSWPRAVRVSPGDGEGAGGFASAVEKRSIPGIVEEEGYGARGEELEGDVAGALEQRWPPWDGLAERYKLIGATSLAFVICNMDKVNLSVAIIPMSHQYGWNSSTAGLVQSSFFWGYALSQLPGGWLAKLFGGRKVLEVGVVTWSLATAIIPVVAGFMPGLVLSRILVGIGEGVSPSAATDLIARSIPWQERSRAVAVVFGGLSFGSVLGLLFAPPIIQNFGWESVFYIFGLLGIVWCLGFESLIVQRFGDKKSLLNLGQSSTGSDGLISYAMSSESSHSSLEDLQNSLKAVWAMIYAHFCGSWGHYTCLSWLPTFFSEELNLNLTEAAWVSVLPPLGSMIITSIAAPFADNLISNGVDTTKVRKICQTIAFVSPATFMMLSSVDLGLPPWEIVAFLTSGVALSSFALSGLYCTHQDISSEYASILLGITNTVGAVPGIVGVALTGFLLDSTHSWSISLFAPSIFFYLTGTVVWLAFASSKPQDFSKSGPESEP

SEQ ID NO: 225627 - protein, 143 aa, Zea Mays
MIVLHEYPLSMVDHVGFRRFVGALQPLFKIGTRNMIRSDIMKHYEVEKKKAIEYMAGIQSRVAVTTDLWTSDNQKRGYMAITAHFIDESWTLRNIIMRFIYVPAPHTADVIGEELYESLVEWNLDEKISSVTLDNCTTNDASY

SEQ ID NO: 225628 - protein, 248 aa, Zea Mays
MRNYISYGMSLLEENGHDEISIKAMGRAINKTVMVVELIKRRVGGLHQNTATESVDITDTWEPLEEGLLPLETTRHVSMITVTLSKNPLDTSSPGYQPPIPAEEVKPAFDYDHEESYPTGRGRGRGGGRRGRGRGMSNGPPPPAYGYNEEWEEEGDYYNRGRGRGRLRGRGGRGRGGYYGGGRRGGYGYDYGYAPRGGYYEEQDEYYDEPEEYAPPPGRGRGRGRRGGMPWRGRGGRGPPRGGRGSYY

SEQ ID NO: 225629 - protein, 586 aa, Zea Mays
MPRIDGTDGEDAPGVPTQQRRRSPVSQVGTHDVVALKPNKADAGSASLGQGVVYRLKDSSITVAFDDIPEDGLNSPLRLEKLANEVTYRRMKDALIELSKAVQTGPCANLVPVLFGEKAPMRSKDAMKFSPFNKNLDDSQKEAISKALGSRDVFLLHGPPGTGKTTTIIEIILQEVKRGSKILACAASNIAVDNIVERLARYRTKLVRLGHPARLLPQVLDSALDAQVLRADNSSLAGDIRKEMKVLNSKLLKAKDRNTKRDIRKELKTLAKEERKRQQLAVTDVLKNADVVLTTLTGASSKKLNGITFDLVVIDEAAQALEVACWIALLKGPRCILAGDHLQLPPTIQSVEAEKKGMGKTLFERLTEAYGEEITSMLTVQYRMHEHIMSWSSKELYNNKIKAHSSVAGHMLYDLEEVTRSSSTEPTIVLIDTTGCDMEEVKDEEESTMNEGEAAVSIAHAKLLVESGVNASDIGIITPYAAQVTCLKMMRNKDAKLKDLEISTVDGFQGREKEAIIISMVRSNSKKEVGFLSDHRRMNVAVTRARRQCCLVCDVETVSSDRFLKRLVEYFEENGEYLSASEYQSS

SEQ ID NO: 225630 - protein, 292 aa, Zea Mays
MAGRGGGGKGAAGRMMSLQEFVSCMQPLIDLEKAAEISAESETSAKSLERRGCVIANLKCTDAQTGLMGKTLLEFQPNKGDVLPSHKFGTHDVVALKPNKADAGSASLGQGVVYRLKDSSITVAFDDIPEDGLNSPLRLEKLANEVTYRRMKDALIELSKAVQTGPCANLVPVLFGEKAPMRSKDAMKFSPFNKNLDDSQKEAISKALGSRDVFLLHGPPGTGKTTTIIEIILQEVKRGSKILACAASNIAVDNIVERLARYRTKLVRLGHPARLLPQVLDSALDAQKSYDL

SEQ ID NO: 225631 - protein, 229 aa, Zea Mays
MGKTLFERLTEAYGEEITSMLTVQYRMHEHIMSWSSKELYNNKIKAHSSVAGHMLYDLEEVTRSSSTEPTIVLIDTTGCDMEEVKDEEESTMNEGEAAVSIAHAKLLVESGVNASDIGIITPYAAQVTCLKMMRNKDAKLKDLEISTVDGFQGREKEAIIISMVRSNSKKEVGFLSDHRRMNVAVTRARRQCCLVCDVETVSSDRFLKRLVEYFEENGEYLSASEYQSS

SEQ ID NO: 225632 - protein, 122 aa, Zea Mays
MSAGLNLGNLFDSEQEFKRETRFTSKCPPKEIVRKIEEAAKPLGFDVQKKNYKLRLEKVKAGRKGNLNVATEILQVAPSLHMVEVRKAKGDTLEFHKFYKNLSKTLKDVVWKSDDLQTQHAS

SEQ ID NO: 225633 - protein, 507 aa, Zea Mays
MHSTSVRLQSIPLFPTLLQSSSVHFKAERLWMLRLLSAGSNLADDAKIYKRGRVLELALAFCSSPVSDFESKVLVLKQHRGTTDPLRQSWGQVATMIGIANIFDDYLELSYSPRLYIPEALSSSKESCSSAFASVKVRALCSFFEEKTSTSAMYTSVIAKLVDQALASGKIYDGDGFNYIKESFENGTLHLIRLLSDGGVHSRLDQLQLSYKRTTRFTFICSIQLLLKGVSERGAKKFVCTSLPMGVTFLDGSNVGFVETLENDLLELRGKGIDAQIASGGGRMYVTMDRYENDWDVVKRGWDAQVLGEAPYKFKSALEAVKTLRAQPKANDQYLPPFVIVDDIGKAVGPVLDGDAVVTINFWADRMVMLAKALTGHLSSGKIMSQAISTILYCIGMELRFRWDQVATSVEQPDGFPVQLERTILLLPPCLYMDGLASAITALRTCTDVAHLTHVLLQFRLAWCGKLVRDAHAIAAHYTYSVKGLCFDLFIIRGGIRAFHACWRCTM

SEQ ID NO: 225634 - protein, 856 aa, Zea Mays
MGALGYSSSKPPLTKIVESANGRPQDMDVVAAMRNGEVLGRLTVLKSDHCPGSHSLNLPERVEGAPNFREIPGFPVYGVANPTVDGIRAVIQCISTSKGGRPVLWHNMREEPVIYINGKPYVLREVERPCKNMLEYTGIDRDRVERMEARLKEDILREAERYGGAIMVIHETDDGEIFDTWENVDNEAVLTPLEVYKNLVSEGLPIKYARVPITDGKAPKSSDFDTIAFNVTAASKGTAFVFNCQMGRGRTTTGTVIACLLKLRIDHGRPIRIPVCQYDHEDDAIYSTGGDATDHNGHLNSESWKPRTLTKLNSGFGINDILLLRKITRLFDNGIECRQTLDTVIDRCSALQNIRQAVLNYTRVINQQHVEPRVRRVALNRGAEYLERYLKLIAFSAYLGSEAFDGFCGQGQTKISFKGWLQQRPEIQTMKWSIRLRPGRFFTVPHEQKATYPPPQGDVTMETIVKARSGSVLGKGSILKMYFFPGQKRSSSVNFRGAPHVIKVDGYPVYSMATPTIDGASDVLSYLGSKDTTGRNIAQKVVVTDLREEVVVYIKGSPFVLRELDQPVDTLKHVGISGPMVENIETRLKEDILSEVKQLGGRLLLHQEEFNAATNQCSVVGYWEHIDLEDVMTPAEVYSTLRDKGYCIEYKRIPLTREREALAADVDAIQSSIDESARYYLFISHTGYGGVAYAMAITCLGLSADAKFVMEETAETHFVSTSLAKNVSIKTKTDIALKQGDYRDILNLTRVLVHGPKSKEEVDTVIDRCSGAGHLREDIMHYRKALQDCSHDDDDDCDEEHSYLTDMGTKALRRYFFLITFRSYLYSTTSCKTTFTSWMKARPELGHLCDNLKLDK

SEQ ID NO: 225635 - protein, 856 aa, Zea Mays; identical to SEQ ID NO: 225634

SEQ ID NO: 225636 - protein, 985 aa, Zea Mays
MPSSEEAILRGEYAVIRSLVRVLEGGVEGKRQVDKVIDKCDSMQNLREAIATYRNNILRQPDEMKREASLSFFVEYLERYYFLICFAVYVHSVSSAHQTTLSVEVSFSDWMRARPELYSILRRLLRRDPMGALGYSSSKPPLTKIVESANGRPQDMDVVAAMRNGEVLGRLTVLKSDHCPGSHSLNLPERVEGAPNFREIPGFPVYGVANPTVDGIRAVIQCISTSKGGRPVLWHNMREEPVIYINGKPYVLREVERPCKNMLEYTGIDRDRVERMEARLKEDILREAERYGGAIMVIHETDDGEIFDTWENVDNEAVLTPLEVYKNLVSEGLPIKYARVPITDGKAPKSSDFDTIAFNVTAASKGTAFVFNCQMGRGRTTTGTVIACLLKLRIDHGRPIRIPVCQYDHEDDAIYSTGGDATDHNGHLNSESWKPRTLTKLNSGFGINDILLLRKITRLFDNGIECRQTLDTVIDRCSALQNIRQAVLNYTRVINQQHVEPRVRRVALNRGAEYLERYLKLIAFSAYLGSEAFDGFCGQGQTKISFKGWLQQRPEIQTMKWSIRLRPGRFFTVPHEQKATYPPPQGDVTMETIVKARSGSVLGKGSILKMYFFPGQKRSSSVNFRGAPHVIKVDGYPVYSMATPTIDGASDVLSYLGSKDTTGRNIAQKVVVTDLREEVVVYIKGSPFVLRELDQPVDTLKHVGISGPMVENIETRLKEDILSEVKQLGGRLLLHQEEFNAATNQCSVVGYWEHIDLEDVMTPAEVYSTLRDKGYCIEYKRIPLTREREALAADVDAIQSSIDESARYYLFISHTGYGGVAYAMAITCLGLSADAKFVMEETAETHFVSTSLAKNVSIKTKTDIALKQGDYRDILNLTRVLVHGPKSKEEVDTVIDRCSGAGHLREDIMHYRKALQDCSHDDDDDCDEEHSYLTDMGTKALRRYFFLITFRSYLYSTTSCKTTFTSWMKARPELGHLCDNLKLDK

SEQ ID NO: 225637 - protein, 744 aa, Zea Mays
MEFRLKEDILQEASRYGNKILVTDELPSGQMVDQWESVVYDTVKTPLEVYEELQHQGYLVDYERVPITDEKAPKEGDFDNLVRRISQVDIETEIVFNCQMGRGRTTTGMVIATLVYLNRIGASGIPRTGSIGKVFYAGNDVDDYMPSSEEAILRGEYAVIRSLVRVLEGGVEGKRQVDKVIDKCDSMQNLREAIATYRNNILRQPDEMKREASLSFFVEYLERYYFLICFAVYVHSVSSAHQTTLSVEVSFSDWMRARPELYSILRRLLRRDPMGALGYSSSKPPLTKIVESANGRPQDMDVVAAMRNGEVLGRLTVLKSDHCPGSHSLNLPERVEGAPNFREIPGFPVYGVANPTVDGIRAVIQCISTSKGGRPVLWHNMREEPVIYINGKPYVLREVERPCKNMLEYTGIDRDRVERMEARLKEDILREAERYGGAIMVIHETDDGEIFDTWENVDNEAVLTPLEVYKNLVSEGLPIKYARVPITDGKAPKSSDFDTIAFNVTAASKGTAFVFNCQMGRGRTTTGTVIACLLKLRIDHGRPIRIPVCQYDHEDDAIYSTGGDATDHNGHLNSESWKPRTLTKLNSGFGINDILLLRKITRLFDNGIECRQTLDTVIDRCSALQNIRQAVLNYTRVINQQHVEPRVRRVALNRGAEYLERYLKLIAFSAYLGSEAFDGFCGQGQTKISFKGWLQQRPEIQTMKWSIRLRPGRFFTVPHEQKATYPPPQEKVKQCEFPGCTSCY

SEQ ID NO: 225638 - protein, 812 aa, Zea Mays
MGKSSKKAAAVAAAPAAVPKGKKREAEDEIEMAVSAKKQKAAPPAKAVPTSKKDAKEDAKSKKQPPPKKAENSSSDSEEDPESEEENFYNLIESGRADGDEEFDEDEEDGFEFGDADEAMQCVVMAESSTTAAALRAHTQDYEALAAHKRKALAEEQPQREEGPKRPRPDQLSEAEAATMFDQLMEGFGLRRKRRSKDGKRRGRKKGTKNKGSAEVIKKLGDATLLFAEEKFNEAIPILHEIVRIAPNLSDSYYLLGSIYSEIGELDKAINFLMLAAYVSPKDASLWKKLIPLAKKKGDASLARHCILKAMNADPEDVDLKYLCGYMYHNLCEYQKAAEIYEQIVRIYPANSAVRKVAAQMYRECGQIDNAINLLKDYADTQTFNIDWSVLDLLISLYLRNNVFSEALKQIKRAQLHLGSQQKLPVQLQAKEVICHAYCGDMKHAEIFLRDVRLEPSKENIDVLKELASNLEKMGRYEYAVKFYLLIENVATQNDGGLCFDHKEMGSWYVKAAQCYMILGDKKNAIPYFYKALQSMKDNIGIRLTLSSLLIDDDKTDEAATLLSPPKIPELQSANTPDQQKPWWCDGKVKMALAKLYYNKGNLEDFVDTIFHPILETLNVEYANRKVKSMRKLPNIVLHERVKVLGEQRPDSVFQGLRPIASPDELQKANRAKKLIEKRTAANEELKHDYLPRTKQVPPVPGLLTNVEHHQLVLNLCRTLALLQRYWDALQIINRTLKLGNDALTGDKKEELRSLGAQIAYRAPDPSHGFKYVRYVVQQHPYSLAAWNSYYKNRGQVSTSFQISPSDKRSES

SEQ ID NO: 225639 - protein, 339 aa, Zea Mays
MDRIVGSKYKLGRKIGSGSFGEIYLATHVDTYEIVAVKIESSKTNHPQLLYEAKLYNALQGGTGIANIKWCGIDGDENILVIDLLGPSLEDLFVYCGRRFSLKTVLMLADQMVYVIDFGLAKRYRDSATNRHIPYRENKNLTGTARYASRNTHLGIEQSRRDDLESIGYVLLYFLRGSLPWQGLKAATKKQKYDKISEKKLSTPIEALCKSHPVEFASYFHYCHSLTFDQRPDYSFLRHVFRELFEREGYQFDYVYDWTLLKCKQSQKAKVQQGCSHDAGVSSRPVATNVDKHQVGVARPINASGLLEAEQRPAIRMQLNSRSNNLHPERLAIQFKKDY

SEQ ID NO: 225640 - protein, 129 aa, Zea Mays
MGLSVEQQKRALELRNMVNGGEESLEETRTDGASFNPAAAGGCCQGNGGFTCCQTDLPKEKQDKSIISEQNPKSSDKEGGAGSKKGDTKTCPVPIWFETWERADTYAALAVVAAAAAVLVSFRIYKNLN

SEQ ID NO: 225641 - protein, 143 aa, Zea Mays
MVTSPGGNTVYTLKGKSGEKFEFKAPRGGMYKFCFHNPYGAPETVSFYIHVGHIPNEHNLAKDEHLDPINVKIAELKEALESVTAEQKYLKAREARHRHTNESTRKRVMFYTMAEYLAFMAASALQVLYIRRLFSKNVGYNRV

SEQ ID NO: 225642 - protein, 481 aa, Zea Mays
MELKPGMSALVTGGASGIGKALCIAFARRGLFVTVVDFSEENGREVATLVQKENSKFHGDLRIPSSIFVKCDVSNADNLAACFEKHVQTYNGLDICINCAGIANKTLVYDDTSDGTRTWRHAVNVNLVAVIDGTRIASQIMRNQKKPGVIINIGSAAGLYPMFLDPVYSAAKGGVVMFTRSLSPLKRHGVRVNVLCPEFVQTNMAEQMSRKVIDSSGGYLEMEDVVNGTFELIQDESKAGACLWITKRRGMEYWPTPEEQRKYMVNPNKSKRMLTNNIYPSIRMPEFFEKIVVHTLSHNFRNATRLERVQLRFPIKAHSALVKIIYAGVNASDVNFSSGRYFSGNPKETASRLPFDAGFEGVGIVAAVGDSVSHIKVGTPVALMTFGSYAEFTEVPAKHLLPVPRPDPEVVAMLTSGLTASISLEKAGQMTSGQVVLVTAAAGGTGQFAVQFLGTYFGSLYFYWIEQWARYSSLLGHGWRN

SEQ ID NO: 225643 - protein, 419 aa, Zea Mays
MELKPGMSALVTGGASGIGKALCIAFARRGLFVTVVDFSEENGREVATLVQKENSKFHGDLRIPSSIFVKCDVSNADNLAACFEKHVQTYNGLDICINCAGIANKTLVYDDTSDGTRTWRHAVNVNLVAVIDGTRIASQIMRNQKKPGVIINIGSAAGLYPMFLDPVYSAAKGGVVMFTRSLSPLKRHGVRVNVLCPEFVQTNMAEQMSRKVIDSSGGYLEMEDVVNGTFELIQDESKAGACLWITKRRGMEYWPTPEEQRKYMVNPNKSKRMLTNNIYPSIRMPEFFEKIVVHTLSHNFRNATRLERVQLRFPIKAHSALVKIIYAGVNASDVNFSSGRYFSGNPKETASRLPFDAGFEGVGIVAAVGDSVSHIKVGTPVALMTFGSYAEFTEVFHFVPFYRTTSSSQTSSSSAKTRP

SEQ ID NO: 225644 - protein, 108 aa, Zea Mays
MRRAMQQHFPLILLYYEHSCKAAMMSSTSTFSGKGSTAHDPGSPSPASPKGVCVPSSRSRIGSLSHFPVVLCSGISQVDYLNSILRELHLSMACISFYCDSHDWELVG

SEQ ID NO: 225645 - protein, 534 aa, Zea Mays
MHPFCCAPLVPVSPVASAAAASSAVAGAPAVMPPPQPPPPPPPPPRSNPASGGERRARAAGVSGGGGGGSSPPEGVKLNEIVGGGISGILYKWVNYGRGWRPRWFALHDGVLSYYKIHGPDRIILSRETERGAKVIGDDSLRRLNRPSTSSSSHSNGHHHPRNPIGEIHLKVSTVRESRSDDRRFSIFSGTKTLHLRAETREDRAAWLEALRATKDMFPRMSSSEMVGPGDTAAAVAVSTERLRQRLQQEGVSEAAIADSEMIVRAEFEALHKQLVLSKQKHALLLETLRQLETEKVDLENTLVDESQRQSKEYGSASKPRHEKYSEGSASESDDYNEPQDPAEETDDDENLYFDTRDFLSSSSFKSSGSDFQRSEAGSDDEDDYPMDGIDPSMKSIGISYPYVRRRKKLPDPVEKEKGVSLWSMIKDNIGKDLTKVCLPVYFNEPLSSLQKCFEDLEYSYLIDRASEWGKRGNSLMRILSVAAFAVSGYASTDGRSCKPFNPLLGETYEADYPDKGLRFFSEKSSPYGCCLPL

SEQ ID NO: 225646 - protein, 480 aa, Zea Mays
MRVKGSRKKGSASESDDYNEPQDPAEETDDDENLYFDTRDFLSSSSFKSSGSDFQRSEAGSDDEDDYPMDGIDPSMKSIGISYPYVRRRKKLPDPVEKEKGVSLWSMIKDNIGKDLTKVCLPVYFNEPLSSLQKCFEDLEYSYLIDRASEWGKRGNSLMRILSVAAFAVSGYASTDGRSCKPFNPLLGETYEADYPDKGLRFFSEKVSHHPMVVACHCEGTGWRFWADSNLKSKFWGRSIQLDPVGELTLEFDDGEVFQWSKVTTSIYNLILGKLYCDHYGTMRIQGNREYSCKLKFKEQSIIDRNPHQVQGVVQDRNGRTVATLFGKWDESMHYVMGDCFGKGKGTEQLSEAHLLWKRSKPPKFPTRYNLTQFAITLNELTPGLKEKLPPTDSRLRPDQRCLENGEYERANAEKLRLEQRQRQARKMQESGWKPRWFAKDKATDTYRYVGGYWESREKSSWEGCPDIFGQVPNDLMVTD

SEQ ID NO: 225647 - protein, 541 aa, Zea Mays
MEGVSSAPEMDEAISTDQSSRSTKRRAKVWDHVDSELIDGKEKAVCKYCKAHLSSAAGKEISFRKCEDPSWKEMINYCQPSFRLVGRQTVRSDCMLLYEEEKLQLIEQFTKLKSHVSLTADLWSSNQNLGYLGVTAHFISEDFELHKKIIAFKKISFPHTSYAVQDGITSCLLEWGLVGDLFTLTLDNASVNNRAMKDMRDALGSQMFFSGEHLHVRCSSHVLNIMVQAGLKVVPNAVGKVRDIIKVVISTPSRLQIFNSIVQTLGLRSKSGLILDVPHRWNATYDMLNEALKYKAALNRYAVEQHHECPTEEDWSKAEALHGFLQEFSDATKAFSADRHPTAHLFLKMLLVIRGVLLDENYNSNELLNEMANVMYTKFQKYWINPNIVLLIAAVLDPSMKTEFVKFYFYTVGDNVDMKMRELKRYLKKYYLEYEKIMRSHSLHVFITPDDQMRSEPSTSSPLCGKRRVEHAFAQFASQNANARPERTEMDTYLEDPRILIKPDECFNVLGWWKKNSDAYPILSLMARDFMAIPVSTVSSE

SEQ ID NO: 225648 - protein, 465 aa, Zea Mays
MEGVSSAPEMDEAISTDQSSRSTKRRAKVWDHVDSELIDGKEKAVCKYCKAHLSSAAGKAHFISEDFELHKKIIAFKKISFPHTSYAVQDGITSCLLEWGLVGDLFTLTLDNASVNNRAMKDMRDALGSQMFFSGEHLHVRCSSHVLNIMVQAGLKVVPNAVGKVRDIIKVVISTPSRLQIFNSIVQTLGLRSKSGLILDVPHRWNATYDMLNEALKYKAALNRYAVEQHHECPTEEDWSKAEALHGFLQEFSDATKAFSADRHPTAHLFLKMLLVIRGVLLDENYNSNELLNEMANVMYTKFQKYWINPNIVLLIAAVLDPSMKTEFVKFYFYTVGDNVDMKMRELKRYLKKYYLEYEKIMRSHSLHVFITPDDQMRSEPSTSSPLCGKRRVEHAFAQFASQNANARPERTEMDTYLEDPRILIKPDECFNVLGWWKKNSDAYPILSLMARDFMAIPVSTVSSE

SEQ ID NO: 225649 - protein, 84 aa, Zea Mays
MADPTRKEVESIRKRIDTVNRQLKPLSKSCVKKEKEYKEVLEAYNEKSKEKALLVNRLIELVSESERMRMKKLEELNKTVDSLY

SEQ ID NO: 225650 - protein, 260 aa, Zea Mays
MALGYTIAAILKRSTRVFSDGKATVKIDWLEQLNRQYIQVQGRDRLYVKSVADQLGLDGSYIPRTYIEQIQLEKLINDVMALPEDLKTKLSIDDELVSSPKEAFSRVSADRRNKLMKSGLSQSYSTHGDKNIVKLSKLTETNRRFGGGRALEPPAINQGAITQLSEQISTLNERMDEFTSRVEELNSKFTVKKHLPSQQNLALPNDACNGSTPTNLFVSHLGNGTLIPHSSSSNQLSKDSPMIEEIMNITRGQRQEPGAG

SEQ ID NO: 225651 - protein, 227 aa, Zea Mays
MPFLSQVQGRDRLYVKSVADQLGLDGSYIPRTYIEQIQLEKLINDVMALPEDLKTKLSIDDELVSSPKEAFSRVSADRRNKLMKSGLSQSYSTHGDKNIVKLSKLTETNRRFGGGRALEPPAINQGAITQLSEQISTLNERMDEFTSRVEELNSKFTVKKHLPSQQNLALPNDACNGSTPTNLFVSHLGNGTLIPHSSSSNQLSKDSPMIEEIMNITRGQRQEPGAG

SEQ ID NO: 225652 - protein, 78 aa, Zea Mays
MEKDDSRYKLLLISLPREDSSSSSLSYLWSGRRINPAPVLSSVFAQQVWFIIFQWLGLTAMPSHHNLPPAYSQIGGAR

SEQ ID NO: 225653 - protein, 291 aa, Zea Mays
MQSDISRLEAKIERMDAQLAAKDRELATLTRTEAKNTAALKSQIDKLQQERDEFQKMVIGNQQVRTQQIHEMKKKEKEYIKLQEKLNQVLMEKKKESSRSGMEIMNLLQKEGRQRGTWNGKKNDNDYYKMIVDAYEVKKQELMQENADLRALLRSMQMDMRDFLNAPNGSSQSTVTDNGRQESGSPQSPLGGKTDVFDLPFHMARDQIEESLRTKMTSIKARMTQLQDAQKGAEVTSEATDRELELEAQLVEARSIIQEQACIMSKHFKSDKPSGRRHSGLDGEREASAEV

SEQ ID NO: 225654 - protein, 270 aa, Zea Mays
MQSDISRLEAKIERMDAQLAAKDRELATLTRTEAKNTAALKSQIDKLQQERDEFQKMVIGNQQVRTQQIHEMKKKEKEYIKLQEKLNQVLMEKKKESSRSGMEIMNLLQKEGRQRGTWNGKKNDNDYYKMIVDAYEVKKQELMQENADLRALLRSMQMDMRDFLNAPNGSSQSTVTDNGRQESGSPQSPLGGKTDVFDLPFHMARDQIEESLRTKMTSIKARMTQLQDAQKGAEVTSEATDRELELEAQLVEARSIIQEQSFYRQCMKGG

SEQ ID NO: 225655 - protein, 368 aa, Zea Mays
MSSSARFDLRASSHQLQPPPSHASMSSDGGAFANAENLEHCARYLNQTLVTFGFPASLDLFATDPVSIARTCNCIYALLQQRQRDIEFRESTNDQRQRMQSDISRLEAKIERMDAQLAAKDRELATLTRTEAKNTAALKSQIDKLQQERDEFQKMVIGNQQVRTQQIHEMKKKEKEYIKLQEKLNQVLMEKKKESSRSGMEIMNLLQKEGRQRGTWNGKKNDNDYYKMIVDAYEVKKQELMQENADLRALLRSMQMDMRDFLNAPNGSSQSTVTDNGRQESGSPQSPLGGKTDVFDLPFHMARDQIEESLRTKMTSIKARMTQLQDAQKGAEVTSEATDRELELEAQLVEARSIIQEQSFYRQCMKGG

SEQ ID NO: 225656 - protein, 85 aa, Zea Mays
MTSKLHQTSRSTDDWRPLPLRDLLIHKASRPPSTTSCRYARRRRRPTSASQWPRRAVLMCSAVSPASLPKAASRPSRWRQSATPG

SEQ ID NO: 225657 - protein, 405 aa, Zea Mays
MREEALERLRGVVRDSAGKHLYTSAIFLADKVAAATGDPGDVYMLAQALFLGRQFRHALHLLNNSRLLRDLRFRFLAAKCLEELKEWHQCLLMLGDAKVDEHGNVLDHDDDSDIYFDKDAEDHEINIKSALCFLRGKAYEALDNRDLARQWYKAAVKADPLCYEALERLVDNYMLTCEEESELLSSLQFGEEDGWLSSFYSCLITKHEKEYLVEAKFKKLEEEACNILSSSSGETMKNNIDVLVCKAEYYHQSGEYQKCFKLTSSLLERDPFHLKCTLVHLATAMELGHSNDLYLLACNLVKDYPEKALSWFAVGCYYYCIKKYDQARRYFGKATGLDGTFPPAWIGTGIAYAAQEEGDQAMAAFRTAARLFPGCHLPTLYMGMQYVRMHNFKLAEQVPKSSSVV

SEQ ID NO: 225658 - protein, 532 aa, Zea Mays
MSDQLATLGSDEIPAAWCQPAARRSSLMDARCTRGIVPDLFICLYIYRWFEVIGRTTQAKMASVHKATTLVLMFCLLALGRAEYLKYKDPKQPVAVRIKDLLGRMTLAEKIGQMTQIERENATADALAKYFIGSVLSGGGSVPAPQASAQAWAAMVTEMQKGALSTRLGIPIIYGIDAVHGHNNVYKATIFPHNVGLGATRDPDLVKRIGEATALEVRATGIPYAFAPCIAVCRDPRWGRCYESYSEDPKVVQSLTSLISGLQGDAPADSAGRPYVGGSKKVAACAKHYVGDGGTHNGINENNTIIDTHGLLSIHMPPYYNSIIRGVSTVMVSYSSWNGVKMHANHFLVTDFLKNKLKFRGFVISDWEGIDRITTPPHANYSYSIEAGVGAGIDMIMVPFRYTEFIDDLTTQVQNKVIPMSRIDDAVYRILRVKFTMGLFENPYPDSSLAGELGKQEHRELAREAVRKSLVLLKNGKSSYAPLLPLPKKAGKILVAGSHANDLGNQCGGWTITWQGSSGNTTAGFVSNDRPG

SEQ ID NO: 225659 - protein, 156 aa, Zea Mays
MLESVKLAVELDWPVAGDGVTSRPCYLQGGCFDMDALQQHCGSIPPVPVVPSASASSSTLTSMAEAEHCSTNNVAAGGNLPWLELGANAVADAGGHVVGSCYAGALDELRWSEYFDSAFQAAESQQGALQPGQCVYGGKDDVPVHFDVHGGLSNWC

SEQ ID NO: 225660 - protein, 513 aa, Zea Mays
MTYNGLETCIINCSAYDDDSGISATTCGDGCVTADSLDDEVSSCFSKDASGSSFSSHCLSKQEEHSLDELGTPIAIHLLPFKAKKPITYTLSASDIENMKKKFAKLLLGYDTSGGARGVCAALALSNGIINLSATVFGELWKLEPLCEDKKIRWRKEMDWLMSPTTYIVELVPRKQSGADGCTFEIMTPKARSDVHVNLPALQKLDTMLIEVMDSMIDTEFWYEESGSRADGPVKITGPRKSKKWWLPSPRVPEQGLSRFQRKRLVFQAKLVHQILKAAKSINEQVLFHMPIPAAVMDALPKSGRASLGEDLYQAITTEYIPIEEIFVSLSLKTEHSVLETMNQLEGAMFAWNQRILEERSKRSPGRHSWSFMKDSSSELDKMSACIERVDTLVQLLKARYPNLPPTFIDVLKVQYNVDVGNAIVEAYSRVLVGVAFSILSRVAEILLEDDLVKRPNTPMASLKFDLSSDVYLAGITETPPGHVRRSLMDQISMVDGRFNAAVKKKGAKQLRW

SEQ ID NO: 225661 - protein, 439 aa, Zea Mays
MEGEQVGDFSEDNRSGINHSLHRISAIRNRKAQIIGLTCRVGRAISGSAEMIRDLVVSGGSILVIGPPGVGKTTLIREIARILADEGKKRVIIVDTSNEIGGDGDVPHSGIGRARRMQVPKVTMQHNVMIEAVENHMPEVIVIDEIGTELEAMAATTIAQRGVQLVGTAHGVTIESIIKNPCLQMLVGGIESVTLGDEEAKKRKVQKTILERKGPPTFLCAVEMISKTECRVHHRLDATVDAILAGKPPKFEARKMHNKSTEFEMPLVIPDREYEIESLPLYQEVMVTRSLSSDGNFSDDFAASRQTKSKSMPSEDNFGDNFVYTRKAKGNKPVHGKSLVQVYTYQISEADILQVATMMGFDDELDVTDDIGAADVILASSSEMKQNPWIHNVAKYHKLPIFVVKVITQYIDCVLSTADCACIDILFYIVNGRLIRWLK

SEQ ID NO: 225662 - protein, 277 aa, Zea Mays
MPQVMVVARNFMDMVAALPAGKLDMLYDSAFICEAVLRSLPPLAKKYALQMLYVLAPVTAAAMEEWVLDEYAAKHKVAIDKLLQLRVFVEVRDRRRDVSYKMNQKFQGNMQKYLVDGGSLPREPLPLSVTGRLPTPADLEAYALDQWECFLLQLINSSQVEKGSSFSSSMMKTFQRGLLSSRDGEASKLTENGFQFLLMETNAQLWYIMREYISSAEERGVDPTELISFLLELSFHKLGAAYSLNTLTDVQRIAIRDLAELGLVKQQQLVHSYPIGY

SEQ ID NO: 225663 - protein, 145 aa, Zea Mays
MYAYSTSKLHCEILRLFARVEYQLPNLIVGAVTKESIYGAFENGITAEQIISFLRQNAHPRVADKIPAVPENVTDQIRLWETDLNRVEMIPSHLYEDFPSKEWFEQCCDYARDNGYLLWEDPKRMRLIVRGEFHPEMREFLRRQR

SEQ ID NO: 225664 - protein, 581 aa, Zea Mays
MDNIEVRRRKKKGRSSGRRQGGRVQAVLRAGLVAMAFALLCLCSSTPSAIALTPDGEALLELKLAFNATVQRLTSWRPSDPNPCGWEGISCSVPDLRVQSINLPFMQLGGIISPSIGRLDKLQRLALHQNSLHGPIPAEIKNCTELRAIYLRANYLQGGIPSEIGELVHLTIFNLLRGTIPASIGSLTHLRFLNLSTNFFSGEIPNAGVLGTFKSSSFVGNLELCGLSIQKACRGTLGFPAVLPHSDPLSSAGVSPINNNKTSHFLNGVVIGSMSTLALALVAVLGFLWICLLSRKKSIGGNYVKMDKQTVPDGAKLVTYQWNLPYSSSEIIRRLELLDEEDVVGCGGFGTVYRMVMDDGTSFAVKRIDLSRESRDRTFEKELEILGSIRHINLVNLRGYCRLPTAKLLVYDFVELGSLECYLHGDEQEEQPLNWNARMKIALGSARGLAYLHHDCSPGIVHRDIKASNILLDRSLEPRVSDFGLARLLVDSAAHVTTVVAGTFGYLAPEYLQNGHATEKSDVYSFGVLMLELVTGKRPTDSCFIKKGLNIVGWVSSVRFSFFPLPFLPPLPRHVGWVFCS

SEQ ID NO: 225665 - protein, 527 aa, Zea Mays
MQLGGIISPSIGRLDKLQRLALHQNSLHGPIPAEIKNCTELRAIYLRANYLQGGIPSEIGELVHLTILDLSSNLLRGTIPASIGSLTHLRFLNLSTNFFSGEIPNAGVLGTFKSSSFVGNLELCGLSIQKACRGTLGFPAVLPHSDPLSSAGVSPINNNKTSHFLNGVVIGSMSTLALALVAVLGFLWICLLSRKKSIGGNYVKMDKQTVPDGAKLVTYQWNLPYSSSEIIRRLELLDEEDVVGCGGFGTVYRMVMDDGTSFAVKRIDLSRESRDRTFEKELEILGSIRHINLVNLRGYCRLPTAKLLVYDFVELGSLECYLHGDEQEEQPLNWNARMKIALGSARGLAYLHHDCSPGIVHRDIKASNILLDRSLEPRVSDFGLARLLVDSAAHVTTVVAGTFGYLAPEYLQNGHATEKSDVYSFGVLMLELVTGKRPTDSCFIKKGLNIVGWLNTLTGEHRLEDIIDERCGDVEVEAVEAILDIAAMCTDADPGQRPSMSAVLKMLEEEILSPCMSELCYEQHLEL

SEQ ID NO: 225666 - protein, 784 aa, Zea Mays
MAAAKEKASVCCRDAPARVAGAPVVPMRAIAASPVGKVVALAAGGGERVSASAAGSSGAVIEEIAAVQPTTAKASSKEKNAGIPIMTRAQRCHPLDPLSAAEIAVAVATVRVAGRSPEERDSMRFVEAVLLEPEKNVVALADAYFFPPFQPSLLPRSKGSAVIPSRLPPRRARLVVYNKQSNETSIWIVELSEVHAATRGGHHRGKVISSEVIPDVQPAMDAMEYAECEATVKSYPPFIEAMKRRGVDDMDLVMVDAWCAGYYSEADAPSRRLGKPLIFCRTESDSPMENGYARPVEGIHVVVDMQNNAVIEFEDRKLVPLPPPDHLRNYTPGETRGGVDRSDVKPLIINQPEGPSFRINGYFVEWQKWNFRIGFTPKEGLVIYSVAYVDGSRGRRPIAHRLSFVEMVVPYGDPSEPHYRKNAFDAGEDGLGKNAHSLKKGCDCLGYIKYFDAHFTNFTGGVETIENCVCLHEEDHGILWKHQDWRTGLAEVRRSRRLTVSFICTVANYEYGFYWHFYQDGKIEAEVKLTGILSLGALMPGESRKYGTTIAPGLYAPVHQHFFVARMDMAVDCKPNEAHNQVVEVNVKVESAGTHNVHNNAFYAEEKLLKSELQAMRDCDPSSARHWIVRNTRTVNRTGQPTGYRLVPGSNCLPLALPEAKFLRRAGFLKHNLWVTQYKRGEMFPGGEFPNQNPRIHEGLPTWVKNDRPLEETDIVLWYVFGLTHIPRLEDWPVMPVEHIGFMLMPHGFFNCSPAVDVPPSSSDADVKEAESPKAIQNSLISKL

SEQ ID NO: 225667 - protein, 550 aa, Zea Mays
MAAAKEKASVCCRDAPARVAGAPVVPMRAIAASPVGKVVALAAGGGERVSASAAGSSGAVIEEIAAVQPTTAKASSKGIPIMTRAQRCHPLDPLSAAEIAVAVATVRVAGRSPEERDSMRFVEAVLLEPEKNVVALADAYFFPPFQPSLLPRSKGSAVIPSRLPPRRARLVVYNKQSNETSIWIVELSEVHAATRGGHHRGKVISSEVIPDVQPAMDAMEYAECEATVKSYPPFIEAMKRRGVDDMDLVMVDAWCAGYYSEADAPSRRLGKPLIFCRTESDSPMENGYARPVEGIHVVVDMQNNAVIEFEDRKLVPLPPPDHLRNYTPGETRGGVDRSDVKPLIINQPEGPSFRINGYFVEWQKWNFRIGFTPKEGLVIYSVAYVDGSRGRRPIAHRLSFVEMVVPYGDPSEPHYRKNAFDAGEDGLGKNAHSLKKGCDCLGYIKYFDAHFTNFTGGVETIENCVCLHEEDHGILWKHQDWRTGLAEVRRSRRLTVSFICTVANYEYGFYWHFYQDGKIEAEVKLTGILSLGALMPGESRKYGTTIAPGG

SEQ ID NO: 225668 - protein, 259 aa, Zea Mays
MFNLFQKGEPMDSALSVLIGYQEAKLINFANEDALIWHEANIPYAVWGPTSTRTRSLTYYPSEALKHNGSLYAHVYFARSGYPVDPTDPKYEQKSSFGRTHRLKITLLLTNMPMHSPIFYFHQGPQGSKCLHLGIDDKREVVGTTVVVRELFYNQPVRRKQMQSSEKRELHHVKKCVLQIALIHPQISLRLLDNDSEDELLYTEFSSSPLPLISKTFGDDISRCLHEITASDQGWTLSGHISGPADVFCTKDAQYLCIL

SEQ ID NO: 225669 - protein, 85 aa, Zea Mays
MLNYLLSVTPVGVGEYMLASWFGMMPITLALVYVGTTLKDLSDVTHGWSEISTTRWILIISGFVLSGMCHYLPFRILIVSAFFGA

SEQ ID NO: 225670 - protein, 58 aa, Zea Mays
MEVEPARRDAAALDPELLQLAELAPGALRENSIADALYSQWLVLPETTKLEICAISVT

SEQ ID NO: 225671 - protein, 292 aa, Zea Mays
MANASKHLQPSSQAGNDKKYQGTLVASPAKAISPKCVNRIVPSKQLILGGGSIGHVASFLIKVVALEAVRRVSKTRCPFIWNSVQALQILVYPPFSWIQRWAPLGFLVQGIQKLSMPLLFLSVTTTVSELSSKHDDEPDNNTEHSETPSETNELASTSGTSDAADGTKEIVQENWLVLLFRELEKQGITLPERFTEDELRRFYVAANGDFQSLLSSVKKTIHWRETFHILTLQELDRWSHLVFWHGFDTMLRPCLVVRLGLACSSIPPHDRPRFGQAVEGQTWCSDESCPTE

SEQ ID NO: 225672 - protein, 881 aa, Zea Mays
MASISLEDVRNETVDLETVPVQEVFQHLKCSKEGLSSAEGDNRLKIFGPNKLEEKSESKLLKFLGFMWNPLSWVMEAAAIMAIVLANGGGKPPDWQDFVGIVVLLFINSTISFIEENNAGNAAAALMAGLAPKTKVLRDGKWKEEEASILVPGDIISIKLGDIIPADARLLEGDPLKVDQAALTGESLPVNKHPGQGVFSGSTVKQGEIEAVVIATGVHTFFGKAAHLVDSTNNVGHFQLVLTAIGNFCIISIAVGMVIEIIVMYPIQHRAYRDGIDNLLVLLIGGIPIAMPTVLSVTMAIGSHRLSQQGAITKRMTAIEEMAGMDVLCSDKTGTLTLNKLTVDKTLIEVCGKGVDKDMVLLYAARASRVENQDAIDTCIVGMLADPKEARAGIKEVHFLPFNPVEKRTAITYIDGNGDWHRVSKGAPEQIIELCRMSKDAEKKIHALIDGYADRGLRSLGVSYQLVPEKSKESTGEMGGLNIDELIEKADGFAGVFPEHKYEIVKRLQDRKHICGMTGDGVNDAPALKKADIGIAVDDATDAARSASDIVLTEPGLSVIVSAVLTSRAIFQRMKNYTIYAVSITIRIVLGFLLVALVWKFDFAPFMVLIIAILNDGTIMTISKDRVKPSPTPDSWKLKEIFATGIVLGTYMALATALFFYLAHDTDFFTNAFGVRSIKENDKELMAALYLQVSIISQALIFVTRSRSWSFVERPGALLVIAFLAAQLVATCIAVYANWEFCKMQGIGWGWGGAIWAFSVVTYFPLDVLKFAIRYALSGKAWNNINNKTAFTNRTDYGKGEREAQWATAQRTLHGLNQATATSDLFGDNQGYRELSELAEQAAKRAEVARLRELHTLKGHVESVVKLKGLDIDTIQQSYTV

SEQ ID NO: 225673 - protein, 309 aa, Zea Mays
MIYRSDLESVLASVHETVFAIKKEAVEVSNNRPFEEFLNSAVFSKDVEGVSGKSMSLSDFRNWCTLLPSLRKFLGNLLMPPDSGRPGFEVPLLHYPENICTDTLLLNKEYAWHIGGGFSQHEVQEWKLLYHSSLHGQSFNTFLGKVTNGDAQTVLIVKDTEGSIYGGYASQPWERHSDFYGDMKTFLFKCYPQASIFRPTGANKNLQWCAVNFSSENIPNGIGFGGQPHHFGLFLSANFDQGHSFTCSTFTSPPLSKTNRFRPEVIECWGIQMRGAQDEKLELVKGTVLERFKEDRNMLKMVGLANASD

SEQ ID NO: 225674 - protein, 706 aa, Zea Mays
MGSDLKEMKYRRRIGVEERPQCSDPRGGADWAALQQDPVELLRKLDELRDQITRSCNVVVGQPREHRRVSRRAVSMLPEHLEPPPLPGYHRSRYGGRYGHGLPPPSPYAPPRPEHGERYARQSSGHYRQYPPRHCENGGMGPGTYHHHGCACPHCLHGQRTFPQEENIPMARYFAGQHESYRLERSPSVSSDYDRGSVASSLYSHRSVSKMRAEYFRKKAEHICRPVDGAAPFSVCSSCYKLLLMPMEKCVGRKQNRFQCGSCCQIISLKHQEENGIPFALAPSSSLHAPEMEQSTSDQMRQDSVHQRHEDFNFMFNNSNDHCDMQNNMDFTDDNSLPSTASNDRIEIDKECGSTRSIQSKAEGLSFSPSRSVDIGSPKDILCERDKDSNVEPSSDGPLSPRSPTLEDKLVDPLCAQEKGNDEDDQGTAYRSNLTCKGEYDANDEYDGDVSTRSKPESNVNDKDTTEGETSCRNYKEDNCCNIEDSSKTYEQNSGEDDTSSLVDGNEKYESMNTKDDDSSPGGEDTCNRYEPKVEDDENCVLGAESISNNCDENNKDAIKTGSISERHEELIIEEENEKLQQAFIEDANSQAGSGSSINERTNSGFSRGSSEAGLDEDQSSTALRFQLMVIQSLKEPLRRQRRKLVLLTQVHIGTTTVLVFGVSWDENVSALSLHLLENLIIRWPEIVPVGILVFLSMAENCIKEI

SEQ ID NO: 225675 - protein, 183 aa, Zea Mays
MAPEYATRGCLTRKADIYSYGVVALEVVSGMSNTNSMSNEEYLHLLDWAERLKQQGKLLEMVDRRLGSDYSQEQALRLLDVALLCTSIQPTQRPRMSSVVKMLCGEIPVEIVPADDDLSEDLRLNIAQSRQSIDNSQTNWSQYSVNNSQTNWSETLSSDRSVLPHSSKDSGYLPSSSSLSVKL

SEQ ID NO: 225676 - protein, 1085 aa, Zea Mays
MTVQVGIVNLLLETHGGAHRQGDATWSPPLAAITFRDLVLYTTNEKWQVVNLKEARDFSNNKGFIYVFKKLEWQSLSVDLLPHPDMFADARFNSSSSQDDKRDDDGAKRMFFGGERFLEGISGEANITVQRTEQNNPLGLEVQLHITEAVCPALSEPGLRAFLRFMTGVSVCLNRGDIDPKAQQLAEAAGSSLVSIIVDHIFLCIKDTEFQLELLMQSLFFSRASISDGECSKNLSCIKVGGMFLRDTFSRPPCTLIQPSMQAVSQEPPPVPDFGQNFCPPIYPFGNQLLDFAAGVPLFSLYCLQTTPSPSPPKFASKTVITCQSIMVTLQEQSCLRIASFLADGVVPNRGAILPESSINSLTFSLKEFDLSVPLDTDEIARCSGTKNTNPQSSFSGARLHVEDLYFCQSPSTKCPLLNLDRDPACFLLWEYQPVDASQMKWATWSSHLSLSLETSSTSNGQRAVSDSNLWKCIELDDIRFEVAMVTADGGPLLDVPPPEGVVRIGVAFQQFKSNTSVEQLFFVLGFYTYFGQVAERISKVSNANKSESVKSSADKSENKLPSDTAVSLTMNNLQLNFLESLSASDVHMPLVQFGGGDLFLKVSHRTLGGAFAVTTNLMWTTVSVNCLEGESAIVCEHGTAVTGEHSILVHGNGHPKMRAVFWVDHRSKHQVKEPQFLDINITHVMPYDIQDMECHSLNVSAKVSGVRLGGGISYTESLLHRFGILGPDGGPGEGLLRGLKDLSSGPLAKLFKSSHLTEKEDERSKIDDHNSKFDLGVPDDLDVSIELRNWLFALEGTEEVGYLFSPRGGDGISREEKCWHSTFRNLHISGKSSDRLKLGGRRKVSPEKAFPVERFTAGIEGLQAIKPRLRDQCTKKGPSNNHEMGRDFNSSSSVGDHGVDVEATMVIGEDEIEGAKWTMDNVKFSVKEPIEAVATKEELEHLVMLCRSEADAMGRITAGILRLLKLDKSLGQGTIEQLRNLGSGGMDNIFSPRRLSRQNSFGSIGTPRTPTMQAIADVMGSKTTLEATISSLQGEISESKAKCMALISQASSTEDQNRAEDIRQLSEKLESMQSLVTRLRTLII

SEQ ID NO: 225677 - protein, 194 aa, Zea Mays
MASASVSAPVAGAGAGGGKDEELADLVRRLMDALARYADRLPFDLDRQFTCRLLGVILEETAPEELQNHVTVKPSVVEVLLEIAKFCDVYLMERILDDESEGKVLSALSEAGLFGGGGLIKDKVLFCSTENGRTSFVRQLEPDWHIDTSPEVVHQLARFIKYQLHISPQRPERIATNVFTAPSLEQYFGGLDQR

SEQ ID NO: 225678 - protein, 374 aa, Zea Mays
MKSSSAKECQRTKYAAGTNVQVAPVAIPAEVQDIPAQHTQDHEVVPGPTEVQGNPVKHTAEQPGSYSMDCDLDNHVNSVSSKDAVEHDHVHSALPDVHRGNTHADTVTNDGEPIGANNNGKVSRLTYGEDKFRPGIQRSENHTESMEGLSCLQRAGDSVGSPASINNTELPKNNVSSEAHIDDNELRRNDLVNDVESNSIDGKHDTMMNLSVPKISCLYKCCSPCFQSIYKMVHGIISNTLRPNLHCLTADDMHDILSSWCLNLLGSVRKLYSSHDEASCTEVFVRMSNKETHLEHCACQSDIYLSRECVCHLESNGDVETANTDCHPLSGQSLSFFFKDGVWMPLDLTAETKLHCSFRRFCVCSILGTVSMLS

SEQ ID NO: 225679 - protein, 758 aa, Zea Mays
MKVSSRKKPPPQQQREETEEQGSSGAAEAMDAAAAAAVQEEAEAEAEAEAEGRTVLVGVRADAESRALLTWVLVNVAAPLDRVVAVHVAPPSAAEAVDFDAMLAVYEGFCNLKQINLNLKICKDSSVRKALVREASLFGAAKVVLGVAKKRRAISSSHSVAKYCAKKLPAKCAVLAVSNGKIEFRRESSVHPDDGEGDATRDFGTKGSELENLSTDQVEIDADPSSTNAEESTVKQGDEISELPGKGASVLYCVLPERSSGSVASTSSRQDQDSVDLPSEGAGELYCLLPPRNGHSVRSIGDSKRSNASQKDDKPANPSLEGDGDLYCRLPRTGRPGRNSGGSNRSAGIRGAVRRSSSFSSDIHLSSETSPIKKDGSVSMTATERSSSAVSTEAEDSPKYTARTAETPSSSPMSLRRMVEGRSDRCHLHRRIFRHQRSSSFEWAKISMVQWAMRLPSRYTSVHPDGKPLKPGASPRLNCDSETESTAAVEPESMFSFAFYDVAWPPSELESLREKYSSVCRMFSYEELKLATSNYSPDMLIGKGGTSQVFKAQLDGGTFAAIKILKPSVDAIHEFVTEVETVTSLQHENIVALRGFSFENYNLVLAYDYMPRGSLDKALHGKNDGTEFLVWERRIKIAIDIARALEFLHLGGVTQSVIHGDVKSSNILLSEDFGARLCDFGLAKRVSASTPHLTCTDITGTFGYMAPEYFSHGEVNEKIDVYAFGVVLLEIVSGRRPITPGSAKGQESLVGWRSSSTV

SEQ ID NO: 225680 - protein, 229 aa, Zea Mays
MWAQLAVALFVALAVAPPARGSDVPSFPLSQAQSPSNSSSPSNAASRPCHLDLSAELFGGVAAACGAGGGPGSLDRGRCCPVLAAWLFAAHARTALSVPPAPPPSALVGDEGMGPDGDDDGPMVPYDNQRCVDTLGAALERRGVALPRPNATCDTVLCFCGIRLHQIGSLRCPAAFAVKTGAAARNATPTAAVKALEKSCRNASYAGCSRCVQSLQKVNTQENKYLALT

SEQ ID NO: 225681 - protein, 115 aa, Zea Mays
MGGGMEVHKNRWIEEWNAGRENLEFNFRWTRRSLAVVGLFGLAVPILVYKGIVREFINFLFVPAGLDPAYAGRGCRSAIQEVPVSGVQGCRIRRFLDRGCEEGSFRSVCVGIVLV

SEQ ID NO: 225682 - protein, 77 aa, Zea Mays
MTPPLPVNQPQPHLKDDDKEADVATAKTNGSKADPHPTHLACSSPDRQPHDCLCCCCLQVGSDGPVTACDCKHNQTC

SEQ ID NO: 225683 - protein, 107 aa, Zea Mays
MKDCPKPRDNVAISNARKQHNLKRNQSNVNRVQNRYYQKTPGKFDDLKAGVLGPETRQCLGIGENDPPPWLHRMRELGYPPGYLGTKVLFGLVLEVVTGMEWATAAI

SEQ ID NO: 225684 - protein, 98 aa, Zea Mays
MPPPLQPPLLLRLHLLFRSETQIPLLRRRPSCDAPHCRTRRYISVRASAAQLAAADVSTAQQLELGLEAAAVGFVTGSGEILFRKGIRWSMPHAAMRE

SEQ ID NO: 225685 - protein, 442 aa, Zea Mays
MEAVRGDGRWCVVTGGRGFAARHLVTMLLRSGEWRVRVADLGPAITLDRDEEEGFLGAALREGQAVYVSADLRDKAQVARAFEGAEVVFHMAAPDSSINNFHLHYGVNVDGTKNVIDTCIRCKVKRLIYTSSPSVVFDGVHGIFNADESMPYPDKFNDSYSETKADAEKLVMRANGREGLLTCCIRPSSIFGPGDKLMVPSLVAAARAGKSKYIIGDGNNYYDFTYVENVAYGHVCAEKTLSSEDGAKIAAGKTYFITNMEPIKFWEFMSLILEGLGYERPSVKIPVSVMMPVAHVVEWTYQKFAKYGMKVPQLTPSRIRLLSCNRTFSCSRAKEQLGYEPLVSLKDGVKRTVESYSHLQAQNHRSISKASIFLGNGNLAKTVLWEDAKQTVTVLLLLAVIYYHLFTCGSVTRLRNSRPLIFTSPRHRLIILLIPLVRIGTL

SEQ ID NO: 225686 - protein, 541 aa, Zea Mays
MEAVRGDGRWCVVTGGRGFAARHLVTMLLRSGEWRVRVADLGPAITLDRDEEEGFLGAALREGQAVYVSADLRDKAQVARAFEGAEVVFHMAAPDSSINNFHLHYGVNVDGTKNVIDTCIRCKVKRLIYTSSPSVVFDGVHGIFNADESMPYPDKFNDSYSETKADAEKLVMRANGREGLLTCCIRPSSIFGPGDKLMVPSLVAAARAGKSKYIIGDGNNYYDFTYVENVAYGHVCAEKTLSSEDGAKIAAGKTYFITNMEPIKFWEFMSLILEGLGYERPSVKIPVSVMMPVAHVVEWTYQKFAKYGMKVPQLTPSRIRLLSCNRTFSCSRAKEQLGYEPLVSLKDGVKRTVESYSHLQAQNHRSISKASIFLGNGNLAKTVLWEDAKQTVTVLLLLAVIYYHLFTCGYTFITAMAKLLSLTALFLFIHGMLPSNLFGHKVEKLEASNFHITQAQAHHIANSISSNWNSLVSALRSLCRGNDWLLFLKASKRMRNGRTALIVWWATPVPFFCTLVLPRNHLARNKQLPSGTYASFGLFSS

SEQ ID NO: 225687 - protein, 483 aa, Zea Mays
MVTCIEDLQEIVNCRKHESLTVQTFGTRIEKLHREKYLQLCDSVDMDKVDSASTIMDEEDNVVRSLRASPVHPIKDRTSIDDFEIIKPISRGAFGRVFLAKKRTTGDLFAIKVLRKADMIRKNAVESILAERDILITVRNPFVYLNGGDLYSLLRNLGCLDEDVVRVYLAEVVLALEYLHSMHIVHRDLKPDNLLIAHDGHIKLTGFGLSKVGLINNTYDLSRPVVSGASLYGDDEPQMNEFEQMDHRARRQNRSAVGTPDYLAPEIILGTGHGCSADWWSVGVILFELIVGIPPFNAEHPQTIFDNILNYKIPWPHVPEEMSFDAQDLIDKLLTEDPHQRLGANGASEVKQHPFFKDISWDTLARQKAAFVPSSDNAFDTSYFTSRYSWNPSDGNIYEAYEFEDSSDNGSLSGSSSCLSNRQDDMTEDSDGLNEFESSANVNYSFSNFSFKRAAVGSPSKSSECLLARLHLRPACTIFVPYL

SEQ ID NO: 225688 - protein, 133 aa, Zea Mays
MMVFSLNRSTSRVFNTLFCYHRNSGGLQAIMNSKLKTLAEKDEEVVLASGIPCTIIRTGSLQSTPGRERGFDFTEGIASKGRISKEDAATICVEALNSIPLKTHIFEVANGKEKVIDWKAWFEEQTKREEEIQ

SEQ ID NO: 225689 - protein, 169 aa, Zea Mays
MVILALILKRARTKALVKDKRTTEEAFGTYVEDGFFSEPIDLKGVQHIVLLSQLAVYRNSGGLQAIMNSKLKTLAEKDEEVVLASGIPCTIIRTGSLQSTPGRERGFDFTEGIASKGRISKEDAATICVEALNSIPLKTHIFEVANGKEKVIDWKAWFEEQTKREEEIQ

SEQ ID NO: 225690 - protein, 159 aa, Zea Mays
MLGAAGAVIPEACNKFGANCGPEAVWFKTGALLLDGNTLSYFGNSIPINLVVAVIAEVVLVGGAEYYRIINGLDLEDKLHPGGPFDPLGLASDPDQAAILKVKEIKNGRLAMFSMFAFFIQAYVTGEGPVENLAKHLSDPFGNNLLTVISGAAERTPSL

SEQ ID NO: 225691 - protein, 217 aa, Zea Mays
MASAQEKWKEEGCPKIQLGDLKIQLPFHLLSPIAIGGAAAGIASTLVCHPLEVLKDRMTVNREAYPSIAIAFSKIYRTDGIGGLYAGLCPTLVGMLPYSTCYYFMYETIKTNYCRAHKKKSLSRPELLVIGALSGLTASTISFPLEVARKRLMVGSLQGKCPPHMIAALAEVIQEEGAKGLFRGWAASSLKVMPTSGVTWMFYEAWKDLLLSSRLHA

SEQ ID NO: 225692 - protein, 357 aa, Zea Mays
MLNMGFVDDVELILGKVEDATKVQTLLFSATLPEWVNKLSMRFLKVDRKTVDLVGNEKLKASASVKHLALPCNKAARAQVIPDIIRCYSHGGRTIIFTETKDSASELSGLIHGSRALHGDVAQAQREVILAGFRSGKFQVLVATNVAARGLDINDVQLIIQCEPPRDVEAYIHRSGRTGRAGNTGVAVMLYEPRYKHSVSRLERESGVKFEHISAPQPTDVAQSAGSEAADAIASVSDSVIPIFRQQAEQLLSSSSLSAADLLAKALAKAVGYTDIKKRSLLSSLEDYSTLHLQTGRPMWSPGFAFTILKRFMPEDKLADVKGATLTADGTGVVFDVPAADVEDYIQGIMVLPLFVK

SEQ ID NO: 225693 - protein, 383 aa, Zea Mays
MRFLKVDRKTVDLVGNEKLKASASVKHLALPCNKAARAQVIPDIIRCYSHGGRTIIFTETKDSASELSGLIHGSRALHGDVAQAQREVILAGFRSGKFQVLVATNVAARGLDINDVQLIIQCEPPRDVEAYIHRSGRTGRAGNTGVAVMLYEPRYKHSVSRLERESGVKFEHISAPQPTDVAQSAGSEAADAIASVSDSVIPIFRQQAEQLLSSSSLSAADLLAKALAKAVGYTDIKKRSLLSSLEDYSTLHLQTGRPMWSPGFAFTILKRFMPEDKLADVKGATLTADGTGVVFDVPAADVEDYIQASESAAQVTIDEVKQLPPLQEKDQSRGNSGGGRFGHGGGRRFSGGGGGGRGFSGRGGGGRGFSGRGGGGSRFNRRN

SEQ ID NO: 225694 - protein, 321 aa, Zea Mays
MSPALAAGVEPMAVDDSASKKAKRKQLKAAAAAAEAEAEAASVKKKEKKEKKRKVKEPSPPLPSAASSDEEEKSSTSSEETAPAAKKAKEKTKKNVDVSSSASDDDGEITASSDEDPADPNALTNFRISESLRQSLRSKGIKSLFPIQATTFDLVLDGSDLVGRARTGQGKTLAFVLPILESLVNGANKASRRTEHGRTPSVLVLLPTRELANQVHADFEFYGATFGLSACCVYGGSPYRPQEMALRRGVDIVVGTPGRVKDFIVKGTLNLKCLKFRVLDEADEMLNMGFVDDVELILGMLICQFLCIVHSYTNFFFDNID

SEQ ID NO: 225695 - protein, 326 aa, Zea Mays
MAAAAAAVPATFLSGLPSPRTPSPVLHSPVQRAHPVAAPLFLSAKRRAYACAATASGSFYSSNSGNQTSLMPSFSFAFDEGSSSSKRLYRWKRVLLKVSGEALAGDHTENIDPKITMAIAREVASVTKLGVEVAIVVGGGNIFRGASWAGCSGLDRSSADYIGMLATVMNAIFLQATMESIGIPTRVQTAFRMSEVAEPYIRRRAVRHLEKGRVVIFAAGTGNPFFTTDTAAALRCAEINAEVMLKATNVDGVYDSDPRQNPNARLLETVSYHEVTARDLSVMDMTAITLCQENNIPIVVFNLQEPGNIAKAIVGKKRNMKKSSSC

SEQ ID NO: 225696 - protein, 298 aa, Zea Mays
MVMEGRTGSLYGRLNKSSTRGFLAYTAAGAACAAVLACFVLSAADSPASAARNDGERLRLSSRSPRVWPDLAFNWRVVVATVVGFLGSAFGTVGGVGGGGIFVPMLNLVVGFDTKSAAALSKCMIMGASASSVWYNLQVSHPTKEAPVIDYKLALLFQPMLMLGITIGVELSVIFPYWLITVLIIILFVGTSSRSFYKGILMWREESRILMETRGREEQSKSTCAASDVVIDPSYGEPLLTQPQPKKSAWETFMFNLRWKNILVLMSVWSLFLVLQVLKNNSKSCSSFYWVINVLQLR

SEQ ID NO: 225697 - protein, 263 aa, Zea Mays
MAGGGGAGAGSSSGGGGGGGREGDWDCGSCGNRNYAFRSLCNRCKQPRLLVDPNTPRDSKWLPRAGDWICTGCSNNNYASRKNCKKCGLPKEEAAMPALQMAGMTMPTYATYIARLQSLAASASAYKMNFGMAANSPLQQQLLANANWPYGMAGRYGMQSSGWPFGNGNPNQFLGVPKDWRNGDWLCSCGFHNYSSRTQCKECGAPVPSGIPSTTMKATSDASSSAKLRKNLQFTLVCYSLLLDYFVPGYVAACSSSFLKTAV

SEQ ID NO: 225698 - protein, 370 aa, Zea Mays
MDVSTTVQEISNTDVTVLEGHSSEVFACAWSPTSSLLASGSGDSTARIWTIPYGPCGSDMQPYSPGVHVLKHFKGRTNEKSKDVTTLDWNGEGTLLATGSYDGQARIWSRDGDLKQTLFKHKGPIFSLKWNKKGDFLLSGSVDKTAIVWDTKTWECKQQFEFHSAPTLDVDWRNNNSFATCSTDNMIYVCKIGEQRPIKAFSGHQSEVNAIKWDPTGSFLASCSDDWTAKIWSMKQDKCIFDFKEHTKEIYTIRWSPTGPGTNNPNQQLLLASASFDSTIKLWEVEQGRLLYSLSGHRQPVYSVAFSPDGEYLASGSLDQCLHIWSVKEGRVLKTYRGTGGIFEVCWNIEGTKIAACFSNNTVCVMDFRM

SEQ ID NO: 225699 - protein, 234 aa, Zea Mays
MLRETNLSPPSHRAVLALAAAPLPRLPPAPAALSPAPPAMGLLTSAELNYLVFRYLQESGFIHAAFTLGYEAGIHKCGIDGNAVPPGALITIVQKGLQYIELEASSDENYDEVERDFALLEPLEIITKDVEELQQIVKRRKIERSQTELEKDKGKEKERNEEHERRPCGEREREQHEKEKEQVRDKDKSEKDRDHDKEKEKERERQHAERTDKVKHEDDSLVGAGAVWFICSTP

SEQ ID NO: 225700 - protein, 357 aa, Zea Mays
MIAARRREREYFASTPEYKHMASRMGSEYLGKMLSKHLEQVIKSRIPGIQSLITKTIAELETELNRLGKPIANDAGGKLYTIMEICRMFDGIYKEHLDGVRPGGEKVYHVFDNQFPVAIKRLQFDKQLSMENVRKLITEADGYQPHLIAPEQGYRRLIESCLISIRGPAEAAVDAVHAILKDLVRKAINETHELKQFPTLRVEVGNAAFESLDRMRDESKKNTLKLVDMECSYLTVDFFRKLPQDVEKGGNPSHSIFDRYNDSYLRRIGQTVLSYVNMVCSTLRNSIPKSIVYCQVREAKRSLLDHFFTELGAREMKQLSKLLDEDPAVMERRTNLAKRLELYRSAQSEIDAVAWSK

SEQ ID NO: 225701 - protein, 462 aa, Zea Mays
MGKEKSHINIVVIGHVDSGKSTTTGHLIYKLGGIDKRVIERFEKEAAEMNKRSFKYAWVLDKLKAERERGITIDIALWKFETTKYYCTVIDAPGHRDFIKNMITGTSQADCAVLIIDSTTGGFEAGISKDGQTREHALLAFTLGVKQMICCCNKMDATTPKYSKARYEEIVKEVSSYLKKVGYNPDKIAFVPISGFEGDNMIERSTNLDWYKGPTLLERSTNLDWYKGPTLLEALDQITEPKRPSDKPLRLPLQDVYKIGGIGTVPVGRVETGVIKPGMVVTFGPTGLTTEVKSVEMHHEALQEALPGDNVGFNVKNVAVKDLKRGFVASNSKDDPAKEAASFTSQVIIMNHPGQIGNGYAPVLDCHTSHIAVKFAELITKIDRRSGKELEKEPKFLKNGDAGMVKMIPTKPMVVETFSAYPPLGRFAVRDMRQTVAVGVIKSVEKKDPTGAKVTKAAAKKK

SEQ ID NO: 225702 - protein, 562 aa, Zea Mays
MGKEKSHINIVVIGHVDSGKSTTTGHLIYKLGGIDKRVIERFEKEAAEMNKRSFKYAWVLDKLKAERERGITIDIALWKFETTKYYCTVIDAPGHRDFIKNMITGTSQADCAVLIIDSTTGGFEAGISKDGQTREHALLAFTLGVKQMICCCNKMDATTPKYSKARYEEIVKEVSSYLKKVGYNPDKIAFVPISGFEGDNMIERSTNLDWYKGPTLLEALDQITEPKRPSDKPLRLPLQDVYKIGGIGTVPVGRVETGVIKPGMVVTFGPTGLTTEVKSVEMHHEALQEALPGDNVGFNVKNVAVKDLKRGFVASNSKDDPAKEAASFTSQVIIMNHPGQIGNGYAPVLDCHTSHIAVKFAELITKIDRRSGKELEKEPKFLKNGDAGMVKMIPTKPMVVETFSAYPPLGRFAVRDMRQTVAVGVIKSVEKKDPTGAKEAASFTSQVIIMNHPGQIGNGYAPVLDCHTSHIAVKFAELITKIDRRSGKELEKEPKFLKNGDAGMVKMIPTKPMVVETFSAYPPLGRFAVRDMRQTVAVGVIKSVEKKDPTGAKVTKAAAKKK

SEQ ID NO: 225703 - protein, 293 aa, Zea Mays
MDATTPKYSKARYEEIVKEVSSYLKKVGYNPDKIAFVPISGFEGDNMIERSTNLDWYKGPTLLEALDQITEPKRPSDKPLRLPLQDVYKIGGIGTVPVGRVETGVIKPGMVVTFGPTGLTTEVKSVEMHHEALQEALPGDNVGFNVKNVAVKDLKRGFVASNSKDDPAKEAASFTSQVIIMNHPGQIGNGYAPVLDCHTSHIAVKFAELITKIDRRSGKELEKEPKFLKNGDAGMVKMIPTKPMVVETFSAYPPLGRFAVRDMRQTVAVGVIKSVEKKDPTGAKVTKAAAKKK

SEQ ID NO: 225704 - protein, 229 aa, Zea Mays
MVLEVGTAVGIRTTSTWAAGPAARRRSRGQVVSFALAPASSRRVRHRCRAMQQHEEEQERPPTVRAVTIPFADLRVPDRDLGDKIEEGLGPHGLGIVTIADVPEFPELRKRLLRLAPRIANLPEEVKKQLEDPDSRYNFGWSHGKEKLESGKLDTFKGSFYANPVLDVPTTDDVLVSRYPSYCRPNIWPNDNLPELEIAFKDLGKLMMEVGLMLAHHCDRYDAGFSVSL

SEQ ID NO: 225705 - protein, 147 aa, Zea Mays
MMEVGLMLAHHCDRYVMRQGVGSYDGDSLEQTIARSRCHKGRLLYYFPRQFSKQTDFDSVSSWCGWHTDHGSLTGLTCGLFTKNSMEVPCPDSAAGLYIRTRDNQVVKVVFDEDQLAYQIGETTEILSRGYLCATPHCVQQRKCFKC

SEQ ID NO: 225706 - protein, 188 aa, Zea Mays
MRQGVGSYDGDSLEQTIARSRCHKGRLLYYFPRQFSKQTDFDSVSSWCGWHTDHGSLTGLTCGLFTKNSMEVPCPDSAAGLYIRTRDNQVVKVVFDEDQLAYQIGETTEILSRGYLCATPHCVQAPSSENASNVDRSTFALFMQPDWNEKLKFPSEIPYHQELIPPNGTLTFGEYSERLVDKYYQTTT

SEQ ID NO: 225707 - protein, 119 aa, Zea Mays
MEVPCPDSAAGLYIRTRDNQVVKVVFDEDQLAYQIGETTEILSRGYLCATPHCVQAPSSENASNVDRSTFALFMQPDWNEKLKFPSEIPYHQELIPPNGTLTFGEYSERLVDKYYQTTT

SEQ ID NO: 225708 - protein, 167 aa, Zea Mays
MLQEVADLNLSNGYGEVCAPRQLVIMKDPSSIPDAVAKAGLTLPLVAKPLVADGTSKSHELSLAYVEASLPLLDPPLVLQEFVNHGGILFKVYIVGETIQVVRRFSLPDVNTYDLGNNDGIFRFPRVSCATNNAEDADVDPCIAELPPKPLLEKLGRELRRRLVLRS

SEQ ID NO: 225709 - protein, 412 aa, Zea Mays
MDGNKKASKMLPHIVVVASTNRIDAVDPALRRAGRFDSEVEVAVPTVEERLLILKLYTKNLHLDEKVDLQTVAAFCNGYVGADLEALCREAAKLAYHRMLNLCEGDKVLKLLMEDWECARSMVGPSITRGVTKEISIVSWDDIGGLKDLKKELQKVVEWPIKHAAAFSRLGIPPVRGVLLHGPPGCSKTTLAKAAAHAAQASFFSLSGADLYSKYVGEGEALLRRTFQKARLASPSIIFFDEADAIAPKRTGPGGNSSGNATVGERLLSTLLTEMDGLELATGIIVLGATNRPNAIDAALLRPGRFDKVLYVPPPDVEGRHEILRIHTRKMKLGEDVDLWKVAECTELFTGADLEGLCREAGMAALREDISASLIHDAHFQAARSSLSPSLTKAVVDEYSKVDINDPSSRKH

SEQ ID NO: 225710 - protein, 388 aa, Zea Mays
MIAMSYKKLPVDVKPGNVILCADGTISLAVLSCDPDAGTVRCRCENTAMLGERKNCNLPGIVVDLPTLTEKDKEDILGWGVPNDIDMIALSFVRKGSDLVTVRQVLGQHAKRIKLMSKVENQEGVVNFDEILRETDAFMVARGDLGMEIPVEKIFLAQKMMIYKCNIAGKPVVTATQMLESMIKSPRPTRAEATDVANAVLDGTDCVMLSGESAAGAYPEVAVKIMARICIEAESSLDHEAVFKAMIRSAPLPMSPLESLASSAVRTANKAKAALIVVLTRGGTTAKLVAKYRPRVPILSVVVPVLTTDSFDWTISSEGPARHSLIYRGLIPLLAEGSAKATDSESTEVILEAALKSAVQKQLCKPGDAIVALHRIGVASVIKICIVK

SEQ ID NO: 225711 - protein, 334 aa, Zea Mays
MAETSTYQILVRLLDGRTRCLRFSTPTVSGAVLLDAVASISRVPAAALRLVTGGIDVSPSSVLASAADGQFPYASALLRLRGGKGGFGSLLRGAASKAGQKKTSNFDACRDINGRRLRHVNAERRLEEWKAEAADRQLEKLAENFIKKKAKEAGRGGGPSTAEVDKYLEKYRKDAEICVNVVEESVRASLGKRKTAPKLPSGADAKKLKFWLGKNKVEEDESDSDTDVDDEDIEDLKSADAKSVVVDEGNYSNGCRKNEEKLDLGSVSGSSHSEGESSGEKSQLTTSSGAEGGDFESGDSAELERYHKLKKCGKQTRITLLQLLQTKTIKRCHK

SEQ ID NO: 225712 - protein, 461 aa, Zea Mays
MADGGRMKGVQSAGGGAGDDEEGNEEVREEPELALSLGRRVWHLPPRQEAAPRSLNWTPVLPEWNPDAAGSSQGVERALGGQSISSLGFHDMFGGILDDPQAGGSMEVGWGKLNEEDEDRDLQNKRLRVRHFGEENPLHSGASATPFGSESSFLPISDECVHLKLSRFPEHELEFGLSLFANDGSESPRDANNEQVDDAENSGGRNSVDVGIRMDLSDDFLHMIFSFLDQKDLCRAGVTCKQWRSASVHDDFWKCLKFENTSVSLENFVNICRHYQSVTELNLHGVINAETLVLEAIMFLRHLKTLTMGKGQLGESFFQALAECPLLTALTVNDASLGSGIQEVTVNHDGLRELHILKCRALRISVRCSQLQILSLRRTGMAHVSLNCPQLLELDFQSCHKLSDNAIRQAATACPLLAKLDMSSCSCVTDETLRDIASSCPSLSVLDASNCPNISFEAQCR

SEQ ID NO: 225713 - protein, 892 aa, Zea Mays
MADGGRMKGVQSAGGGAGDDEEGNEEVREEPELALSLGRRVWHLPPRQEAAPRSLNWTPVLPEWNPDAAGSSQGVERALGGQSISSLGFHDMFGGILDDPQAGGSMEVGWGKLNEEDEDRDLQNKRLRVRHFGEENPLHSGASATPFGSESSFLPISDECVHLKLSRFPEHELEFGLSLFANDGSESPRDANNEQVDDAENSGGRNSVDVGIRMDLSDDFLHMIFSFLDQKDLCRAGVTCKQWRSASVHDDFWKCLKFENTSVSLENFVNICRHYQSVTELNLHGVINAETLVLEAIMFLRHLKTLTMGKGQLGESFFQALAECPLLTALTVNDASLGSGIQEVTVNHDGLRELHILKCRALRISVRCSQLQILSLRRTGMAHVSLNCPQLLELDFQSCHKLSDNAIRQAATACPLLAKLDMSSCSCVTDETLRDIASSCPSLSVLDASNCPNISFESVRLPMLIDLRLLSCEGITSASMAAIAYSRLLEALQLDNCSLLTSVSLDLPHLKNISLVHLRKFADLNLRSPVLSYIKVSRCSALHRVSITSTTLQKLVLQKQESLSSLSLQCHNLIDVDLTECESLTNAVCEVFSDGGGCPMLRSLILDNCENLSIVELNSSSLSCLSLAGCRSMTLLRLSCPNLQHVNLDGCDHLQSAAFCPVGLESLNLGICPKLSVLHIEAPNMSILELKGCGVLSKASINCPRLTSLDASFCRQLVDDSLTCMSEACPMIEHLILSSCLSIGIDGLSSLHCLHKLTLLDLSYTFLDNLKPVFNSCLQLKVLKLSACKYLSDSSLDALYREGALPLLVELDLSYSSIGQNAIEDLLACCTNLVNVNLNGCTNFQELVCGSDDSSCVDMPVDFCAPSSAIKSEEIRSGFDMSQSFNVKLEQL

SEQ ID NO: 225714 - protein, 238 aa, Zea Mays
MSGSSGPLPYSMRDVGAGGAYNNAKFRHRSRLKVCFLPGTLALGATKGITKRKALETNLLTDEDIENLQLAEDLAKTCVEMYFVTSTGLAPEIAYFHIEGDTEGGPDGGNKSSKYINDIVIKPLDRHNLLRPETVESLFVLYRITEDSKYREWGWQIFQAFEKYTKVDSGGYTSLDDVTSLPPSTRDKMETFFLGETLKYLYLLFDENNTLPLDKYVFNTEAHPLPVMRSAEQASHSV

SEQ ID NO: 225715 - protein, 425 aa, Zea Mays
MVSGHIFHCRKNSWPAEEYVGRTALQLLDFDGGAPPEQAWRRRLNSHANILKEFSVTFMEAMRMMSLGLRLWSYVREEASHGRKAPIDPFTKERCKPSASQGVPLGGMGSGSISRGFRGEFKNWHIIPGLCESSPVMENQFSIFVSRDGGNKKYSSVLAPGHHEGLKKNSDSGISSWDWNLSGQHSTYHALFPRAWTVYDGEPDPDLKISCRQISPFIPHDYKDSSLPTSVFVYTLVNTGRDRAKVSLLMTWANSIGGFSHNSGGHYNEPFIAEDGVSGVLLHHKTAKDNPPVTFAVAACETQNVNVTVLPVFGLSGENHVSAKEMWNTMLQNGHFDRENFSAGPSMPSSPGQKLCAAVSASTWVEPHGRCTVVFALAWSSPKVKFQKGCTYNRRYTQFYGTSEKSAVNLVHDALTRGRGADPVL

SEQ ID NO: 225716 - protein, 932 aa, Zea Mays
MAWWSGKVSLSGLQDIAGAVNKISESVKNIEKNFDSALGLEEKRDDEEASGSRTSNSDGIGFFNPVMAFMGHNGEEDGTEVSEKPQFPKDLSVEEENHSTPTKKQTSEVDHSEVSVTTFPEQPSKSEEAHSISNESPVSKADVSEQSITPQTPAHPSVAEEKLDGCTEALASKVGDDEASETSQSPGHPSTVEENQDHQYSKHSCPSDEAEPNQLRESAGDLPDGSAFSSPIKIDKSGDTETGESIDTGKEDTSDGNASQSQPAESMLASSDNITEVEDKIAQEYNVPKELSSPQENCDTVDKVTRLEVKLHDGNIDTKKSEEESNKMEAGEVSVVVQEDNVMEQPEDLMSKSITAAHDSHSQNESVVSLTDVPAGLGGVGPADNFTEEEKIARITDFQIVDSVVSVGELEKLRREMKMMEAALQGAARQSQSKADEIARLMNENEQLKSTIDDLKSKSSEAEMDALKDEYHQRVATLERKVYALTKERDTLRREQNKKSDAAALLKEKDEIINQVMAEGEELSKKQAAQEATIRKLRAQIREFEEEKQRLNSKIQVEEAKVESIKRDKMATEKLLQETIERNQTELAAQKEFYTNALNAAKEAEALAEARVNSEAKVELENLLREAGEKENMLIKTIEELRLSLTRQEQEAAFREERLKRDYDDLQKRYQASELRYNELVTQVPESTRPLLRQIEAMQETSAQREEAWAGVERTLNSRLQEAEAKAAASEEKERSVNERLSQSLSRITVLETQITILRTEQTQLSRSLEKERQRASESRQEYLAIKEEAAMQEGRAKQLEEEIKDLRVKHKEELQEAAEHRELLEKDLEREKAARAEIEKTSSREAPKVPLPDQTRNAPLRKLPSSGSINSLEESHFLQASLDLSDNASLERRMSSESNMSYYLRTMTPSAFESALRQKDGELASYMSRLT

SEQ ID NO: 225717 - protein, 643 aa, Zea Mays
MGNECDFRHSEGARMNPRDCWYWLNGSCLNPKCAFRHPPIDGLFGAPTSGLPPVSAHYGAYNLGKQMVPCYYFQKGNCLKGDRCPFYHGPQTASNDLAEQAAKVSSFPLEPSQAQNNEEAVAPNNSTQQEARMTENRTSIHVSKSGVGATPADVASNALKPGTNFEQAPSNTLAAKKSSTTEDHPMHYQNQVPVEIDPVKDWNQNFEVSPTDYLPQDSREADDILGESSPGFDVLVDNDVDVAEDFARDMYPVEDYEYVTSDFDARAHHESEQFNDGMGVNGRIGQYDGYERKRRRSSSERNLDRHYHPDGRFLHRELDRGEIDGSDLRHQLRRRRINGPSTTISPERANGDRHGRDEPYRERAHGGHHTYRDRYQGPRGSNLSSRLQARIKLPRRSPDRVDTRFEDERDRRRFRDMFSPMRRMDFHGGRHQEAGHNQERGHRKLSELVSTVRHADGLSARRDAVGSTHFAARRNLGEPRKANGLVESEASLDFEGPKPLSVILQRKREAAQGNNYEKFAEVAVTQTGSLDETEKKSCDNVTRFADCKSGSGDEEYKEQDHILVDAHRQSSDHGDKFEAGYAAEVDAEGKQEADDYDQREGESDDYETFEGHDYKSEDENVYQDDEDFDDNDDFARKVGVLLP

SEQ ID NO: 225718 - protein, 96 aa, Zea Mays
MASLSRTAAAAVVALRSAVRSAPLTGRVLGAPLPSFASPSATRSARILRRSAAAASAGLETLMPLHSAVAAARLRSCIAVDSSCWCSLSQGFSGFG

SEQ ID NO: 225719 - protein, 196 aa, Zea Mays
MAVDPRQVVAGFLTLSMFVMLGNMIKHDHFSPVTEELGFEATGVVSNTRKLDNDAEMSSVDTAGVEDLMDAVEEVKPCWTKPSPKTSWYKGLDVLKEEFPNTWYKGDIMPAENKAEFLKSSNADLARALDLEICSQSDVFVPAVAGLFYGHVTGKRIASGRTQIVVPSQSSTSTHASDFISTYISNKNHLAYACYC

SEQ ID NO: 225720 - protein, 168 aa, Zea Mays
MADSATNDAPLVASNQPTEVGESVEEIDRRVPPVVKEAPTLARSAAKEVRQAGLVGTATGLAKSAIARAEPKARELYTRYEPVAERRAAEAWVALNRLPLVPSVTRAVLPTAAQLSARYNSAVRDGAKRGNAVATYLPLVPTERLARVFRYPVADVAAAPEMQPIPSQ

SEQ ID NO: 225721 - protein, 118 aa, Zea Mays
MDHYRLLDRLNAYGLFEVRVSGDGNCQFRAFSDQLYRSPDYYERVRKEIVKQFAAKICLLTSFRDTCFVEIVPQYQAPQREIWLSFWSEIHYNSLYDARVQQLWYNLPSGGNPEWLSD

SEQ ID NO: 225722 - protein, 215 aa, Zea Mays
MALANKLGGLLKKATSSNPSVYQAIRCMSSKLFVGGISYQTDDHSLRDEFAKYGQVIEARIIIDRESGRSRGFGFVTYTSSEEASAAITALDGKTLDGRSIRVNHANEKTGGFRGGGGYGGGHYGGGGGSGGYGGGDYGGNFTAGGSDSFANSNFGSDSSFGGNGAGGFDATGGSTGDDGFSGTPDDNFGGNKNEETMDDIFKDDEPDSYADKRS

SEQ ID NO: 225723 - protein, 197 aa, Zea Mays
MALANKLGGLLKKATSSNPSVYQAIRCMSSKLFVGGISYQTDDHSLRDEFAKYGQVIEARIIIDRESGRSRGFGFVTYTSSEEASAAITALDGKTLDGRSIRVNHANEKTGGFRGGGGYGGGNFTAGGSDSFANSNFGSDSSFGGNGAGGFDATGGSTGDDGFSGTPDDNFGGNKNEETMDDIFKDDEPDSYADKRS

SEQ ID NO: 225724 - protein, 65 aa, Zea Mays
MKGGTSVLARLLAGVAGLPRIRPASRIAVPTASSPKRGCEKPGSCIGEVLGIASKRSTTGTAGGT

SEQ ID NO: 225725 - protein, 215 aa, Zea Mays
MIRWPMIMLAVRGLNSKMLEKRLHGCLLLLVFLLADVSGSRAETAVDLGPDSEDGSKRRSLATTMFCVAKQGADATALQAGLNWACGQGRANCAPIQPGGPCYKQNDLEALASYAYNDYYQKNFATGGSCGFNGTATTTTSDPSSGQCVFTGSSMAGGGTPAASAPSGLSPPSSFTPGIGSPSNTLIPLDGAESLVSSVWSAICAPLLALPLFFL

SEQ ID NO: 225726 - protein, 498 aa, Zea Mays
MNVRAFTADESSRLAPAIRGSYLGVIDKIPHLLELGVNAVELLPVFEFDELELKRFPNPRDHMVNTWGYSTINFFAPMSRYASAGGGPVAASKELKQMVKAFHNSGIEVYYMLDLNNSAQLLNFSGCGNTLNCNHPVVKELVLDSLRHWVKEYHIDGFRFDLASVLCRGPDGSPLDAPPLIKEIAKDSVLSRCKIIAEPWDCGGLYLVGRFPNWDRWAEWNGKYRDDIRRFIKGDPGMKGVFATRVSGSADLYQVNNRKPYHSVNFVIAHDGFTLCDLVSYNSKHNDANGEGGRDGCNDNYSWNCGIEGETNDLNVLSLRSRQMKNFHVALMISQGTPMMLMGDEYGHTRYGNNNSYGHDTHINNFQWGQLEERKDGHFRFFSEMIKFRHNHPILRRDRFLNKNDVTWHENRWENQDSKFLAFTIHDHSSGGDIYLAFNAHEYFVDAVIPPPPHHKSWSRVVDTNLESPKDIVPEGVPFTGSGYRIAPYSSILLKAKP

SEQ ID NO: 225727 - protein, 694 aa, Zea Mays
MGHTSSGNEVPLKYSSGKAFPLGVSQVDDGLNFAIFSQHASSVTLCLNFPERGNQDDVDIVEFALDRQKNKTGDIWHVSVEGLPASGVLYGYRINGPQGWQQGHRFDDSVILLDPYAKLVYGRKHFAVEKEKPSQLFGTYDFDSSPFDWGDNYKLPNLPETDLVIYEMNVRAFTADESSRLAPAIRGSYLGVIDKIPHLLELGVNAVELLPVFEFDELELKRFPNPRDHMVNTWGYSTINFFAPMSRYASAGGGPVAASKELKQMVKAFHNSGIEVILDVVYNHTNEADDVNPYMTSFRGIDNKVYYMLDLNNSAQLLNFSGCGNTLNCNHPVVKELVLDSLRHWVKEYHIDGFRFDLASVLCRGPDGSPLDAPPLIKEIAKDSVLSRCKIIAEPWDCGGLYLVGRFPNWDRWAEWNGKYRDDIRRFIKGDPGMKGVFATRVSGSADLYQVNNRKPYHSVNFVIAHDGFTLCDLVSYNSKHNDANGEGGRDGCNDNYSWNCGIEGETNDLNVLSLRSRQMKNFHVALMISQGTPMMLMGDEYGHTRYGNNNSYGHDTHINNFQWGQLEERKDGHFRFFSEMIKFRHNHPILRRDRFLNKNDVTWHENRWENQDSKFLAFTIHDHSSGGDIYLAFNAHEYFVDAVIPPPPHHKSWSRVVDTNLESPKDIVPEGVPFTGSGYRIAPYSSILLKAKP

SEQ ID NO: 225728 - protein, 428 aa, Zea Mays
MDSVGTNRPPLRPVAAAATRRSALLRPPSHLGLGNRFAETKLGIASGCGGGGGYFGKVQGFDALRSTTTKVQSGKAGRSVTKEMGHTSSGNEVPLKYSSGKAFPLGVSQVDDGLNFAIFSQHASSVTLCLNFPERGNQDDVDIVEFALDRQKNKTGDIWHVSVEGLPASGVLYGYRINGPQGWQQGHRFDDSVILLDPYAKLVYGRKHFAVEKEKPSQLFGTYDFDSSPFDWGDNYKLPNLPETDLVIYEMNVRAFTADESSRLAPAIRGSYLGVIDKIPHLLELGVNAVELLPVFEFDELELKRFPNPRDHMVNTWGYSTINFFAPMSRYASAGGGPVAASKELKQMVKAFHNSGIEVILDVVYNHTNEADDVNPYMTSFRGIDNKVYYMLDLNNSAQLLNFSGCGGLNGTGSTEMIFEDLLREILV

SEQ ID NO: 225729 - protein, 338 aa, Zea Mays
MFLNRELLDHHALPMAESCKWMSKECALRLLSEAKPGNDRIGQYAYIGLLNSELSSNCTASPALPFQLADLIDSLPKRLLVLVTHHHQDHIEGLSVVQRCNPNAVLLTHQSTMDRIGKGTWQIDYTSVTGGEKICIGDQELQVVFAPGHTDGHMGLLHVNTNTLVVGDHCVGHGSATLDSRNGGNMKDYFETTYKFLELSPHVLIPMHGRINLWPKYMLCGYLRNRRAREASILHSIENGAQTLFDIVSKTYSDVDRKLWIPASFNVRLHVDHLNSLHKLPKDFSLENFKESCGVHFMLRWAVAYVHSRSSPAILAASALAGGLAIACALRRNYCKQS

SEQ ID NO: 225730 - protein, 276 aa, Zea Mays
MGGGDDAAAGVGDGFAWDADSQLYYHASTAFYHDPVAGWYYSSRDSQYYVYKNGNYMPLTTDLENEPTANHPYDEANQDVLEHSSGLETTILDNENEIPGPPSEWMEETLINLYLSGYSNNEVNAESSLVIAHSNEEDRIETTGNKLDSLTSDSASASLHDATSQQTEVETETKNSAYVYESLGEEEEKWHAQYGQVERSNDDQHLPPTIDIWDWDVVQDHVNKGQPVVRLVGCLSRGSNKLHPSLPTRGGLVRTAPVREVHLDLVQVSTGNIGYG

SEQ ID NO: 225731 - protein, 1002 aa, Zea Mays
MTWFRAASGAARLALRRSLATRTPPAAATRCGRCFHSTAMRPRSAAPVPRAVPLSRLSDSFLDGTSSVYLEELQRTWEADPSSVDESWDNFFRNFVAQASPSAGVSGQTIQESMQLLLLVRAYQVNGHMMAKLDPLGLDDRAVPEDLRLGLYGFTEADLDREFFLGVWRMSGFLSENRPVLTLREILNKLQQAYCGPIGYEYMHIPDRDKCNWLREKIETAKPKEYNKDRRLVMLDRLIWSTQFENFLATKWATAKRFGLEGGETLIPGMKEMFDRAADLGVENIVIGMPHRGRLNVLGNVVRKPLSQIFSEFTGGTRPVEGEDGLYTGTGDVKYHLGTSYDRPTRGGNRIHLSLVANPSHLEAVDPVVIGKTRAKQFYSNDADRTKNMGILIHGDGSFAGQGVVYETLHLSALPNYTTGGTIHIVVNNQVAFTTDPRAGRSSQYCTDVAKALNAPIFHVNGDDLEAVVCVCELAAEWRQTFHSDVVVDLICYRRFGHNEIDEPSFTQPKMYQKLLGTGEVMKEDVQRIHDKVNRILNEEFAKSKDYVPNKRDWLSAYWTGFKSPEQISRVRNTGVKPEILKRVGQAITTLPENFKPHRAVKKIFELRAAMIESGQGIDWAVAEALAFATLIVEGNHVRLSGQDVERGTFSHRHAVLHDQETGAKYCPLDHVAMDQNEELFTVSNSSLSEFAVLGFELGYSMENPNSLVLWEAQFGDFANGAQVMFDQFLSSGEAKWLRQTGLVVLLPHGYDGQGPEHSSARLERFLQMSDDNPFVIPEMEPTLRKQIQECNWQVVNVTTPANYFHLLRRQIHREFRKPLIVTAPKNLLRHKDCKSNLSEFDDVEGHLGFDKQGTRFKRLIKDRNDHKQVEEGVNRLILCSGKVYYELDEERKKSERGDVAICRVEQLCPFPYDLIQRELKRYPNAEIVWCQEEPMNMGAYSYISPRLFTAMKALGRGSFEDIKYVGRAPSAATATGFLSVHAQEQSELVKKALQAEPIKFL

SEQ ID NO: 225732 - protein, 457 aa, Zea Mays
MNGKGGRVESTTNGAFNTLSGFEAADRRNSWQYFKLLLSDKESLLDDLEGENSNQSDSNHVTLAISIEDTGVGIPLQAQDRVFTPFMQADSSTSRNYGGTGIGLSISKCLAELMGGQISFTSHPSVGSTFTFSATLKHSYKDISVDSSRSLTEALPTAFKGMKAILVDGRPVRSAVTRYHLKRLGILLQVVNNMNAVVKAFPGQNGATGSREKASILFIESDFWRPETDVQLLNHLREQKNGQLSDGHKVVLLVTSEADKDKYGSIFDIVMCKPIRASTIASSIQQLLKVEIAERKDNQNRPSFLRSLLVGKNILVVDDNKVNLRVAAAALKKYGANVSCVESGKDAISLLQPPHRFDACFMDVQMPEMDGFEATGQIRQMELKANEERKNKLASIEGSTTAEYHLPVLAMTADVIQATYEECIKSGMDGYVSKPFDEEQLYQAVSRLVVGTTDSAV

SEQ ID NO: 225733 - protein, 313 aa, Zea Mays
MLVKLMNLLRACWRPSSNRHARTGSDVTGRQDGLLWYKDAGQHVNGEFSMAVVQANNLLEDQCQIESGPLSFLDSGPYGTFVGVYDGHGGPETACYINDHLFQNLKRFASEQNAMSADVLKKAYEATEDGFFSIVTKQWPVKPQIAAVGSCCLVGVICGGMLYVANVGDSRVVLGKHVKATGEVLAVQLSAEHNVSIASVRKELQSMHPEDRHIVVLKHNVWRVKGLIQVCRSIGDAYLKKQEFNREPLYAKFRLREPFHKPILSSEPSISVQPLQPHDQFLIFASDGLWEQLTNQEAVDIVRSSPRSAVLGG

SEQ ID NO: 225734 - protein, 267 aa, Zea Mays
MDDYAREMMELKTLVTRTLEKKGVLAKIRAELRASVFEAIEEEDRVMENDDGGNPALLGSCNDRAKQLHASPSGRLLTALVCEYLEWAQLSHTMKVYLPECNLPKDFWKNELKDFSNKSGAEGSRSAESGPLLLDVLEGYLKYEACTQGLLLMNLSQARMGGRRMMSSESDPSLNAEHRSMRRAPSASVGNLPPMGRPISSSQQASDRRGGSSVSNTRKDEYNWRYDTTDDISEEVLRASTALESVQLDRKSRNLPTSWRHSGDGAE

SEQ ID NO: 225735 - protein, 416 aa, Zea Mays
MAGASNHGSLTDEWLPPPTPSPRSLVSSFLNEEFSPGPFSGLFSKHGANRPHDQSEKGRGALNSSEEFPTHAVKDPFQKGFSLEPNLFSANHISNSNGGLAERRAARAGFSVPKIDTSRVGSSAVIRSPVSIPPGLSPTTLLESPVFLYNKMAQPSPTTGTLPFLTATNDKSTIPPATKITEDSAVYNDVFSFQPHLGSKETGFSTAEKDYGAYQQKHSLWNIHQQESSLQSSFTAVKDNTSATIGETKTSSSMFSDSHYSADQQQGEETNMKEQGKGVEARSAAFLPAPVHNDASLLDSQDAVDVSSTLSNEEDERATHGTVSIECEGDEDETESKRRKLELDALGAIAIATTSTTSTIDMGPASSRAVREPRVVVQTTSEVDILDDGYRWRKYGQKVVKGNPNPSAQACGKSIT

SEQ ID NO: 225736 - protein, 254 aa, Zea Mays
MPMKHRRLQSLNLEAETQENVEQHEDVQDPQPELTIGFPEGEAPTRNKSFKIIWQNGVVREVFRNFRTAELWDLKGGRVLVETDKNGIPNQWSESILSSYLGELAQNSSFAPLHIPRWDNKLFKGPKERIIKDVEKKFIYSSETKWSTRDWILKTVNKRWRDYKSDLKKQYFNPDKRSFDQIEKDVPDGVNENQWSFLLGIWCSEAHQKLCRTNAESGKKQRHPHTSGRKSHARLKKEMIVFFCTGRQEERKHH

SEQ ID NO: 225737 - protein, 772 aa, Zea Mays
MQQWVCSKRSDINKKLSKNHSGKTFDKVAPGAQKSDRSSMFGFNDSQVPESPVGVFSSESLYMATTSEATGVEQSNGPSKVLRSIPTWSSKTHLQSSVIPKVPRSAAALAKRKIKEIGRREATKLDNYDVVRNPTSVKRFEARTLSFSTAGPSNGPNRSASTSKKIRKHRSPLRTGKRAFSPSSTRLVHGFGDEHEPETRHVNKKFRITSNEAPKKFLKHTEEDTADNDFSFASDMPVSGQQNDQYDVAQETEGTQMDCEGEDAETDVPYDSVSRSDPAECCNQISDVSLSPENYRTADDDVLVEGCSVAVEDPNSSEQLAHGHESNSAANNEMDEWQMDPTSTKESSPCLTSNRDMGPGGHQDNSSITSNGEEDFNEEHGLPLGRGSLDSPISTASTMALPAALKDSRTNEEEPGPSTGRTVEEQTTGCLNQETNSIPMAREGELPSEKPFRCSCQENIARESRQSPVARPMLNSTGKQVPQLHIGSRASSSFSTYQRTSAKPNPCFDPHDHLLAAKVPAESAISFPYSTDCISPSFQTQLPSPSNPVLRLMGKDLMVMNSEESVHPQAPSSDYILRGNYPAPVGFMPPNYQHLSNSAFINMPPTTASHQIPLPSVQASGFVAPPLRGGSVMQSDHHSQQKPYRNIMPAMHRPTYMMKEVIVINDSPERRSEPQGSMLFPPAPPPPLPVVPNNMPPRPFYCFPPQSPVLPRERGAVGSMLVYANVGSMVGVNSSSQGSQTEVASPYMPNPFFVQSRAGYMNPPVYYSQNLG

SEQ ID NO: 225738 - protein, 405 aa, Zea Mays
MAGVTATGMAGVPATFSSATAQIGGFLSKKPYAPPLWATHLSPMPCHTFSLGHFPTPIHKWNLPNLPEGTEVWIKRDDLSGMQLSGNKVRKLEFLMADAVAQGADCVITVGGIQSNHCRATAVAAKYLNLDCYLILRTSKDPGLVGNLLVERLVGAHVDLVSKEEYGKIGSVALADLLKKRLLEEGRKPYVIPVGGSNSLGTWGYIEAIREIEQQIQQSSDVQFDDIVVACGSGGTIAGLALGSRLSSLNTKVHAFSVCDDPEYFYDYVQGLIDGLNSGFDSHDIVSMENAKGLGYAMNTAEELKFVKDIAASTGIVLDPVYSGKAVYGLLKDMAGNPAKWKEWILKILFHAKMALVHLHELRERNQSCRLQEKKKEEQNQRRCHPTIFAMETREEVERRRQMVV

SEQ ID NO: 225739 - protein, 395 aa, Zea Mays
MAGVTATGMAGVPATFSSATAQIGGFLSKKPYAPPLWATHLSPMPCHTFSLGHFPTPIHKWNLPNLPEGTEVWIKRDDLSGMQLSGNKVRKLEFLMADAVAQGADCVITVGGIQSNHCRATAVAAKYLNLDCYLILRTSKLLVDKDPGLVGNLLVERLVGAHVDLVSKEEYGKIGSVALADLLKKRLLEEGRKPYVIPVGGSNSLGTWGYIEAIREIEQQIQQSSDVQFDDIVVACGSGGTIAGLALGSRLSSLNTKVHAFSVCDDPEYFYDYVQGLIDGLNSGFDSHDIVSMENAKGLGYAMNTAEELKFVKDIAASTGIVLDPVYSGKAVYGLLKDMAGNPAKWKGRKVLFIHTGGLLGLYDKADQLSSLAGSWRRMDLEDSVPRKDGTGSSP

SEQ ID NO: 225740 - protein, 88 aa, Zea Mays
MAYVERGVVKDKRTIWRLSIISDFFRAIVNFIRIFFDTLFSVDKTDSYKKGYGAGKKWDGGGGRGPRTLSDIQSNDHSSLPACGSCCG

SEQ ID NO: 225741 - protein, 445 aa, Zea Mays
MTNRTVTLNLKKTMAVAQHSRDLFGMKNLVTTMILHLDSIMTEQLSNTKAAGETSSENMISDSICGKKVVISAPAATIKQNKKTSLPDAVQAAANAALAAEKREKEKAKEIKLASKSSLIANKKKMNNVLAMWKQRNQEGQAARIVIDDKEPPNSDDRFNHSHSGTGFSSKSKPNFEFENAMDNSVRQGIASTQMLDSDVKPRPVSNSLGTTVMGVIRGSTRGVIKSDTTFHALSDAGSTDSRTTIITRSNGLMTSPVELVTPAPYKTDVSALVSNTSSGVSGSGKRRFSEAPGQSQYRDRAAERRNLYGSSLRTDAVGLDSTGHYPSRKGPSEIGSMPFPPGVGERSNGEIGNNENYEVITADSAIDESNVGNRILRNMGWQEGLGLGKDGSGIKEPVQAKSVDVRAGLGSQQRKADPILEAKAGDSYKTIIQKKAMARFKEMS

SEQ ID NO: 225742 - protein, 171 aa, Zea Mays
MEMFPTKVAKAVFLCAAMLTNGNSALDMFQQQMDTNGTLQKAQAFVYSNGKDRPPTAINVDRALLRDLLFNQSPSKDVSLASVSMRPIPFAPVLEKLVLTAENYGSVRRFYVETTEDNAIPLPLQQSMCGANPPEKVLRLKGADHAPFFSKPQALHKTLVEIAAMPPVGAS

SEQ ID NO: 225743 - protein, 131 aa, Zea Mays
MPWEVTRAAVDFEKKAHSDNLEQSKAMEKNMIAVASEIERLRGELANAEKGATAVNPAAAVGNSGYAAPYGNSASTYTGMYGNPDATYTAQAYPDAYSTNQGHMHTVANPHYMSQPVPYGQYESQHTNVQR

SEQ ID NO: 225744 - protein, 258 aa, Zea Mays
MRNTSIWREASRIVYEEGFRAFWKGNLVTIAHRLPYSSISFYAYERYKNLLQMLPGLEKNGGFGADVGVRLLGGGLSGITAASATYPLDLVRTRLAAQTNTAYYRGISHALYAICRDEGVRGLYKGLGATLLGVGPSIAVSFSVYETLRSHWQIERPCDSPVLISLACGSLSGIASSTFTFPLDLVRRRMQLEGAAGRARVYQTGLFGTFGHIVRTEGFRGMYRGILPEYCKVVPGVGIVFMTYEMLKAILTGLESDD

SEQ ID NO: 225745 - protein, 1259 aa, Zea Mays
MEAVKASEARRDPPLLRAVELSRVVAEEGAGAELAGILVSNLCFAHNSPSLWKLLGQAVASRLLCPLHVLALLTPRVLPQRRAQPEAYRLYLELLKCHATSSLLAMEAGPNRDNILEDCGFPSVMAEGQESVYAIEGPQPMDLDIKRGSTENQNEHREQLRRKNTFMALDVLHMMAADRKIQSFLSLIFLNMPEKFSSLRQRLSSIEAHKVTLETLLPSGHKINDLLINIWRVCKAGYQPNNKHILGVLGNMGSGGSLLGQLTGAGRPACWIIFDIYVENAIDGKHLSVTSAIGIIKEMTKTMQVLNEASWQETFKALWISTLRLVQRAREPLEGPIPHLDARLCMLLALIPLSIAAILQEESDMFGVEGNKILPQRQGLISSLQDLIQYSGLLVPPSSVVNAANAAASKAAIFKANYKAGAGNTSMMDQTDSSMKAAGNMLHLIIEACISRKLIDTSAYLWHGYVVPSRTLKDTALPQESPWLNFMKGSQLSEPLIDALVATPASSVAELDKLYSVATNGSEEEKTAAAKILCGASLVRGWNIQEHVVSMVVKLLSASLPSDSSTSTPGSMSHYLAHMSTLNEILLGVSYGDVIHILSLYGMVPDVAVALMPLCEAFGSIAPPPNHKSTILGETSVYLVFSCAFLCLLRLWKFYRPPQEYCLTGRGGSVKLELTLDYLLLMHNNRIFSNSSAPNRDSYNSMGSVNEVSAQPIYIDSFPKLSAWYFQNQACIASTLSGLCNKNPVHQVANKILNMICRKMNKGGVSSSNLSSTSSSSVSGSSVSASDDSYQRPAVPAWEFLEAVPFVLEAVLTACAHGRLSSRDLTTSLRDLVDFLPASLAAIVSYFSAEITRGIWKPVPMNGTEWPSPGASLHSIEAEVKEILASAGVQINSCYPRGVPPMLPLPMAALVSLTITFKLDRSLEYIQGVIGHALENCAGGSSWPSMPIIGALWTQKVRRWHDFIVLSCMRSPFGRDKDAVAQLIRSCFSSFLQSSSSGSDIIANRGVGALLGDSITDQGLRLPMAPGFVYLRTCRTFHDTYFVSEVILKQVIEWAHKLANGWSFNGPPQLKSGRTPLSCAASMAHQVAMLGGGLLCIAGGPLVVQVLYEDTLPTLLLSAREQSLKDPGPVSSTLQGYAMANMLFYCGSLLWGADRSSPVMKLSFLSRRPRVVRNHMDFIAGVLDGHILLGCDPGTWKAYVSQFMFLVVKFVPSWLPDIKLDTLKKIAAGLRSWHEHDLALSLLERGGPQAISVVVETFL

SEQ ID NO: 225746 - protein, 1135 aa, Zea Mays
MAEGQESVYAIEGPQPMDLDIKRGSTENQNEHREQLRRKNTFMALDVLHMMAADRKIQSFLSLIFLNMPEKFSSLRQRLSSIEAHKVTLETLLPSGHKINDLLINIWRVCKAGYQPNNKHILGVLGNMGSGGSLLGQLTGAGRPACWIIFDIYVENAIDGKHLSVTSAIGIIKEMTKTMQVLNEASWQETFKALWISTLRLVQRAREPLEGPIPHLDARLCMLLALIPLSIAAILQEESDMFGVEGNKILPQRQGLISSLQDLIQYSGLLVPPSSVVNAANAAASKAAIFKANYKAGAGNTSMMDQTDSSMKAAGNMLHLIIEACISRKLIDTSAYLWHGYVVPSRTLKDTALPQESPWLNFMKGSQLSEPLIDALVATPASSVAELDKLYSVATNGSEEEKTAAAKILCGASLVRGWNIQEHVVSMVVKLLSASLPSDSSTSTPGSMSHYLAHMSTLNEILLGVSYGDVIHILSLYGMVPDVAVALMPLCEAFGSIAPPPNHKSTILGETSVYLVFSCAFLCLLRLWKFYRPPQEYCLTGRGGSVKLELTLDYLLLMHNNRIFSNSSAPNRDSYNSMGSVNEVSAQPIYIDSFPKLSAWYFQNQACIASTLSGLCNKNPVHQVANKILNMICRKMNKGGVSSSNLSSTSSSSVSGSSVSASDDSYQRPAVPAWEFLEAVPFVLEAVLTACAHGRLSSRDLTTSLRDLVDFLPASLAAIVSYFSAEITRGIWKPVPMNGTEWPSPGASLHSIEAEVKEILASAGVQINSCYPRGVPPMLPLPMAALVSLTITFKLDRSLEYIQGVIGHALENCAGGSSWPSMPIIGALWTQKVRRWHDFIVLSCMRSPFGRDKDAVAQLIRSCFSSFLQSSSSGSDIIANRGVGALLGDSITDQGLRLPMAPGFVYLRTCRTFHDTYFVSEVILKQVIEWAHKLANGWSFNGPPQLKSGRTPLSCAASMAHQVAMLGGGLLCIAGGPLVVQVLYEDTLPTLLLSAREQSLKDPGPVSSTLQGYAMANMLFYCGSLLWGADRSSPVMKLSFLSRRPRVVRNHMDFIAGVLDGHILLGCDPGTWKAYVSQFMFLVVKFVPSWLPDIKLDTLKKIAAGLRSWHEHDLALSLLERGGPQAISVVVETFL

SEQ ID NO: 225747 - protein, 235 aa, Zea Mays
MCGAMCGSNFGCLLVEVWALRYLFPSLVSVIAGRVFIDCKRNFHAVVAQGHQLLEAILAIGTSVGSVGGSIEAMVVGVMSITAMAAAGMATAGLRLPCTLPTGRVGIIIPPTRTAGTTLPTGTAGTTLLPTGTLGTTTKAGVAGATRRLLMVVVGQGGTDRFHRIGCQKGATVEAAGWVAADMTGNVEVFSPPVAAAAMAAYGSRSSGDMVRLLPVAVYLVYCLPAYVDLVKTSV

SEQ ID NO: 225748 - protein, 220 aa, Zea Mays
MAKVRAEMEALLRELKDGVRTKSGGTEGHGAPKDRNRESTTSSCVTDGNDQTASARLEYQLASSCVEPAGYERSSEDDGGCCARMELDVLEEEFHAELELLQGNYESGTPSFLPEEEEEEHYSEPYDEMADYRDGVDEDSRGGVEDEDDDDDHDAEYNGVSAVQLERRLHELLHERNRDRIEELEAALRRAEKKLVEKEMEVSLWKDTAKFALRQDKELQ

SEQ ID NO: 225749 - protein, 650 aa, Zea Mays
MLTPSAGIPPPSLSAASSPSTSYSLLYLPRRCRRLPVPRASSSFAPKRSAPVPTTTLPPEAPSTSAAVEAPAPFSVTAPGTYRGGEDPLVSKLRTQLGVIHPLPAPPISRSVVGLFALFFFVGAAFDKLWTLRKRRRAERELKVNGSWPQVPTPSFSLFLEKDLQRKESVEWVNMVLGKLWKVYRTGIENWIVGLLQPVIDNLHKPDYVNRVEIRQFYLGEEPLSVRNVERRTSRRANDLQYQIGIRYAGGARMALALYLKFTKVPVVVPVWVRDFDIDGELWVKLRLIPTEPWVGAVSWAFVSLPKVKFELSLFRLFNLMAIPVLSMFLTELLTEDLPRLFVRPKKIVLDFQKGRAMGPVSGSVASDIIQNVATDLIQEGNKDFVGELSVTLVDARKLSFVLFDPYVVMIIDDQVIKSKKNSQTTVIGLPGEPIWNQDFHMLVANPRKQKLTIQVKDSIGLTDITIGTGEVELGSLKDTVPTDKIVTLYGGWGLFGKREAGEVLLRLTYKAYVEDEEEEDEAVRSEIGAGYASDEDVLDYVSGMSKGTDFVGKERETFMDLLAALLVSEEFQGIVSSETGSSSREGEQAGSGPEGTDSVTVPTSAAAADTEASTVPNSSTDTALVWLAAITSVMVLVSSNLGGSGYFNP

SEQ ID NO: 225750 - protein, 346 aa, Zea Mays
MLTPSAGIPPPSLSAASSPSTSYSLLYLPRRCRRLPVPRASSSFAPKRSAPVPTTTLPPEAPSTSAAVEAPAPFSVTAPGTYRGGEDPLVSKLRTQLGVIHPLPAPPISRSVVGLFALFFFVGAAFDKLWTLRKRRRAERELKVNGSWPQVPTPSFSLFLEKDLQRKESVEWVNMVLGKLWKVYRTGIENWIVGLLQPVIDNLHKPDYVNRVEIRQFYLGEEPLSVRNVERRTSRRANDLQYQIGIRYAGGARMALALYLKFTKVPVVVPVWVRDFDIDGELWVKLRLIPTEPWVGAVSWAFVSLPKVKFELSLFRLFNLMAIPVLSITSDRRFATSLCAAQKDCP

SEQ ID NO: 225751 - protein, 116 aa, Zea Mays
MEAAVAAALKSPTAARPSWRPAAPGATSLPFDRRRSFAFGSIKGLGRQQLTSRTRRRSSVLFRGEELRAPRRTGDHHRRRALPLPRGPLPAILHRDGSCRHPRDHLQLHHEVRRGY

SEQ ID NO: 225752 - protein, 164 aa, Zea Mays
MFEPDPAVLVLTNEAETCEKFLMDTLTRVEERMKYLSCNQLGPFEPSPTDIHDVFGVSQQQQQQGDLSAFGAGDVVSYFAGGMAASDIFSGVGPMSSFSEQTIFDSMRPDPAVMAGLDPGIATICTVDQQPPSLNWEDAYASAGLLSALIPSTPFPLDEDQQAS

SEQ ID NO: 225753 - protein, 227 aa, Zea Mays
MASPSCFLFRPRPPLCSRRRRSSSRSLYLLSKQSLHRLPSPRTCRRPVAEQLVLRSLPPGNGRRMGATGFACYCSYDTENGLPTPSPDKGKSSDEWPILRRWDVPWEWPTISLTMVACAVSFLLTGIAEQSILEQLGFRAGETTLDEKAEILFLGQLSTTVVVLGVIFGMTNTFRPFSDDIFRYGKGLVLLRLCSFSCSFLYIGHTLVPFQRLPNLIRGLYKMLKCN

SEQ ID NO: 225754 - protein, 338 aa, Zea Mays
MAKGDDALARKRNRVRRKRLRSSENAVSARVAAIIASKHRRKSGKRRACEGMCFSLPTPDDPFNERHGRKHKLDDEPADDTAADAAEDSGNPKKKGANTKKQQPVAKYGAEAKSKAVRERETGAEVVRGDFDRPSKFLVVCLNAIRDAVAPEEGGGSIHGAGDWGVELWRCCSAQAPSDVLDASGACATVAQTAWLVSTACDIVARKERHGMVVSCPFLLYLVSSQDKAAQVRSICKPLKPLGIHSVSLHPGASIEHQISGLKTCEPEFLIATPERLLELVSLKAIDISGVSMLVSERGNRSERLDELCHSDCDYESGVLCNCTLQTVNLQQVIHHGS

SEQ ID NO: 225755 - protein, 333 aa, Zea Mays
MGGETHLSVQELAASLGALPPEFVRSEQDQPGATTYRGAAVPDAPVIDISEPGFGARMAAAAREWGLFQVVNHGVPSAAVAELQRVGRAFFALPTEEKERYAMDPASGKIEGYGTKLQRDLEGKKTWNDFFFHVVAPPEKVDHAVWPRSLAGYREANEEYCRHMQRLTRELFEHLSLGLGLHGGAMAEAFGGDGLVFLQKINFYPPCPQPELTLGVAPHTDMSTLTVLVPNEVQGLQVFKDGQWYEAKYVPDALIVHIGDQIEQRGIQGGAAPYDGEQGEDADVMADVRGAAGGARRRAAPQAGHGGEPGQVQGQEVQGLPALQDQQAPHVIM

SEQ ID NO: 225756 - protein, 428 aa, Zea Mays
MRALAHAVELTRQGAVDSLKFAKGHLYQAFQNELCRMKLDLTLLDKLVHEYCVYRGIVEGSSHVLSGTADLKCNQNNDVNNETQLYCEMTNNQNGHCSTSGINLDDSWSRRLHRDRHIMPGQQRRKRWRGRLDDLDYACDALLDPSKHDSLSPTLDMDEDTMVEKQDLVENFNLSDKHMEDQKYEIILEMRDLTRKGMASKVVEEISSIDPDFFQQNPILLFQLKQVEFLKLVAAGDHVSALKVASTYLGPLAANNEALLKPLKETLVTLIQPNEDVVMNALSLPVLASSVQVAMSRRLGIEEPQLMKIVRTTIHTHTEWFKLQMCKDRFEHLLKIDSLKEVDPSLGSHRKSKVLTDECANGSSQMTTCSSGKVPDEGSSPQVSSEVACDENAILKVMEFLALPRADAIQLLMQYNGNAEAVIQQIFQ

SEQ ID NO: 225757 - protein, 191 aa, Zea Mays
MGRGKIEIKRIENSTNRQVTFSKRRAGLVKKAREIGVLCDAEVGVVIFSSGGKLYDYCSPRTSLSRILEKYQTNSGKILWGEKHKNLSAEIDRVKKENDNMQIQLRHLKGEDLNSLQPRELIAIEEGLQNGQTNMREKQMDYWRMHKTNGKMLEDEHKILTFRMKLHNHAEQISKDMKILVLGFLVGTQFC

SEQ ID NO: 225758 - protein, 766 aa, Zea Mays
MKLKDYVSYMELQHDEDPLYIFDDKFGESAPTLLEDYSVPHLFQEDFFDILDYDQRPAFRWLIIGPERSGASWHVDPGLTSAWNTLLCGRKRWALYPPGRVPGGVTVHVNDEDGDVDIETPTSLQWWLDIYPHLPEHEKPLECTQLPGETIFVPSGWWHCVLNLETTIAVTQNFVNQSNFQHVCLDMAPGHRHKGVCRAGLLAVPGKFVKDNKNHQSVTMSGWNHPDMSRKEKRLKGSEALRISNSINHCSAFEFSGVQESLENQDFSYDIDFLSQFIEKERDHYSSLWSPTNSIGQREAREWLRRLWVLKPDLRELIWKGACLAINVDKWYSCLEEICACHSLPPPTEDEKLPVGTGSNPVFIVSGNVIKIYAEGGLVYSVHGLGTELEFYDLLQKSGSPLINHIPEIIASGFLEYKDDIYSTVPWNGKGIPEILVKYYSLEVSCANSCFPLGLWSKQRFGMCSSADVSDRPIWPYMVTRKCKGDIFARIRDMLSKTDILHLASSLGVQMRNIHLLPLPPVEHVPESGNNDVKEVVGTCDDTTVLPEWQQLVSTLNRRKQNVKKHLANWGDSVPQVLVEKAEEYLPPNMGFLIKFVKDDGELLYPCPSWIHSDIMDDNILIEGIIKLSSSGERERVYDSDRDKINAIHIIDFSDLSIGDPICDIIPLHLDIFRGDSDLLKEFLRSYQLPLLRGESTTDVYRSVRNSKFSRASYRAMCYCILHEDNVLGAIFSLWKEMRAATSWEDVENLVWGELNRYQDSAVRSA

SEQ ID NO: 225759 - protein, 741 aa, Zea Mays
MYILCNEEPLWMSKCLSIGGPLEYKVSWKKTALCRLGLCSENKEIWQKPRQFDGFNSLYLYRRWYRCFTTLNSFSFDDGHVERKDDFLLDQFRSQYDGKCPVLVTKLAETWPARTKWTLQQLTKDFGEVPFRISQRSPQKITMKLKDYVSYMELQHDEDPLYIFDDKFGESAPTLLEDYSVPHLFQEDFFDILDYDQRPAFRWLIIGPERSGASWHVDPGLTSAWNTLLCGRKRWALYPPGRVPGGVTVHVNDEDGDVDIETPTSLQWWLDIYPHLPEHEKPLECTQLPGETIFVPSGWWHCVLNLETTIAVTQNFVNQSNFQHVCLDMAPGHRHKGVCRAGLLAVPGKFVKDNKNHQSVTMSGWNHPDMSRKEKRLKGSEALRISNSINHCSAFEFSGVQESLENQDFSYDIDFLSQFIEKERDHYSSLWSPTNSIGQREAREWLRRLWVLKPDLRELIWKGACLAINVDKWYSCLEEICACHSLPPPTEDEKLPVGTGSNPVFIVSGNVIKIYAEGGLVYSVHGLGTELEFYDLLQKSGSPLINHIPEIIASGFLEYKDDIYSTVPWNGKGIPEILVKYYSLEVSCANSCFPLGLWSKQRFGMCSSADVSDRPIWPYMVTRKCKGDIFARIRDMLSKTDILHLASSLGVQMRNIHLLPLPPVEHVPESGNNDVKEVVGTCDDTTVLPEWQQLVSTLNRRKQNVKKHLANWGDSVPQVLVEKAEEYLPPNMGFLIKFVKI

SEQ ID NO: 225760 - protein, 843 aa, Zea Mays
MGEGAGDRVLSRLHSVRERIGDSLSAHPNELVAVFTRLKNLGKGMLQPHQIIAEYNNAIPEAEREKLKDGAFEDVLRAAQEAIVIPPWVALAIRPRPGVWEYVRVNVSELAVEELRVPEYLQFKEQLVEEGPNNNFVLELDFEPFNASFPRPSLSKSIGNGVQFLNRHLSSKLFHDKESMYPLLNFLRAHNYKGMTMMLNDRIRSLSALQGALRKAEEHLSTLQADTPYSEFHHRFQELGLEKGWGDCAKRAQETIHLLLDLLEAPDPSTLEKFLGTIPMVFNVVILSPHGYFAQANVLGYPDTGGQVVYILDQVRAMENEMLLRIKQCGLDITPKILIVTRLLPDATGTTCGQRLEKVLGTEHCHILRVPFRTENGIVRKWISRFEVWPYLETYTDDVAHEIAGELQANPDLIIGNYSDGNLVACLLAHKMGVTHCTIAHALEKTKYPNSDLYWKKFEDHYHFSCQFTTDLIAMNHADFIITSTFQEIAGNKDTVGQYESHMAFTMPGLYRVVHGIDVFDPKFNIVSPGADLSIYFPYTESHKRLTSLHPEIEELLYSQTENTEHKFVLNDRNKPIIFSMARLDRVKNLTGLVELYGRNKRLQELVNLVVVCGDHGNPSKDKEEQAEFKKMFDLIEQYNLNGHIRWISAQMNRVRNGELYRYICDTKGAFVQPAFYEAFGLTVVEAMTCGLPTFATAYGGPAEIIVHGVSGYHIDPYQGDKASALLVDFFDKCQADPSHWSKISQGGLQRIEEKYTWKLYSERLMTLTGVYGFWKYVSNLERRETRRYLEMLYALKYRTMASTVPLAVEGEPSSKRGAPFVSWMGCCSLNNNRSGLGALFLK

SEQ ID NO: 225761 - protein, 441 aa, Zea Mays
MPQYQELPCGGQELDIDTALKDGILGGALEPVGAAAGDDGKQPVELRRMMDELDAAAGDGGGGGGDEAVPAVFICPISLEPMVDPVTLCTGQTYERANISRWLALGHRTCPTTMQELWDDALTPNATLRQLIAAWFSRRYTRFKKRSADFHGRAADLVGSLRGTAVPRRQPLKGQARVAALRELRTLAAAHQSVTKAIAEAVAILVSGVLLDADTKAALMQPAKVSLVVDMLNEGAADTKINCVRLIRILMVERGFRPETVASLSLLVGVMRLIRDKRHPDGVAAGLELLNSICAVHRPARCMVVSIGAVPQLVELLPELATECVEPALDILDALSAVPEGRMALKDCPRTIPNAVRLLMRVSEACTRRALSMLWTVCRMAPEECAPAAVEAGLAAKLLLVIQSGCAPELKQKASELLKLCRLNYTDTLFISKCKLTRTIQ

SEQ ID NO: 225762 - protein, 149 aa, Zea Mays
MRVMDAGGNVVPNLYCIGDANGKLMLAHAASAQGISVVEQISGKDHILNHLSIPAACFTHPEISMVGLTEPQAREKADKEGFEVNVVKTSFKANTKALAENEGDGIAKLIYRPDTGEILGVHILGLHAADLIHEASRHQVCCSRTPYIV

SEQ ID NO: 225763 - protein, 309 aa, Zea Mays
MTGAGVATVAMVVVAALAAAGRGAGGERGNTTAGRGEVTYDGRALILDGARRMLFSGDMHYPRSTPEMWPDLIAKAKKGGLDVIQTYVFWNAHEPVQGQFNFEGRYDLVKFIREIHAQGLYVSLRIGPFVESEWKYGGLPFWLRGIPNITFRSDNEPFKRHMQKFVTKIVNLMKDERLFYPQGGPIIISQIENEYKLVEAAFHSKGSSYVHWAAAMAVNLQTGVPWMMCKQDDAPDPIGQIRQTNQLYGQKTGHLGAARTHAFLLIFLPYTPFGKTPNTMFPLNTAILYMVKIKDIDQQQTLPLQWHCL

SEQ ID NO: 225764 - protein, 517 aa, Zea Mays
MYHGGTNFGRVASSYVTTSYYDGAPLDEYGLIWQPTWAHLRELHAAVKQSAETLLWGAYSNHSFGQQQEGHVFATDSGCVAFLVNFDMHKVSTIQFGEGVFQLAPKSISILSQCRDLIFETGKINAQHGLRTAQVVQPLNHAHRWKLFKEPIPAVPSKISHVKNQLCEHLSTTKDETDYLWYLSMYNSRRNENGDLVLNVEAHAHILHAFINNDYVGSVHGSHDKPGNIVLNVSISLREGQNSISLLCVMVGSPDSGAYMERRTFGVRKMSIKRRQQRPHSINIELWKHQVGLYGETNKIYTSEGSSHAEWTAFSKSIHLPLIWYKTTFDAPWGNDPVTLNLTSMGKGEVWINGQSIGRYWVSFKTPSGQSSQSMYHIPRYFLKTGENLLVLMEETGGDPLQITVNTMSITRIYGTVSEFSTPSLLSRENHPAVHLRCEKGKHITDIEFASFGNPVQDCRGSGQSCQGSCHAEISEFVVKNACLGRRKCVLPVWANKFGGDPCPRIEKSLSVAAICG

SEQ ID NO: 225765 - protein, 288 aa, Zea Mays
MTGAGVATVAMVVVAALAAAGRGAGGERGNTTAGRGEVTYDGRALILDGARRMLFSGDMHYPRSTPEMWPDLIAKAKKGGLDVIQTYVFWNAHEPVQGQFNFEGRYDLVKFIREIHAQGLYVSLRIGPFVESEWKYGGLPFWLRGIPNITFRSDNEPFKRHMQKFVTKIVNLMKDERLFYPQGGPIIISQIENEYKLVEAAFHSKGSSYVHWAAAMAVNLQTGVPWMMCKQDDAPDPIINTCNGLICGETFPGPNSPNKPALWTENWTSRCSKNSCISSNISTIYSVW

SEQ ID NO: 225766 - protein, 301 aa, Zea Mays
MYHGGTNFGRVASSYVTTSYYDGAPLDEYGLIWQPTWAHLRELHAAVKQSAETLLWGAYSNHSFGQQQEGHVFATDSGCVAFLVNFDMHKVSTIQFGEGVFQLAPKSISILSQCRDLIFETGKINAQHGLRTAQVVQPLNHAHRWKLFKEPIPAVPSKISHVKNQLCEHLSTTKDETDYLWYLSMYNSRRNENGDLVLNVEAHAHILHAFINNDYVGSVHGSHDKPGNIVLNVSISLREGQNSISLLCVMVGSPDSGAYMERRTFGVRKMSIKRRQQRPHSINIELWKHQVNQSNPTLIMN

SEQ ID NO: 225767 - protein, 496 aa, Zea Mays
MMLGKVQFELQKFVDSYRSNIIYTITTPSESLLKELQTVEEMKQQCDMKREAYEATRASYREKGRSRHSKTETYSAEQLQSALAEYQEDAALFIFRLKSLRQGQFHSLLTQASRHHAAQLSFFRRGLKCLEALEPHVKAIAERQHIDYQFSGLEDDESDNDDYSSDQDDCSEDGELSFDYEINDKDQDFLASGGSMDLDKRDVKNSPQPVKESMQEEVKQTKGNVLTPRVKPELNAHSGNLQDPSERLWQMKPSSAKHSYKLPMPVDDKQDPRPVGAPRSHHSQQLESKPRVSMNPWHSSPLTKDFRPGGHVKTVSSTEATSTFSQSVSGYKKTKRESWSGPIPSRPGLSKPSSLNGHRSPPMAHLVTPGNLQCHSRQPSVSPKVSPKMLPHPTRSPTISELHELPRPPANVESLRPSGLIGYSGPLVPKRQTEMPAASQTPSPLPLPPATLTRSYSIPSNSQRIPIITVDRLLEARNSRDGSDNFFPTTYSVVTG

SEQ ID NO: 225768 - protein, 449 aa, Zea Mays
MRCPPPSTCSWPLFSQLVPLSVFSCIPRLRQANGASSAPCCTRPRGRVMRKLCPNLDRDDSLDTVLEVPIPDEMLINAPGADKRRGAGGANMRAWLKNQAFDRATVDGPASATAELQLFLNVVGSPLIPCPVPHDRAFSRSIRDSSIQYIAATGGQAALQGVRSMYAVGKVRMCASEFHLGDQTVTAAQGRAEVGGFVLWQKTPEVWFFELIMAGHKMSAGSDGKVAWRQSAAEHSRVSRGPPRPLRRSLQVTESAEAHVRARIAFSQRRLPSCSFGYLQGLDPRSIANLFSDAVCIGEKILNNEECFILKLEAGAATLRARSAPAFDIIHHTVWGYFSQRTGLLIQLEDSHLLRMKSGKGARRSENIFWETSMESVISDYRYIDGINIAHGGHTNVTLFRYGEGSVNHKRKLEETWTVEEADFNVHGLTTDYFLPPADLKKDDEDHNK

SEQ ID NO: 225769 - protein, 356 aa, Zea Mays
MRCSSTPPAPTSAAAPGAPTCAPGSRTRPSIAPPSTGLPPPPRSSSCSSTSSGRRSSPAPSRTTALSAAPSATPLSIDSQVHHPAVHRGHGRAGGAAGGAEHVRRGEGADVRFRVPPRRPDGHRRAGPRRGRRLRALAEDARGLVLRAHNGRPQDERRQRRQGRVAAVCRRALPRLARPAPPPPPLSPGPGSTLHREPLLRRGVHRREDPQQRGVLHPEAGGWRRDAAGAERSGVRHHPPHGLGLLQPAHGAAHPARRLAPAPHEVRQGRSPQREHLLGDQHGVRHLRLPLHRRHQHRARRPHQRHALPLRRGIRQPQAEAGGDMDGGGGRFQRARPHHGLLPAAGRPQEGRRGSQ

SEQ ID NO: 225770 - protein, 353 aa, Zea Mays
MRCSSTPPAPTSAAAPGAPTCAPGSRTRPSIAPPSTGLPPPPRSSSCSSTSSGRRSSPAPSRTTALSAAPSATPLSQVHHPAVHRGHGRAGGAAGGAEHVRRGEGADVRFRVPPRRPDGHRRAGPRRGRRLRALAEDARGLVLRAHNGRPQDERRQRRQGRVAAVCRRALPRLARPAPPPPPLSPGPGSTLHREPLLRRGVHRREDPQQRGVLHPEAGGWRRDAAGAERSGVRHHPPHGLGLLQPAHGAAHPARRLAPAPHEVRQGRSPQREHLLGDQHGVRHLRLPLHRRHQHRARRPHQRHALPLRRGIRQPQAEAGGDMDGGGGRFQRARPHHGLLPAAGRPQEGRRGSQ

SEQ ID NO: 225771 - protein, 252 aa, Zea Mays
MQCPNCRKIEKGNWLYANGSRSAHDVSMDEWAHDEDLYDVSYSDMPFRFHWCPFGRLTQLPSLFEEGESSPPVTFHDFMGQHVFTEQVAVSAAAGTTNPCPYVAYLHPLTPLTSLSSSHVPDRTMDRPAYHDHWNPMAGPSDVRSMQTMQPADFHHSHWAHVPHSYGQPNSNNEQPGIPFGARAVRVDGDSQRRASVVSPSYFSNGSGSRSRPPNVPPLMPQFMRAHGSISEQYQQNSSSSLFAGAHRFIWP

SEQ ID NO: 225772 - protein, 208 aa, Zea Mays
MHFIMVKWADGKKFEDKFVDTLLKYGYKGQYMSENWLKQPLFIQSFAPTSIVHVSDFIDSPKVFLIDDISVRTQDTNQSYWEITSDDYLAYISKYVVGLGPWKDTIVPASGNYLMPPSDLVARAHAHNLQVHPYTYRNENQFLHFNFFQDPYNEYDFWINTVGVDGLFTDFTGTLHRYQELTSPHRKDETANSLLVKISQMISAYEGL

SEQ ID NO: 225773 - protein, 357 aa, Zea Mays
MPAFAGGAAEPPLADSYYALLRRGNDDEGAYTTSTAPWDDVSLPVAECELPMIDVGCLTTADDGSSPEAEAERAACAAAIARAAEEWGFFQVRNHGVPQELLEEMRREQARLFRLPFETKATAGLLNDSYRWGTPTATSPRQLSWSEAFHVPLAGVSGSGTTCDFGDLTTLRDVTREVAGAMSKLAGTLARVLAEALLGRRPAGERFPEGCDETTCFLRLNRYPACPISPGALGLVPHTDSDFLTVLCQDQQVGGLQLMKGDSWVAVKPIPGTLVVNIGDLFQAWSNNRYKSVEHKVMTNARTERYSVAYFLCPSYDSPIGTCEEPSLYRTFTFGEYRRKVQEDVKRTGKKCLWMYG

SEQ ID NO: 225774 - protein, 553 aa, Zea Mays
MARRRMRRGGGGGGGGGGGVVDVVRVRRLLLLSLTCCSSIWPGGRIFAAADTDPNDLNVLNTLFTSLNSPGQLTGWQANGGDPCGQSWKGITCSGSGVTKIQLPNLSLTGNLAYNMNNLGSLVELDMSQNNLGGGGQIQYNLPNMKLEKLNLAGNQFGGNLPYSISTMPNLKYLNLNHNQLQGNISDVFSNLYSLSELDLSFNSLTGDLPQSFTGLSSLKKVYLQNNQFTGNINVLANLPLETLNVANNHFTGWIPSQLKKINSLQTDGNSWSTGPAPPPPPYTAPPPPPNHWNADGSSSSSSSGGRSGIGGGGVAGIIISLLVVGSVVAFLVIKRRKRKAAMKEHFEQHQPFTSFPSNEVKDMKPVYEATTVDIESLASPASVNLKPPPKIERNKSFDDDDDFSNKLVAKKSNITPINATVYSVADLQMATDSFSFDNLVGEGTFGRVYRAQFNDGKVLAIKKLDSTVMPFQSSDDFAELVSNISKLHHPNLNELVGYCMEHGQHLLVYDFHRNGSLHDLLHLSDEYSKPLSWNTRIKIALGSARALDCTSN

SEQ ID NO: 225775 - protein, 569 aa, Zea Mays
MPNLKYLNLNHNQLQGNISDVFSNLYSLSELDLSFNSLTGDLPQSFTGLSSLKKVYLQNNQFTGNINVLANLPLETLNVANNHFTGWIPSQLKKINSLQTDGNSWSTGPAPPPPPYTAPPPPPNHWNADGSSSSSSSGGRSGIGGGGVAGIIISLLVVGSVVAFLVIKRRKRKAAMKEHFEQHQPFTSFPSNEVKDMKPVYEATTVDIESLASPASVNLKPPPKIERNKSFDDDDDFSNKLVAKKSNITPINATVYSVADLQMATDSFSFDNLVGEGTFGRVYRAQFNDGKVLAIKKLDSTVMPFQSSDDFAELVSNISKLHHPNLNELVGYCMEHGQHLLVYDFHRNGSLHDLLHLSDEYSKPLSWNTRIKIALGSARALEYLHEICSPSIIHKNFKSSNILLDSEFNPHLSDAGLASFIPDAEFQAAEQSAGYTAPEVDMTGQYTLKSDVYSFGVVMLELLTGRRPFDSSRPRSEQSLVRWATPQLHDIDALDRMVDPALKGLYPAKSLSRFADVLALCVQPEPEFRPPMSEVVQALVRLVQRANMTKRMLDGDTSRRPDDLDQDFI

SEQ ID NO: 225776 - protein, 264 aa, Zea Mays
MLCLAGLLLKITRLPPQSHAKIPLELPPSPSASPCGGAGSRRAMAPAFSVSCAPGSSRPLAASPGPSVVVVASSQLPASSRSSERRRAPGLALAAAPGVGGRDGGGRWRAGISSFPFLPPFFTGNKGEKDAEKAMRLKEELLDAIAPLDRGAEATPEDKERVEQIVQQLEAVNQVKEPLKSDLLNGKWELLYTTSTSILQPQRPKYLRPFGKIYQSINADNLRAQNMETWPYFNQVTANLVPLNSRRVAVKFDYFKIFGLFLYY

SEQ ID NO: 225777 - protein, 288 aa, Zea Mays
MLCLAGLLLKITRLPPQSHAKIPLELPPSPSASPCGGAGSRRAMAPAFSVSCAPGSSRPLAASPGPSVVVVASSQLPASSRSSERRRAPGLALAAAPGVGGRDGGGRWRAGISSFPFLPPFFTGNKGEKDAEKAMRLKEELLDAIAPLDRGAEATPEDKERVEQIVQQLEAVNQVKEPLKSDLLNGKWELLYTTSTSILQPQRPKYLRPFGKIYQSINADNLRAQNMETWPYFNQVTANLVPLNSRRVAVKFDYFKIFGLIPIKAPGSGKGELEITYLDEELRNHTLL

SEQ ID NO: 225778 - protein, 264 aa, Zea Mays; identical to SEQ ID NO: 225776

SEQ ID NO: 225779 - protein, 155 aa, Zea Mays
MDAAKYRDELKILAPHSLLKCSSDATTLGIRVQVRSVYIESRSQPLKGQFFFAYRIRITNSSQRPVQLLKRHWIVTDGNGRTENIWGVGVVGEQPVIFPKTGFEYSSACPLSTPNGRMEGDFEMKHIDKAGSSTFNVAIAPFSLSILGDDNDVLL

SEQ ID NO: 225780 - protein, 368 aa, Zea Mays
MDSSLASAAAIADQRQKIEQYRHILASVLSSSPPDISQAKRFLDHMVSDEVPLVVSRQLLQTFAQDLGKLESDAQKEVAHYALTQIQPRVVSFEEQVVVIREKLAELYESEQQWSKAAQMLSGIDLDSGIRMLDDTNKLSKCVQIARLYLEDDDAVNAEAFINKASFLVTNSHQEVLNLQYKVCYARILDLKRRFLEAALRYYDISQIEQRKIGDEEIDENALEQALSAAVTCTILAGAGPQRSRVLATLYKDERCSKLKIYPILQKVYLERILRKPEIDAFAEELRPHQKALLPDKSTVLDRAMIEHNLLSASKLYTNISFDELGTLLGIDPRKAEKIASRMIYEDRMRGSIDQICLCKLIVTGTMS

SEQ ID NO: 225781 - protein, 1231 aa, Zea Mays
MDINILLSEFGDFSDFFQQEELDFGEPPGTAESHALVIPASDCGDVTFTDSPSTAMDIPEQRLSPVGFTTLDAFDHQIMAPAQDVVAKVQEPHNDTATPAQSHSQVLSSGRFDYLTKAEAKLTFAPEYAAVEILIAEAPTPLFTNPYFPRSKKPGSSSFSARVYSYDVAQSSQIESTGDKPDKTSKLISGNHLHDISSSNLYTLVQGGNKGSDKILKSTDTQPSKGELSPPISGVTSFNFSLVSQKKSGNMFNAGYFLLSMKTALATEIECITFQAAMCRIRHTLLSLRSKASAEFNSATSSFIQTNVSNKSDLTPRSLMDNVGVWRPVVTPKGPKSLESLSANTLTGASPSLSIQRQPVVDLLCAMTLLVQQSTSFVDMSLDMDDGDGSFFWLSLDEQKRRGFSCDPSMVHAGCGGLLGTCHSKDCAGVDLVDPLSAEVSEPSMISLLQSDIRVALKAAFANMDGPLSVIDWCRGRGNAAESAGTGDAYSFQYSSGDILEPSSSLSIGGDSMSPPQPTSSNRGISELEFQKGYHRVRPTIAVLPSPSMLVGYQDDWLKASVNSLKTWEKAPFEPYALPKPVTYYALCPDIDMLTSAVADFFMQLGTVYEVCKLGTHSPQNNGGQMELSPGKYLPSGLVLVDCPEQLKKVRCGHLGPISSTSDCLQAFSKHWSVKSFVTSISRILKDIKLTSNISTNQKESSSGPCTVIYVVCPFPEPCAILQTLVECSVALGYVISSPERERKLLYSQVAKALNSSASVDEASASNVVMLSGFSIPKLVLQIVTIETVLRMDKPNKELAVLKDIAFTVYNKARRIPRAVSTSDMFQSPTYLGRSQSTMMHVTSPAPTLWKECLVPRMSGPTLSRETDFDASMRSATWDNSWQPARSGGLLDPSKLPDLCAQDDRKYAFEPLFILADPGSADLNALMEPSKSGADASGSRVYGSISGSNSDSGVSPLLDVSESDSAASLHCCYGWTEDWRWLVCIWTDARGELLDSLIFPFGGISSRQDTKVLQSLFIQILQQGCQIMSSSPEASNMRPRDVIITRIGGFLELEIQEWQKAIYSYGGNEVKKWPVQLRRSIPEGIPPSSNGPTLQQQQQQDMALIQDRNMPSSPNPLYSPHPKSSFMKGALGQSGNKKQILVEQSGMDTSRGSLHLVRSISLVAVSQDHSLHLTCQADLLSRPASAGEGSQGSSGPWSYLEGFTPVKSIGSMSASHSYLLVPSPTKGLRFL

SEQ ID NO: 225782 - protein, 58 aa, Zea Mays
MLNYLLSVTPVGVGEYMLASWLGMMPITLALVYVGTTLKDLSDVTHGWSEISTTRRWS

SEQ ID NO: 225783 - protein, 1776 aa, Zea Mays
MTERSWNFLDKYGFHHGGCSHHRTLLPEEALNILKKVPDDTRRKLAARGYIVQTGYVMKYLPVPPNCLYIPEFTDGQSIMSYDISIALLKKVLQKIEQIKRSRSGSPNFESHDAESCDLQLAIGQYIRLRGTTRGPQDNTKRFTVGSADSAALSTKQWLEKMRTLFISKGSGFSSRSVLTGDPYIGLGVVGLPSEVAKRMTFEEQVTDININRLQDVVDKGLCLTYRDGQATYAITVGSKGYTTLKVGQTISRRIVDGDVVFLNRPPSTHKHSLQAFYAYVHDDHTVKINPLMCGPFSADFDGDCVHIYYPQSLAAKAEALELFSVERQLISSHSGKVNLQLGNDSLVAMKAMSHTTMLHKELANQLAMFVPFSLLAPAVIKPVPSWTISQIVQGAFPANLTCQGDTHLVRDSTIIRLDLGKESVQDSFPDLVSSILREKGPKEALQFLNVLEPLLMEFLLLDGLSISLRDFNVPKALLEEAQKDIRNQSLILEQSRCSTSQFVEFRVENNLKNVKQQISDSVGKFSDLGLLIDPKKEASMSKVVQQVGFVGLQLYREGKLYSRRLVEDCFTNFVNKHLAIGDEYPPEAYGLVQSSYFHGLNPYEELIHAISTREAMIRSSRGLSEPGTLFKNLMAILRDVVICYDGTVRNICSNSIIQLKYGEDDETDSSSVVPPGEPVGVLAATAISNPAYKAVLDSSQSNNASWESMKEILQTRTSYKNDVKDRKVVLFLNDCSCAKKFCKERAALAVQSCLKRVTLGDCATDICIEHQKQINLDGTSEAAPTLVGHIHLDKGHLERINISTQDILQKCQEVSGRFGKKKGHLCHIFKKITFATCDCSFTQMPIDGKLHKVPCVQFAFSDDIVLSESIERAVNVIADSVCSVLLDTIIKGDPRIQAAKVIWVESDAASWVKHTRKVSKGESALEIIVEKDDAVSNGDAWRTAIDACLPVLNLIDTRRSIPYGIQQVRELIGISCAFDQVVQRLSTTVKMVNKGVLKDHLILVANSMTCTGNLIGFNIAGYKATFRSLKVQVPFTESTLFTPMKCFEKAAEKCDSDSLGCVVSSSAWGKHAAVGTGSSFQILWNENQLKSNKEYGDGLYDFLALVRTDQEKTDYMFLDDVDYLVEENAADDMCLSPEPDGTLGKPTFEDNFEEQNIQKGSSWEIGITTNSSWEQNASVANDSGDWGGWSSGGGAAAKPADQDNSWEVHAKVQDNSTTDWGGWSVEKPTGEATVSGEPAETDTWADKGAKMESDAGDGNWEKSSTPEASKKNDSSENTWDKRKGDGGDGAWGNRSDDGHGNWEHPSNWNGQSLDVDQDTWGNARGKKKADGNYCQWEEQPSNYKQKKTNADHDSSYNNVMPSSEIAWNAGDGTGRPNAKSNAESSWGEEDKMESDDHPKVPKESDTWNTGRSNESPWDNTDALQDSWVKSAARNNNTQDGSWDKVVSMKDLDSLQDSWSKATIQTNDAQNDSWDNVAKNAPDSAAEDSWGAATPAETTDSGNKEWKSDGWGAKSGNWSSQRNNPGRPPRRPDERGPPPPRQRFELTVAEKNILLEVEPIKLRVRSIFREACDGVRLNPEDEKFILEKVLEHHPEKQSKVSGEIDYLTVNKHQTFQDTRCFFVVSTDGSQADFSYLKCLENFVRKSYTEDADTFCMKYLRPRRRQAPPADVGTASGAPDEVPPSTAAETEQGTPPAPQAEVPQETWGSPAVPLEGGTHIAGPDSTGDAVILGEQHDLTPASPAVAPQVASEPDTTDGTGLLGKAPQADWGPRFDAD

SEQ ID NO: 225784 - protein, 260 aa, Zea Mays
MQARVVVFPVKGRAWCFALPRASAAAPAADGALPRPTLRDLWRGISSGSRTAPEKAEAVVDFVADKMNRAWVGFGSAPEGSMKSRIHSFGLKLLSRVRPSEVLLKSVTKDVSALEIVHPASINSRLVRRRLRHIAVRGASVHKKFLYGSVLPLPNIPFFWVLFRAYSHWRALQGSERLELLVSDCSDKWKVLEEKINSVKDGKPSENARNSPWKLRPSEKLDRFLEGRNLDEGLDCDTILSICQEYDLDKIDVLKYRDLL

SEQ ID NO: 225785 - protein, 562 aa, Zea Mays
MSPMPTAPYTSATSLLLGSRRLPRFQFQSLRTPTKPPFRRPASSSSTPLPRCRASATPRPLAPVCASALALPVSVAAAPPPQVDGGWVGGTAAAVRRVAVAVACGALAAAWCRRAMAVGAAAAAGAGAGAPGTVEAAAGIGWMALRGGWPRVLQILQLLREHGLILAALLSLSAFFSMAETSITTLWPWKVRELAEKEPENGVFKMLRSDVTRFLTTILIGTTVVNIGATAIVTEAATAMFGEAGVSAATGVMTVAILLLTEITPKSVAVHNATEVARFVVRPVAWLSLILYPVGRIVTFLSMGMLKILGLKGRSEPYVTEDELKLMLRGAELSGAIAEDEQDMIENVLEIKDTHVREVMTPLVDVVAIDAIATLIDFKNLWETHQYSRVPVFEERIDNIVGIAYAMDMLEYVEEVEKLNAITVKEIAHMPTYFVPDLTLEDVVEEIVGEIFDENDSKEEIQKKTGYIVRRGDGTFDVDANTSIDHLSEELGIKIPEGHQYETVSGFVCASFGYIPEEGGKMLVILEKNFREENGEYQEEGPDRQDDREKTQAYELEVLDCR

SEQ ID NO: 225786 - protein, 168 aa, Zea Mays
MSSDRTFSTSADDPASNHDYMTVLSVKAASVASQWLELLHQDIRGRLAALKRSRKRVRNALHTELPYLTATEFSSNQENESSIANTSEIGCTDKAVSEAHVARWRSLFVQMDKTLQEEGKQLVSLLIGLVCVIGKEHTICHCSCWYIALFIFGLIGCPLGRIQARHAR

SEQ ID NO: 225787 - protein, 231 aa, Zea Mays
MGPRHVTTLAPSFESPAPCPSRKRPSVLYQKETHGPTAAPLRRSKGPLDPVPELQGSNETNVTDVGAEETEGVHENTDEIDALLDSSDSDEGPHELDRARRQPAAENETSSVESVASAAGSAPPAKKRRLSSCTDRSVVDTASSARPDHSVEQKPLASDCDAQSCCVGEAAEGDSPDDQRRRRERIQETVAALRNIVPGGTAKDATAVLDEAICYLQYLKLKVKTLGAASL

SEQ ID NO: 225788 - protein, 293 aa, Zea Mays
MAMEEEQTPPELRYLSGLGNTSFTTPRARNLRTWLYRIKPSVTHEPFYPRNPTNERLVGEFDRTTTVATPTQLRWRPADVPLHPGLDFIDGLYTVCGAGSSCLRHGYAIHMYAANKPMDGCSLCNADGDFLIVPQQGRLFITTECGRLLVSPGEIVVIPQGLRFAVDLPDGPSRGYVSEIFGAHFQLPDLGPIGANGLASPRDFLSPTAWFEQEHHPGYTIVHKYGGELFSATQDFSPFNVVAWHGNYVPYKYDLSKFCPFNTVLLDHGDPSVNTDGWLLRIHSAHPTTTATA

SEQ ID NO: 225789 - protein, 346 aa, Zea Mays
MEKLRSLCACCMGPPRPASPACATAGVTVKVSDRYVEIKNGIFDLTLSNPDGIVTGVRYNGVDNLMEILNKEDNRGYWDLVWNPPGQKTGIFDVIKGTEFRIVYQDENQAEVSFTRNWDPSLEGKAVPLNIDKRFIVLRGSSGFYTYGIYEHKEGWPDFGLGETRVAFKLRKDMFHYMALADDRQRIMPMPDDRLPPRGQPLAYPEAVLLVDPINPELRGEVDDKYQYSCEDQYNNVHGWMSFDPPIGFWQITPSDEFRTGGPLKQNLTSHVGPTMLAMFLSAHYAGDDLSPKFTNGEYWKKVHGPVFMYLNSSWDASDPTMLWEDAKVQRIFRRQSKGVVSLVDY

SEQ ID NO: 225790 - protein, 179 aa, Zea Mays
MHRVGKTPVLFCSLHNSNCVRLLDLPSNAGCQEANSCYWITDPRAHCMGWQGNSNSTNDNLQNEDANDASRAHIPGALFFDVDGISDRTSSLPHMLPSEKAFSVAVSALGIYNKDGIVVYDGKGMFSAACVWWWGGLHSSHLEHQNRRANLCAEHGRQSLHDILLAQKQPWLVVLGCLM

SEQ ID NO: 225791 - protein, 332 aa, Zea Mays
MTTDAPAGNSGSLSIASNDSKKVSREDIELVQNLIERCLQLYMNKGEVVRTLSTRARIEPGFTTLVWQKLEEENSEFFRAYYIRLKLKRQIILFNHLLQHQYNLMKYPAPPNVPLAPIQNGIHHMPVSNLPMGYPVLPQPIMPAPGQPHMDPMACGLSNGHVVNGIPAPGGYHPMRMNSGNDMVVDNGAPEAPHAGATGSVMSSEMAVSPSSAASSNHAPFMPPEIPGMAMDVPGLDSTFGSDVGNGPLQLGPDGSSRDSIRSLGQLWNFSLSDLTADLTSLGADLDVLENYTGTPFLPSDSDILLDSPDQDDIVEYFADAINGSQSDEERS

SEQ ID NO: 225792 - protein, 228 aa, Zea Mays
MKYPAPPNVPLAPIQNGIHHMPVSNLPMGYPVLPQPIMPAPGQPHMDPMACGLSNGHVVNGIPAPGGYHPMRMNSGNDMVVDNGAPEAPHAGATGSVMSSEMAVSPSSAASSNHAPFMPPEIPGMAMDVPGLDSTFGSDVGNGPLQLGPDGSSRDSIRSLGQLWNFSLSDLTADLTSLGADLDVLENYTGTPFLPSDSDILLDSPDQDDIVEYFADAINGSQSDEERS

SEQ ID NO: 225793 - protein, 737 aa, Zea Mays
MLALVLVAIQASSQPRCRFFLMKSPFLSVIFADSSHGTPPMDDTLTKMKVLANDPDEKDYKFDFDLRQIDDLLPDEDEFFAGITDETEPVAQTNTTEELEEFDVFGNGGGMELDIDPVESITVGFANSSIVDGARCNSINPFGVPSTVGTVAGEHPFGEHPSRTLFVRNINSNVEDSELRSLFEQYGDIRTLYTATKHRGFVMISYFDIRAARNAMRALQNKPLRRRKLDIHFSIPKENPSDKDLNQGTLVIFNLDPSVSNEEVRQIFGAYGEVKEIRETPNKKHHKFIEFYDVRAAEAALRSLNKSEIAGKRIKLEPSRPGGTRRNLMQQLGHDLDQEEPRTYRHSHVGSPIANSPPGAWAQYSSPTDSNMLQAFTRSPTGNGMSPIGIPSLISNAPKIAPIGKDSNRSKYDQVFSNGNQSVGAAFQHSHSYQDHNSEHMSSSPGTLSGPQFLWGSPKPYSEHSKSPIWHPPGIGSALSSSSRTQGQGFLYSSRQASLFGSSDQHHHHVGSAPSGAPFESHFGFLPESPETSFMKQARFGNMGNFGTGRNGGGLLLGMANRASVNPGSSLIGSLTDNSSTNFRPMLSPRLGQTFYTNPPYHGIGTFGLDSSIDRVRNRRVDSSVLQADSKRQYQLDLEKIHRGDDTRTTLMIKNIPNKYTSKMLLAAIDELHRGTYDFFYLPIDFKNKCNVGYAFVNMISPVHIISFYQVLSFLGLCPVFAIVTCRVKNLFPVQLS

SEQ ID NO: 225794 - protein, 127 aa, Zea Mays
MTTAARPTWAPAKGGNEQGGTRIFGPSQKYSSRDLAAHTSLKLRKDGQQTQEELQKRNLREELEERERKHYSSKDKSYAEERDRRKSSSQLLLEGSKREAEDKIVPREIDADDSDVEPKSDDEREDN

SEQ ID NO: 225795 - protein, 234 aa, Zea Mays
MTTAARPTWAPAKGGNEQGGTRIFGPSQKYSSRDLAAHTSLKLRKDGQQTQEELQKRNLREELEERERKHYSSKDKSYAERDRRKSSSQLLLEGSKREAEDKIVPREIDADDSDVEPKSDDESDEDGDDDDTEALMAELERIKKERAEEKLRKERQQAEEEAKMKEAELMRGNPLININNPGSFSVKRRWDDDVVFKNQARGETKTPKRFINDTIRSDFHRTGRKEARSANHYS

SEQ ID NO: 225796 - protein, 622 aa, Zea Mays
MESHHGGDGKARDKFSVYQNPSLTRALDSRSARPSVTVLLVLAVISVASASSFLALTSREEQLTKLAGRAGISVLAAVFVIRLVEAALGLVALFTLLGFFRALMLYNGQKALAKADKVVLSERQLGLLGLKMAGSEGGGKGEQIKRPPKTKPSTPSEPIVPIRRSSFSYTPSRPSGQSRIGSSHLSPGGERLIMALPMSPSTPLQKHVSSPSTPWSRKSSGSAKGIQTEAMLDQFLAGLDVNIDKIMDPETKTTTPPATITSFGVATPVSITTSTTPSGAARSTPLRPVRMSPGSHQKYSTPPKKGEGELPTPMSLEQAVEAFENLGVYPEIEQWRDSLRQWFSSVVMNPLVQKIKTSHTQVKQTTATVGASVTVSQVGSDLPSTTPPVALSPLGGTKDWQPTVTVDEDGILNQLHSALLHSRDAPVAQTFGSLQQPQRNPHLPAIQACIDAITEHQRLNTLMKGELIKGLLPQSSVRADYTVQRVQELAEGTCLKNYDYMGHGNDYGKSEKKWTTELPTDSHLLLYLFAAFLEHPKWMLHVDPTSYSGSQSSKNPLFLGVLPPKERFPEKYVALISGVPAIIHPGALILAVSKQNPPIFALYWDKKQQFSLQLGETNTEEM

SEQ ID NO: 225797 - protein, 64 aa, Zea Mays
MEFCIYRIIIDVVAISCVSCCCCCCRRRTGNHTSVCPVTEGTKFTGWRDLIVCCSPPFFVSSLM

SEQ ID NO: 225798 - protein, 86 aa, Zea Mays
MRRPLLGWLHVDAPAPDISSCKMEFCIYRIIIDVVAISCVSCCCCCCRRRTGNHTSVCPVTEGTKFTGWRDLIVCCSPPFFVSSLM

SEQ ID NO: 225799 - protein, 1180 aa, Zea Mays
MYAVGKVGSLISRSVYTVSGPFHPFGGAVDIVVVQQQDGSFKSSPWYVRFGKFQGVLKSREKVVDISVNGVDAGFHMYLDSNGEAYFLRNADPNGEEGEFIVSPASSGDEREVPIQEAQLRKSKSTSCDSSTMEADVGEGKILARTTSRRITILERMFGRKSIKNNAHAVDRVSSLERAEVAAELLDTKWSTNLPRSSKPNGSNDEPSKSNNDQMETSKPVFSEHSLDHGKEMDSNDNAHCNSCSPRGGRNSSADETDPCLQATIVKKEVVEIHARESSDFTDNITSITHQQGSESSSNDLGTDKLMQQSVDTQDELLHDVEDVTERETHAEEVISNDIFEIHVVETDITSGKSEVDSEIVTVDPEPDRANQNFTDTNYQNYGTTDISSERHEVSLIPSAQDAVQEKIVILSSSEAVEGSLDAVPEKVVILSSSETVDSSYAVSCILDDTVHDASDISQADGVQHEEHSSISDGSTEKLISEESSLVCYGVPSNKKDLVNIAVQESKAFILKNPASQILEESGPGLDVSTDSVSLSHADSAPDLACQHVSPNVEDTTSYEPGIGPEDVTKNSVVENGACSGELVVSVIQTSAGDGLTKCIAHPAVFSNKIEVEGSPTSAGFSSLISVEVQNTKLEDDTNKSSSVIGDEAGFVPEATAELDEEAEPVISLSEYTEEIQFQFSDAENFADRKATDDMVANKTTGEVEHDESDCDTEKQEEGDVGLVNDLENCSASLKPKSEAIGDFSEENNSPPEVTNTVALDGNHADDLKVDAFIPFAELSLCRHLLSEGMGEDAACSAFDSEKVTLEEFRNMKQSLMRNNKLVVRIAGRYFPWDAAAPIVLGMISFSEEQVFEPKGMINVERVEQSAAPGGSWSIWPFSFRRTRTITAIQPVCESIVETSVSTPKELTHFKELDRERNKSRVKRIERKVRSLTPTSDELASLDLREGRNVVTFTFSTAIVGKQQVDCHIYLWRWNTRIVISDVDGTITKSDVLGQFMPLVGVDWSQNGVAHLFSAIKENGYQLLFLSARAISQAHITRQFLFNLKQDGKALPDGPVVISPDGLFPSLYREVIRRAPHEFKISCLEAIKDLFPHDSNPFYAGFGNRDTDELSYLKVGIPMGKIFIINPKGEVAVNRRVDTKSYTSLHALVHGMFPPILSSSEQEDYNAWNYWKMPLPDVDL

SEQ ID NO: 225800 - protein, 942 aa, Zea Mays
MQQSVDTQDELLHDVEDVTERETHAEEVISNDIFEIHVVETDITSGKSEVDSEIVTVDPEPDRANQNFTDTNYQNYGTTDISSERHEVSLIPSAQDAVQEKIVILSSSEAVEGSLDAVPEKVVILSSSETVDSSYAVSCILDDTVHDASDISQADGVQHEEHSSISDGSTEKLISEESSLVCYGVPSNKKDLVNIAVQESKAFILKNPASQILEESGPGLDVSTDSVSLSHADSAPDLACQHVSPNVEDTTSYEPGIGPEDVTKNSVVENGACSGELVVSVIQTSAGDGLTKCIAHPAVFSNKIEVEGSPTSAGFSSLISVEVQNTKLEDDTNKSSSVIGDEAGFVPEATAELDEEAEPVISLSEYTEEIQFQFSDAENFADRKATDDMVANKTTGEVEHDESDCDTEKQEEGDVGLVNDLENCSASLKPVSSPVSIPAIDFQSGNSNREAKSLPNLRSHIHDLERSYSFQLSRSLQSTAENNGIDLVKSMNYAFLEQKSEAIGDFSEENNSPPEVTNTVALDGNHADDLKVDAFIPFAELSLCRHLLSEGMGEDAACSAFDSEKVTLEEFRNMKQSLMRNNKLVVRIAGRYFPWDAAAPIVLGMISFSEEQVFEPKGMINVERVEQSAAPGGSWSIWPFSFRRTRTITAIQPVCESIVETSVSTPKELTHFKELDRERNKSRVKRIERKVRSLTPTSDELASLDLREGRNVVTFTFSTAIVGKQQVDCHIYLWRWNTRIVISDVDGTITKSDVLGQFMPLVGVDWSQNGVAHLFSAIKENGYQLLFLSARAISQAHITRQFLFNLKQDGKALPDGPVVISPDGLFPSLYREVIRRAPHEFKISCLEAIKDLFPHDSNPFYAGFGNRDTDELSYLKVGIPMGKIFIINPKGEVAVNRRVDTKSYTSLHALVHGMFPPILSSSEQEDYNAWNYWKMPLPDVDL

SEQ ID NO: 225801 - protein, 300 aa, Zea Mays
MDEYQLVRDCLCGQMYDSSPVDFVSDLGTRFLLDPSVLKMSEPPRVLSWMTKGIASGLDVLFINKFEEQRKDYWETLYSSVHFGPILILCSEDDQLATYSVVQNFGQHLLELGGDVSLIKWHSSPHVGHYKHHPEEYRAAVTELLKKASTLYASRRQLNGHAVGTSEHTDAPAPASTSKSNPHRDAASSVGRSRLIQAPADPAGQFPSIPSSMECHESSSQGPPQPELLSMPGVESSGLRCGVLGQALYGVCVPKDVEEGWDLAPPSASSDGMGRRVRAAAAPPRRGSFRPMRCVRRSRL

SEQ ID NO: 225802 - protein, 141 aa, Zea Mays
MVSDLLHDVPNTSEAVPSSGARHAEEACTSEGWGKIPFGPLRSDAIIVEPPIAGLPVISSAPSRIPRSIQRRPWRGCLPKAIHTSFSTTSTSEMSGLSSRHRTIPSSPAANGGSGKHCSATEPCCFDRTSSWPRGAPKWPT

SEQ ID NO: 225803 - protein, 59 aa, Zea Mays
MSGLSSRHRTITAAPPNHVASIERVVGLEERRSGQPDVPVQGTEGGGCSRPQGGLSTEG

SEQ ID NO: 225804 - protein, 53 aa, Zea Mays
MAWTVEQQGAEAVADLFQDLDVVGMPRVGPMRPCMQALGDFVWGELRRAVHLG

SEQ ID NO: 225805 - protein, 88 aa, Zea Mays
MDNVSAVVSCVGGFGSNSFMYKINGTANINAIRAAAEKGVKRFVYVSAADFGLVNYLLQGYYEGKRASEAELLSKFTYGGAPKYKTFD

SEQ ID NO: 225806 - protein, 75 aa, Zea Mays
MEAKQAAAAVDRLSSLPAELQDEILVRLDLRDAVRTSALSRTWRDLWKSLSVLSLSFPVGTQPSVVDIAGHRSEF

SEQ ID NO: 225807 - protein, 211 aa, Zea Mays
MLAKQTGLTRNQVSNWFINARVRLWKPMVEEIHNLEMRQVHKHPVLDKGQHVLHHQTQHSFESSGKPSDPSDSQLGQSSSITRNHNIPASQGFADELSEMSHSIQQGQVTFAYNGMSAPHHSLASSQHHQQAGPMSGIGGAGNGGVSLTLGLHQNNRVCIAEPLPASVPPNLAHRFGLEEVSDPYMMGSFGNQDRHFGKEIGGHLVHDFVG

SEQ ID NO: 225808 - protein, 228 aa, Zea Mays
MILSRKKSRIRRQGGATHVDIACDKDLVKLAMDLTNLPICVSSVDPSAFHSAVQAGAKMVEIGNYDSFYEMGIEFSSEQILKLTRETRKMLPDITLSVTVPHTLSLPDQMRLAELLEEEGADIIQTEGGKCSSPTKPGVLGLIEKATPTLAAAYSISRAVSIPVMCSSGLSSVTAPMAVTAGAAGVGVGSAINKLNDVVAMIAEVRSIAQAMELAPRIVSETLRTISY

SEQ ID NO: 225809 - protein, 204 aa, Zea Mays
MAAPGSLRLLQAPSFAAAKCQPVGGRASARRAPRPLFAVRASAADAANRDAVLKAFRENRALKIISGLQNFDRSSVASVVTAADKMRLAELLEEEGADIIQTEGGKCSSPTKPGVLGLIEKATPTLAAAYSISRAVSIPVMCSSGLSSVTAPMAVTAGAAGVGVGSAINKLNDVVAMIAEVRSIAQAMELAPRIVSETLRTISY

SEQ ID NO: 225810 - protein, 447 aa, Zea Mays
MDCLQKGCGLVFLKMTMKHSTSGTMRLVCQRSGYRGWVQKITFGLVAQLDLVDLALKFIMISILREDHQMCCLQDLGDDSRFIEFYNLVFMQYNKKDDGSLEPLKQMNIDTGMGLERMARILQKAHHTATHLLQSALKSVVGSETSQAGSLVAFDHLRFDFNFHRPLSEEELTTIEALINQWIGNAAHVETKVMALQDAKNAGAIAMFGEKYGEQVRVVEVPGISLELCGGTHVSNTAEIRGFKIISEQGIASGIRRIEAVAGDAFVDYVCARDNYMRRLCLSLKVKAEDVNSRVETILEELRATRNVASSLRSKIAVLKAASLASRATTVEPQNVRIVVENMGDVDADGLKSAAEYLIDTLKDPAAVILGSSPGDGKVSLVAAFSPAIVEMGLQAGKFVSGIAKLCGGGGGGKPNFAQAGGRKPENLPDALEKARAEIVARVSGSS

SEQ ID NO: 225811 - protein, 428 aa, Zea Mays
MEVVDLSPTSRPLSPLLSTAPARRLRLLPPRCVVGLRASPRTRGLGCVGGSLSRRHSFCKNGFFATSSSSASVEPATQELGTADAVEWSGDAIRRRFLEFYAARGHKILPSSSLVPGDPTVFLTIAGMLQFKPIFLGKEPRRVPRATTSQKCIRTNDIENVGRTARHQTFFEMLGNFSFGDYFKKEATTWAWELATKEYGLPAERLWISVFEDDNEAFNIWHNEVGVPKERIQRMGAEDNFWTSGATGPCGPCSEIYYDFYPERGSSDVDLGDDSRFIEFYNLVFMQYNKKDDGSLEPLKQMNIDTGMGLERMARILQKAHHTATHLLQSALKSVVGSETSQAGSLVAFDHLRFDFNFHRPLSEEELTTIEALINQWIGNAAHVETKVMALQDAKNAGAIAMFGEKYGEQSRRGSRDLIGTLWWDSRQ

SEQ ID NO: 225812 - protein, 300 aa, Zea Mays
MSTANRYQHIKSTKPVVGKARKLKDLMIKSDNRICADCGAPDPKWASANIGVFLCLKCGDVHRALGPDISKVLSVTLDDWSDSDIDSMVEVGGNSHANSIYEAFLPKDHLKPKPDSTMEYMTKIIRAKYETQDFLKPSLRISSRSSFKSTTSMKSVDINFSSTSRKDISKAQSTVKISDLNPVWNEVLKISVPRNYGPLKLLENYLDDDYLVFDCPGQIELFTHVPVLRNFVEHLKRKIFNVCAVYLLDSRFVSDVTKYISGCMASLSAMIQLELPHINILSKMDLISNKKDVEEFFFHS

SEQ ID NO: 225813 - protein, 189 aa, Zea Mays
MAELLRHPAVMSKVRAELRDALGSKPCPDESDVGRLPYLRAVVMESMRLHPPSPMLVPHLAMADGAEVGGFTVPAGTKVIINLWAIMRDPASWAEPEAFVPERFVGASDADFRGTDRLEFMPFGAGRRACPGAPMATRVVTLLLASMLHAFEWRLPEGMKPCDVDVRDWFGTSLNMVTPLKAVPVPSSR

SEQ ID NO: 225814 - protein, 1061 aa, Zea Mays
MPVYSIRGVNVDFPFDAYDCQITYMDRVIESLQQGKNALLESPTGTGKTLCLLCASLAWRRTFGEFLRVGRGGGGTKQLPYGSQPSASQQSEDSTSQKQQQSRYPVIIYASRTHSQLRQVIKELKATSYRPKMAVLGSREQMCIHDEVSKLHGRAQNNACHFLCKKRRCPHNNHVAEFIKNKPELGNEPFDIEDLINIGRHKGPCPYYISRELSKSVDILFAPYNYLIDPGNRRSLNGIPWDNAVLIFDEAHNLESICADAASFDLFPNNLTACIAEAHECIKLCSAKRSIENSADKQFDPENYAILKALLMALEKKIAELLIGSELGYTKAGSYIYDFLSELNITSDTSKKLIETIDCASLLLEEGNSAQTGPGVQAKAAVSRLESIRDMLDIIFRGGGQNHAKYYRFHVNESQQTHGDALKFLGKSSRTLSWWCFNPGLAMEEFLKLGVRSIILTSGTLSPLDSLAMELNLEFPVRLENPHVISSDQVWVGVVPVGPSGHALNSSYRTRNTIQYKQELGTAIVNFARIVPDGLLVFFPSYSMMDMCVDFWKNRNHSNSASENTIWQRICKHKQPVIEPRQSSNFQSAIEDYRAKLHDSSSGAIFFAVCRGKVSEGLDFADRAGRAVIVTGMPFATPTDAKVRLKREYLDKQGTPSNKNTKMLTGEEWYVQQAARAVNQAVGRVIRHRHDYGAIIYCDERFVWPNYQSQMSYWLRPHIKCYSKYGEVVQGLTRFFRDKASSDPLTLEPTDCNRGQQQGLFLEPIFKPAFGRSEGHVILSDFKFMQQLLCQTKLRDNMPYLLITPDCIAPPANKHMLKEKLSDLAASAQDECPQITLSGNSTMRRSNFMKLAQITPANRSTLTTKHNFVSTSTKHNLPEDQLSQDTNVDITVDLAIQGHLKEHTFKSLGLKKAKTMDRSKDAVVLDDVSSKLPQNIGSRALARYQCGGPTPESKKSTIATACGKNDGACEKTEGQESNSGPAFLKLVQEKLSPAEYTEFVEYMKALKLKTMHTKDSLEAITKLFSSPGRLPLLEGFRVFVAKNHLPLYEQLVRRHNNVSST

SEQ ID NO: 225815 - protein, 163 aa, Zea Mays
MGSEELETALMEMVEHDNRRMLSAKVEKLETEAYELRKAFSDKQEQEQVMLQILLRMEQEQKVAEDARIAAERDAAEQKHAAHLLQEKYEAAMTALSQMEKRAVMAETMLEATKQYQVGQVKANQSFTSRLTSTFQASRSLRLSPADFLSHSLSNSSLQTVHL

SEQ ID NO: 225816 - protein, 153 aa, Zea Mays
MGSEELETALMEMVEHDNRRMLSAKVEKLETEAYELRKAFSDKQEQEQVMLQILLRMEQEQKVAEDARIAAERDAAEQKHAAHLLQEKYEAAMTALSQMEKRAVMAETMLEATKQYQVGQVKANQSFTSRPCSCEDKSRTKPNCTYQENRPAF

SEQ ID NO: 225817 - protein, 1059 aa, Zea Mays
MDRATPRVCGRRGVSQAAVEAAPSSSRARRRDKAPAVVMDLGDDDCGGGGARKTVGGAAGRCEGSTKAPLPLLPPMMVPAGAVALRTRSRRRAMLAAAVVEEAPTKKKKKEGAIPDAAEAPRGHGSKAAATSMATSSHKRRAGTSRSTSRDKRRARSGRASEPARVGRARKRKRNELEAPARRERVKAPCVSESDDNSGRGDDASHDGDAEPRVGVAIGTDLVNGDHPAAKEVVEGAGDEDTGDGGNSGLASTADVFAEEMAPFEDDYDDEMLEEQLVGDVIRAYSNGRNFDSDGVDWEAEDEMEFNDDADNSDFMDDADDSDFMDDAYEGGNSKPIQNHAKLEIQDWVNQKVVLSGGRCEARGEGDLEEELDVGKEADEEDVEPKSEAAPGSDKRVLQLEILGSDEEIKVLENMSSAPSRKASVQSKLPTIPSCVAWRTRSSWGVNQDRLSYDTYFEELSDEPKEDDDDTEVELDEVEDDNNDDDSSDAYDKDDEEKEEEEEEAERRKLNNRICTSDEDMINITVPTSRYDMFKKKNSSRYDIEWVEDEDASVDMLQPVSFKKDSSWKPVAVGNDTFTEQQKRSRFTWELERRKKLKLEMKTNPLHERDLDSDPNSSGSDQIRKYGFKSDGSHKVDRKKKHTSPKSGKKPSSAIILKRQSLLKLLVDKMSGDKSLASFPFDQNPQLQFIFKEMHPLVFSFGDEDLVAADRPEQDVGLDMLWADFDFALESENIGTYYDDECQEGNQLDFSLAPVTPCSRGKHEFVIDDQIGIRCKYCSLVNLEIKFMFPSLVSVFAEKSAWPNDKGVKNTLMFHDLYEQGVNDTEQSQDIHQYGTVWNLIPGVISTMYEHQREAFEFMWTNLVGDIRLDEIKHGAKPDVVGGCVICHAPGTGKTRLAIVFIQTYMKVFPDCRPVIIAPRGMLFAWDEEFKKWNVDVPFHILNTTDYTGKEDREICKLIKKEHRTEKLTRLVKLLSWNKGHGILGISYGLYTKLTSEKPGCTEENKVKVTNMIGKQKRITYPSWSSLQKTSSIMLGTCYLKLKWSTVLSLSQKIKFWRR

SEQ ID NO: 225818 - protein, 244 aa, Zea Mays
MKNFFHRNEDQRKSFRFPARAAPPSSSFLSSSLPSQNPNPSCGRRRRLRAQPMSDSEASPPPTPAAATPAALVETSPSSARKEELLPVEEKISELSESQSELLGRLRGLKEDLLSWRSNLDSQVTKYKVELSDIKSALNNEIEQLRSDFQELRTTLKKQQEDVSLSLKNLGLQDATENDGNKGNGDGTNEVLSANLGNLKLDGSSENYDESRESKEDKVENTDTAGDGIVDKATKETSSTDEQF

SEQ ID NO: 225819 - protein, 454 aa, Zea Mays
MSDLASSCKDKLAYFRIKELKDILNQLGLPKQGKKQDLVDRVLAILSDEQGQHHHGWGRKNALTREAVAKVVDDTYRKMQVCAPDLPSRSHSGSDFSHFRPKEEAPDFYHVDTKVRCLCNSTLLNDNMIKCEDGKCQVWQHITCVLIPDKPTEGAGPDIPPHFYCELCRLKRADPFWVTTGNPLLPVKFMSSGVGNDGASVPQIVEKTFQLSRADRETVQRQEYDLQVWCILINDKVQFRMQWPQYAELQVNGIPVRVMTRPGSQLLGINGRDDGPLVTTCSREGINKISLSRVDARTFCFGVRIVRRRTVPQVLNLIPKEGEGESFEDALARVRRCLGGGGATDNADSDSDLEVVTESVTVNLRCPNSGSRMRIAGRFKPCVHMGCFDLETFVELNQRSRKWQCPICLKNYSLENLMIDPYFNRITSLVGFHLTFYAFRQNLLCELISVFILM

SEQ ID NO: 225820 - protein, 238 aa, Zea Mays
MGEAEVEKPKEAAEEEKKKEDKPMDATAAAEDKPKDAAAAEDKPKDGEEKKDDAPPPPPPPPPPEEVEMRVYMHCEGCARKVKKILKRFDAAGDRRGAEGAHALRGLRPGDQEEDPQDERRAICRARPQGVGGGSEGRVRGVQAGGVRVQAHRQARGRRQVRAGPGATAGERRRRQHGGQGGGEGAGGGEGEGRRRRWRWRGEEEGRGQGGREEGRREAGGGEGGRRWRREGGGKGGR

SEQ ID NO: 225821 - protein, 1125 aa, Zea Mays
MAPAFSVPDAEDLPARRSDASDVAGNVWDLATLPTPPAGGGREIYIYRNTFNLVPRSIGGRARGLRSLKFFGNDVEVLPADSGDELDGLESLQVKVSAPRVSGAPLRRMQALKELELSMVPPRPSSCSILAEVARLKCLTKLTICHFSIRYLPPEIGSLKKLQELDLSFNKLKNFPNCIIELSALKFLKVTNNKLVDVPSGISSLRCLESLDLSNNRLTSLGSVKLISMLTLQYLNLQFNRLSHSYVIPSWICCDMRGNVENTMKGCKLKYTGVATMNSLAEPSTSSHACDSALLCVQSESSPNLKHHAPHKIKKGWRRRDCLQQRARQERLESSRSKLNEKYIDEMAVNMAEDECPSSLHDMENKLGIRTIDEETSVQDSLKETSSISEDLFSIVDDDLDGLTKDCGTMVQDHYDEEKPGFNMRGYNDDNSCISGEPACFSRSRVCSVEKELDDTASSVHDVGEIARDNSSVTPKFALKSKRHPDMDSNPKPSKCPRPIDERSKLSYKYSVESFCSIDDHLPDGFYDAGRDMPFMSLEEYERSLGLYAREVILLDREQDEELDTIASSAQLLLSSLTRPSSCEMEEDAGHDLLRASVLALFVSDCFGGCDRSASLGRTRRAIVSLRKEQPFVCTCSAGNLGDNNEAKQTNILSGHFDFAGLCNRSIHLIKERRNSGIVPIGSLQLGVCRHRAVLMKYLCDRADPPIPCELVRGHLDYTPHAWNIVPVKKRNGWVRMIVDACYPTNIKEETDPEYFCRYIPLSRLQIVLDDEGYTPRCSFPSVSSCKEIEVTPSSSVYHCKIGAVDAAAKIRYLDTRRVSNDEVKLFEYKLLGEVRMLGALRKHRSIVDIYGHQLSSKWVQVDGDKEYRILQSIILMEYVNGGSLKGYLTKLLKEGKKCVPIDLSVYIAREVACALLEMHKKLVIHRDIKSENVLIDLDPKRNAGAPIVKLSDFDRSVPLYSLSHTCCISQLGTHPPDVCVGTPCWMAPEVVKAMHEKHHYGLEIDIWSFGCFLLEMLTLQMPYQGLSDTEIYDLILRKKQRPRLTQELEAFWTMDEPATRLKLGITSDAHADKLRHLIDLFYQCTRGHASRRPKAVQIYNSLCSLPTCYDMRCCQAEHEKWDQG

SEQ ID NO: 225822 - protein, 500 aa, Zea Mays
MAAPPRRSLLVLLAGILVFGSLTTLATAIYEDQVGLADWHQKYIGKVKQAVYHSQKSGRRRVVVLTEENVISSLDLRSGDIFWRHVIDKNDPLDQLSLSLGKYVLTLSLGGTILRAWNLPDGHMIWETNLRISTASNPQLHVMSNNKVANDNLVLVSAGRWIYAVSSTDGAILWEKEFSLDGLEIKRILQSPENGIVYALGLAGSSKLALYHLSAKTGEILKDIQESLPGGLLGETVLVSDNVLVALDKARSSLLVIEFKGERISYNKVHVSDLVQDLSGSLELQSLSNGVISLQTSSSISLLKLKGTDGLEVLQRFDQPAAVSDSLTITEKEAAFAVVQHLGSEIEFIVKSTSDLSSEIIKEKLVIDQNRGNVEKVFLNSYIRTDRSHGFRALVVMEDHSLLLIQQGEVVWSREDGLASIVDVTTSELPVEKDGVSVADVEHNLFEWLKIFRQMLLKGIHYRSHVISMWVMSTALVRRSYGSSSFLLILKGLLSLKHER

SEQ ID NO: 225823 - protein, 145 aa, Zea Mays
MVAALTNESATSKSVYFAHCTSEMIFITHLLTEQPEKLAGPLLADTYVTLLKGRNAWYGQMLAKGELSPDMGDSIKGKGMIQGISAVGAFFELLSQPSLSVQHPEENKQVAPAELCPILKRLYRILIKRPDLCAGSSQQGTFFKP

SEQ ID NO: 225824 - protein, 1016 aa, Zea Mays
MALSLSSAAWEGSNRLVTMRLSGTIQQQDLVILIDSGSSHSFLFDRLRPLLAGVQELAQPFSVQVANGQTLSSQYYIPAAQWSMAGYWFTADLRFLPLPALDLVVGMDWLQRFSPMHVDWANKWLVIPYNGSSVCLQGLQSSFPSGSVVQLLLSAEIQLNSVQEESQLEVHPKVQAVLQQFSDVFADPVGLPPSRQCDHAIPLVPGAHPFNVKPYRYPPALKDEIETQVRDMLSQGVIQKSHSLFASPVLLVKKKDQTWRFCIDYRYLNAITVKSSYPVPIFDQLMDELSSAQWFSKLDLKAGYHQICLVPGEEPKTAFQTHLGHFEFRVMAFGLTGAPNTFLGAMNDTLAPVLRRCALVFFDDILIYSPTFESHLQHLSEVLTLLKQDHWKIKLSKCAFAQTTIAYLGHIISAHGVATDPAKLQIIQQWSAPTNTKELRSFLGLAGFYRKFVRHFSIIAKPLTDLLKKNSLFVWTSDHQSAFETLMQALISAPVLALPDFNQPFCIYTDACSTGVGAVLMQKGHPLAFLSKALGPKNQGLSTYEKEYLAIVIAIAQWRSYLQLAEFHIYTDHQSLAQLNEQRLHTVWQQKVYTKLAGLQYKIVYKKGDNAAADALSRYSHQPDQLLHISHCTPTWVQEIVEGYQHDQQAQSLLSQLALDPSALAATYTLKDGLIRHKGRLWLGKNEVLQQKVIAAFHDSALGGHSGVPVTYRRVKQLFSWKGMKKTVHQFVQSCPICQQAKPDRAKYPGLLAPLPIPPHAWHSISMDFIEGLPKSGSWNCILVVVDRFSKYSHFLALAHPFTAAGVAKVFLDNIYKLHGMPASIVSDRDRIFTSQFWQQLFTLTRTQLCMSSAYHPQSDGQTERVNQCIETYLRCFVHACPKKCCHWLSVAEFWYNTNYHSAIGRSPFEVLYGHAARHFGIDSVSSVAVEDLRQWLTDREIISKLIHQHLTRAQSRMKKQADKKRSERSFQFARIKSSHFDSSALTQCCNGWAPWRTSFSYRRPLLYIQYFMFPN

SEQ ID NO: 225825 - protein, 113 aa, Zea Mays
MGDSHCSDSDHNLVGSRVLLLGFSVLLKPGHVAFEGIIFLSFLMMLSCTTVGILLLVYYPVADSLALRDIGQRDIAEMVPYDDYYYEGTSLVANQSFREIERNSDTSTKPGSI

SEQ ID NO: 225826 - protein, 568 aa, Zea Mays
MATEVKQTYFSWSQGESTERDGPQGVSVSQTLDHGSISFGRFELESLSWEKWSVFTNDRRNEEFGKFNGLVAQKKAYFEEYYKKIRELKASQQQNQQTELILEYSGDGSDSSQTAEEEQGADLETPTGSGAAVDVYVEEVPCETTSEHGLQCYNDQGNENFDTEFSSSNLSSSGGFLQQTDHDVRVPVRGDNSTSKLYAAPQNASSVHDGTRKTYEAARTPRRIIEKDSRLRHSPKIIPKSVKALSQSAMDYTFTSERPGSVKPNTTTSQKAKPVQRPNAASQKMSASTERSKLTGLRRPSSAGAQRPSTGERHAIARENSQLPVVVSTPRRPSTAERRPVTRDRAEKQANVTTPRRPSTSERLPIKRETAAKHNDISAVRRPSTGERRAFTRDGVLRTDVKTPSKARATVAHPMSEMTTVGNTRKAITPNAARSSKLETKSNNYRLKGPSALDSHSTRSNRMDLQVSGKQKSSSVNLPPRKIFSSTAGEPSVGTISRSKKKEATVQSRASTSKRTTPLQTGNLKARGPNPPAPPPPPRRPSRTTTKPSAGASSIGGRKPKASAPQWH

SEQ ID NO: 225827 - protein, 630 aa, Zea Mays
MTLLSYLNELREPTEIPLCHIPEAVIKTASDWISQRSYDALGDFVLWCIDSIMSELSGPSAGPKGSKKVAQQSPRAQVAIFVVLAMTLRRKPDVLVNVMPKIMGNNKYLGQEKLPIIVWFIAQASQGDLVTGMFCWAHFLFPTLCAKPSGNPLARDLVLQLLERILSVTKARSILLNGAVRKGERLVPPVSFDLFMRATFPVSGARVKATERFEVAYRTIKELALAGSPGSKTVKQASQQLLPLCAKAMQENNAELTREAVDVFIWCLTQNAESYKQWERIYPENTEASVAVLSKIVIDWKDVSPKLSSEALKATVKNLKAKNEAALESATDAGKQASIKKQTSTARLEQGSEQLLGGRPGPALGVLATVAECSVEPAAQTTKGPDSNGSSSPLPPVLPSVCFPPRPRAMAPCASPSALALSASTRVSSFPLTLRPRPRPEARVPRAPGGAQLRPATACSWPRPLLPELAPAFPRAGARSAGRPQPLFRPRAMMTTSQIASCAFTVGTVAVLPFYTLMVVAPNADITKRTVESSAPYVALGLLYAYLLYLSWTPDTLRAMFASKYWLPELPGIVRMFASEMTVASAWIHLLAVDLFAARSTTTVSRTTSRPGIRSRCACSSARSGSWLMW

SEQ ID NO: 225828 - protein, 278 aa, Zea Mays
MTEMVVAARTPAPAAGRWGAAPPQELLERLKDYGQEGAFAFWDELAPEERDRLIRDIESLDLPRIDRIVRCSLRSQGAPIPTFEPVPESSVSTVDDRTPEDKERWWRRGLRAISEGKLAVVLLAGGQGTRLGSSDPKGCFSIGLPSRKSLFQLQAERILCIQKLAAQCTDAPGSTVQIHWYIMTSPFTDEVTRKFFETHRYFGLEPNQVTFFQQGTIPCVSHDGRFIMETPYKVAKAPDGNGGVYAALKSKRLLDDMAAKGVKYVDCYGVDNVLIQHS

SEQ ID NO: 225829 - protein, 311 aa, Zea Mays
MTSPFTDEVTRKFFETHRYFGLEPNQVTFFQQGTIPCVSHDGRFIMETPYKVAKAPDGNGGVYAALKSKRLLDDMAAKGVKYVDCYGVDNVLVRVADPTFLGYFIDRGVSAAAKVVRKAYPQEKVGVFVQRGKGGPLSVVEYSEMDAAMTTEINQTTGRLRYCWSNICLHMFTLDFLNQVTNSLEKDSIYHLAEKRIPSVHGYTSGLKLEQFIFDVFNYSPSTALFEVLREEEFAPVKNANGATYDTPDSARLMLLRLHSRWVVAAGGFLTHSVPLYMTGVEVSPLCSYAGENLEAICSGRTFHAPSEISF

SEQ ID NO: 225830 - protein, 110 aa, Zea Mays
MPLPSTTSTYSSTSAALRSHSSTSPPISTPGHPALIGRHRPFLVTHRAAERWLHHMQQALDATESIDVDSKTKMMNFFRHTAYFLVAGNEMTRQQGHGVACKHATSKPAE

SEQ ID NO: 225831 - protein, 468 aa, Zea Mays
MLVRALDGKGVVYQARNAKEVSMEMINMHEKQQFMDDKKLIAIISEAGSAGVSLHADRRAKNQRRRVHITLELPWSADRAIQQFGRTHRSNQTSAPQYRLLFTNLGGEKRFASIVAKRLESLGALTQGDRRAGPSLSAFNYDSNYGKKALTMMYRGIMEQDSFPVVPPGCSDDETSIQEFINEAKAALVSVGIIRDAFICNGKDPGKLSGRIVDSDMHDVARFLNRLLGLSPNIQNRLFDLFTSILDIVLHNARIEGQLDSGIVDIKAKNVEMTESPRTVHTDSLSGALTVLFTFTIDRGVTWESAKTMLEEREKFGAGTSIDGFYESRREWMGRRHFILSLEGSTEGMYKIIRPAIGEALREMPSSELKSKYRKVSSIDKCMHGSKCKIGSYCTVGRRLQELNILGGLILPVWGTIEKALAKQERLIHKRIRVVRLVTTNDSQRIVGLLIPNSAVESVLTGLQWVGH

SEQ ID NO: 225832 - protein, 190 aa, Zea Mays
MAASSSCKVIDSHLHVWATPQQAKEEYPYFPGQEPTLRGDADFLLEGVGPYIQEIEELCRDYPATTVILDHMAFCKPPTNDEEEKAFSSFLSLSRFPQVYVKYSALFRITREAYPYEDTAQLLSSVISHYGASRVMWGSDFPYVVPECGYKGGREAISHVASKIPVSQSDLEWILGKTVSQLFQGAWVTP

SEQ ID NO: 225833 - protein, 102 aa, Zea Mays
MTVPDAESRFHVLAVDDSLVDRKLIEMLLKTSSYQVTTVDSGSKALELLGLRDASSPSPSSPDHQEIDVNLIITDYCMPGMTGYDLLKRVKSEISSLLAQIA

SEQ ID NO: 225834 - protein, 169 aa, Zea Mays
MAAASQLLSLFFLLLLPACDAIYCDEDDCYDLLGVKQDANASDIKKAYYKLSLKHHPDKNPDPESRKLFVKIANAYEILKDESTRAQYDFAIEHPEEVFYNTAQYYRAYYGHKTDPRAVLIGLLLIVSAFQYINQLTRYNQACFSDESCLIESPSYGFEAASLHMCRRP

SEQ ID NO: 225835 - protein, 377 aa, Zea Mays
MDRHGSARLATPEDVFTDFRARRDGILKALTTDVEKFYKLCDPEYKDNLCLYGLPNKTWEVNVPAAEIPPELPEPAEGINVTRDSMPKEDWLSFVAVHSDAWLVAVAFHFGALHGFDKDARRQLHIMINNHPTVYEVVIGSGEKQPKAHNTNYETKSSSIKEPSSSSKLAEQPLPKKERQIIKEDGGDKDEAFLCGTCGGMYSENGVFWIGCDICDKWYHGDCVRITPAEAKHIDQYGCPACSNKRNIERRLHMMINNHATVSEVVTGSGEKQPKACNTNYETKSSSIKEPGSSSRLAEQPLPKKERQIIKEDGGGKDQAFQCGTCGGMYSENGVFWIGCDICDKWYHGDCVRITPVEAKHIDQYSCPACSNKRSRE

SEQ ID NO: 225836 - protein, 387 aa, Zea Mays
MCPTRELANQLAAEARKLLKYHRSLGVQVVIGGTRLPQEQRSMQANPCQILVATPGRLKDHLENTPGFSTRIRGVKVLVLDEADRLLDMGFRRDIEKIITFIPKDRQTLLFSATVSEEIHQISHLAMRKDYDFINAVQEGDEETHAQVNQTYMVAPLGLHLPILYDVLKKHVAEDAEYKVIVFCTTAMVTRLVAEVLSQLKLNIREIHSRKTQSARTKVSDEFRKSKGLILVSSDVSARGVDYPDVTLVMQVGLPADREQYIHRLGRTGRKGKEGQGILLLAPWEMHFLSTVNDLSISEAATPSVDSSIQAAVKDAVRRVEMKSKESAYQAWLGYYNSHKATNRDKARLVMLAEEFSQSIGLAVPPAIPKQILRKMGLSNVPGLRSS

SEQ ID NO: 225837 - protein, 434 aa, Zea Mays
MMATGRSLAGVYSARATRPMPLRAGARAPCAGAAAAEPAAEHVRRLVAEFDPAVPLDSAVTPPSGWYTDPDFLQLEIDSVFFRGWQAVGHIWQVKNPNDFFTGRLGNVEFVVCRDANGKLHAFHNVCRHHASLLACGSGHKTCFQCPYHGWTYGLDGTLLKATRISGIKNFNKNDFGLIPIKVATWGPFVLIRFDDESTEDNVYDTVGNEWLGSASDLLGTNGIDTSLPHICRREYIINCNWKVFCDNYLDGGYHVPYAHGDLASGLQLQSYETLTYERVSVQRCESAPAEPDDFDRLGTKALYAFVYPNFMINRYGPWMDTNLAVPLDSTRCKVVFDYFLDKSLLDDQCFIKKSLEDSEQVQIEDIALCEGVQRGLESPAYSVGRYAPSVEMAMHHFHRLMHANLRHCMNTVLYCNLVNSATFQLHKKHVCWL

SEQ ID NO: 225838 - protein, 95 aa, Zea Mays
MKDRFVAVGLGPRQLAVMSAFLGPDQAATEGRLIADPDCRPWVEKYQRSRETVSRTDYEVDLITTLTKLSSLGQKINYEAYTYPKQKIDLGKLKL

SEQ ID NO: 225839 - protein, 278 aa, Zea Mays
MAGANFLSTAALVARGVAACSSISTPTRRHPQIRVCCRADVEAMEAYAHEERLRFRRRDFIGTCVGTAIGLEMIDGSTSFSGVATAADLIERRQRSEFQSKIKDTLYVAIKAKPELVPSLLTMALNDAMTYDKTTKTGGANGSIRLETSRPENSGLSSALDLLTEAKKEIDSFSKGGPISFADLIQFAAQSALKRSFLDAAIAKCGGNEEKGRTLYSAYGSNGQWGLFDRTFGRADAQEADPEGRVPDWSKASVQEMKDSLLLCQRSLDLTRLLRRDD

SEQ ID NO: 225840 - protein, 483 aa, Zea Mays
MLKERVCVQVLVGVRFLRQWPFIGRVRVCFVEPPYFQMTVKPLFGHGLDVTELPGISGWLDRMLDVAFGQTLVEPNMLVIDLEKFASESTDNWFSVDEKPPIAYARVEILEGADMKPSDPNGLADPYVKGQLGPYRFRTKIHKKTLDPKWLEEFKIPITSWEALNLLHLQVRDKDPIFDDALGDCSISINKLRGGIRHDIWIALKNIKTGRIHVAVTVLEEENEKVSNDEEEQCGIHKVDKASTPRSSFSSRTNHESECSDEFRKMSDEFEPVDIEGSEKPDVWVHRPGSYVTSTWEPRKGRARCQDSRIHRENDSCSDSPRSSVSGSHRSDSSTEEPTSSKSHRHLQKVKKGLGKLAGAVLHRSPKENDDEASPCVTPHQNIRPVGESRVSVTYVVDQDPAGVDGSGSRRDDHQQSPEREELDSPSKRHLRKKAVHMVKHAGKTAHNLKSMFSKKGLDKSKEEHRSDEECDEEGDVVAARRV

SEQ ID NO: 225841 - protein, 153 aa, Zea Mays
MDAKLRDEEARRLRAAAKAKGEQKRTRPRDRSRRAGPAPEANAEIQANLDRRRMITHANAKSKSEKFPPPHQDGGTGNPLGSYHHMEPMFEHQDASFSTVVPIEKGTSQTWSGPLFDPAALGQSRRKKQTTLDAKAAAYSKQLQKEKGGIRAR

SEQ ID NO: 225842 - protein, 472 aa, Zea Mays
MRAATPKHPSFRISRFLSVQRFLKRCISHISKAFHCSRDVPQSSFNRLLQEEFFLPGEVILEQGSAVDQLYFVCHGALEGVGIGEDGQEETLLMLEPESSFGEISILCNIPQPYTVRVCELCRLLRLDKQSFTNILEIYFVDGRRILSNLSESEYGGRVKQLESDITFHIGKQEAELTLRVNSAAFYGDLHQLKSLIRAGADPKNTDYDGRSPLHLAASRGYEDVVQFLINEGVDIDLTDQFGNTPLLEAVKQGHERVAALLFAKGAKLSLKNAGSHLCTAVAKGDSDFIRRALAYGADPNCRDYDHRTPLHIAAAEGLYLIAKMLVEAGASVFTTDRWGTTPLDEARKCGGRTLGALLEEARASELSMFPERGEEVRDKVHPRRCSVFPYHPWRASAGEERRAEGVVLWIPHTIESLVASAQEKLGLPGPAASRLRLLCEDGARVLDVDMVNDGQKLYLVGGEDGDQEGGQ

SEQ ID NO: 225843 - protein, 541 aa, Zea Mays
MIFIMIYVSFDMILGAYLIGNMTALIVKGSRTERFRDKMKEVIRYMNRNKLGKEIREQIKGHLRLQYESSYTEASVLQDIPISIRAKISQTLYKPYIESIPLFKGCSAEFIQQIVIRLQEEFFLPGEVILEQGSAVDQLYFVCHGALEGVGIGEDGQEETLLMLEPESSFGEISILCNIPQPYTVRVCELCRLLRLDKQSFTNILEIYFVDGRRILSNLSESEYGGRVKQLESDITFHIGKQEAELTLRVNSAAFYGDLHQLKSLIRAGADPKNTDYDGRSPLHLAASRGYEDVVQFLINEGVDIDLTDQFGNTPLLEAVKQGHERVAALLFAKGAKLSLKNAGSHLCTAVAKGDSDFIRRALAYGADPNCRDYDHRTPLHIAAAEGLYLIAKMLVEAGASVFTTDRWGTTPLDEARKCGGRTLGALLEEARASELSMFPERGEEVRDKVHPRRCSVFPYHPWRASAGEERRAEGVVLWIPHTIESLVASAQEKLGLPGPAASRLRLLCEDGARVLDVDMVNDGQKLYLVGGEDGDQEGGQ

SEQ ID NO: 225844 - protein, 268 aa, Zea Mays
MLTGLLGNLSLLSYFAKKKETEAVIVQTLGVISTYAVLVQLAMAESMPVPQFVATSVVVAAGLILNFLNYFGWIPGTLLLLWEDFITVGGLAVLPQVMWSTFVPFIPNSVLPGIISGSLAVAAVAMARMGKLSNAGVKFVGSLSGWTATLLFMWMPVAQMWTNYLNPSNIKGLSAFSMLLAMLGNGLMIPRAVFIRDLMWFTGSAWASVLQGWGNLACMYCFNSISGEVFFATSAGLLLWLGFTLWRDAIAYGNSSPFSSLKELFFGK

SEQ ID NO: 225845 - protein, 286 aa, Zea Mays
MFWKDSGSRSSSGSGRDQNGVGPFGQVRVLIVGDSGVGKSSLVHLILKSSAIARPSQTVGCTVGIKHVTYGSAGGSSNNISDAERNFFVELWDVSGHERYKACRSIFYTQINGVIFVYDLSQRKTKTNLNKWAVEVAETGTFSAPLGSGGPGGLPVPYLVIANKVDIVPRDGARASRGNLVDLARQWAEKQGLLRCSEELPLTESFPGNSGLVSAAKQARYDKEAVIKFFRLLIRRRYFSNEPPAPSPWSLAPREDTILPMETLGDGADSFQRKSRFSGEILVEIL

SEQ ID NO: 225846 - protein, 916 aa, Zea Mays
MEESGGSCGKREDAAPPWRPSDSTAFGRFAAAASPPEASPSASANGAAARVSSLHGVRRKPSVARLTAGIIQTYLQCDPEFKYSEVLNPKRFLTNPSTPAHNDGLDNANWDLILYVNLELVNKMSNRRFIVKEMLGQGTFGQVVKCWDTETNDYVAVKVIKNQPAFYHQAIMEVSLLRTLNQKFDPDDQHNIVRMLDYLSFQNHLCIAFEMLGQNLYELLKRNHLRGLKLKYVQAFSKQILDAMVVMREAGIIHCDLKPENILLAPSVTTAAEVKVIDFGSACLEGKTVYSYIQSRYYRSPEVLLGYPYTTAIDMWSFGCIVAELFLGLPLFPGASEYDVLQRMMKILGGQPPDELLREAKNTARFFKHVGSIYPGNEAPTGLCSAYKSLSEEDVEVRDSKKPQMGKWYFPHLKLDKLICTYPWNNSELTETEKMDRLGLVDFLKGLLEFDPNKRWSPLQALYHPFITGKSFTGPYEPVPETTRIPVVRAAAIDHNPGGGHWLHSGLSPQVGSVNRYLPSNNAYPPKVPFSYGSSYGSFGSHGSYTANAGFGNSYGSIGDVNAINMYYSPLSSSGLTQIGSSPDVRLRMLLPHDRGIRLSPGSLGPMSLGASPSQFTPPNYQMQIPANSVGKHGSGSPASGGIHGSPLGKSAGVGPYNMRRNLPMPPHDYVSQHGHGRCGDGVSFSHFDACARGHTGHSHSAAGPSSYHSGWRPQIGSRSGISLEASSSHVLSQAPSQSFDFSPSSALDPANWDPNYSDESLLQDNSLSAELSSNLHFGDATGQGSGSIRSANFQGHVFATSNPVPTNQRADQLFHVSSQGLSAHSSVPVNYGGYNPPNYPPQNLRPRRGQPILHQRYNQATSSPMRPMGSHHSGQPAWPSFGMGDGVPWGGTGGHSFTTSGLSSSLARKDYGSIF

SEQ ID NO: 225847 - protein, 271 aa, Zea Mays
MVVMREAGIIHCDLKPENILLAPSVTTAAEVKVIDFGSACLEGKTVYSYIQSRYYRSPEVLLGYPYTTAIDMWSFGCIVAELFLGLPLFPGASEYDVLQRMMKILGGQPPDELLREAKNTARFFKHVGSIYPGNEAPTGLCSAYKSLSEEDVEVRDSKKPQMGKWYFPHLKLDKLICTYPWNNSELTEKMDRLGLVDFLKGLLEFDPNKRWSPLQALYHPFITGKSFTGPYEPVPETTRIPVVRAAAIDHNPGGGHWLHSGLSPQEWAHTT

SEQ ID NO: 225848 - protein, 249 aa, Zea Mays
MLDYLSFQNHLCIAFEMLGQNLYELLKRNHLRGLKLKYVQAFSKQILDAMVVMREAGIIHCDLKPENILLAPSVTTAAEVKVIDFGSACLEGKTVYSYIQSRYYRSPEVLLGYPYTTAIDMWSFGCIVAELFLGLPLFPGASEYDVLQRMMKILGGQPPDELLREAKNTARFFKHVGSIYPGNEAPTGLCSAYKSLSEEDVEVRDSKKPQMGKWYFPHLKLDKLICTYPWNNSELTAIHVGIQTPCSTF

SEQ ID NO: 225849 - protein, 306 aa, Zea Mays
MLGQNLYELLKRNHLRGLKLKYVQAFSKQILDAMVVMREAGIIHCDLKPENILLAPSVTTAAEVKVIDFGSACLEGKTVYSYIQSRYYRSPEVLLGYPYTTAIDMWSFGCIVAELFLGLPLFPGASEYDVLQRMMKILGGQPPDELLREAKNTARFFKHVGSIYPGNEAPTGLCSAYKSLSEEDVEVRDSKKPQMGKWYFPHLKLDKLICTYPWNNSELTETEKMDRLGLVDFLKGLLEFDPNKRWSPLQALYHPFITGKSFTGPYEPVPETTRIPVVRAAAIDHNPGGGHWLHSGLSPQEWAHTT

SEQ ID NO: 225850 - protein, 75 aa, Zea Mays
MLALLYAGQVEQDPAPLYRAAKELINMQMENGEFPQQEIVGNFNSSLFFNYPNYRNLFPIWALGEFRRRLVAKKG

SEQ ID NO: 225851 - protein, 703 aa, Zea Mays
MWRLKIGERPSNPLLRSPNGFLGREVWEFDPAAGTPEERAEVDRLRQEYTRNRFTRRQCSDLLMRMQYAKQNLHNTNLPAIKIDQDSDVTEETILITLRRALNQYSSLQGPAGHWPGDYGGISFILPLMIFALHVTRSMDEVLSIEHIREICRYIYNMQNEDGGWGTHTLGPSSMFGTCVNYATLRILGEVLDGENDALSKGRSWILSHGSATAAPQWAKIYLSMIGVYDWAGNNAIIPELWMLPHFLPIHPGRFWCFCRMVYMPMAYIYGKKFVGPITTTILEIRNELYNIPYNKINWNKACNSCAKEDLIYEPSWLQSIAMAYLNKFIEPLSNLWPMNKLRERAMSDLMEHIHYEDETSNYVGLCPINKALNMICCWIEKPNSNEFRQHLPRIHDFLWLGEDGMKSKVYVGCHSWETALIVQAFCSTGLTEEFCSTLQKAHQFLKNAQVIKNIPDYKSYYRERTKGSWTLSNGENFWPIADTTAEALKAILLLSNIPSELVGDPIKQERLYDAVDCLLSFVNKDGTLSSAECKRTTSWVEFINPSESFRNIIVDYPYPECTSSLIQALVLFRGKHPIYRRDEIDKIIKSGASFIEKVQRKDGSWYGSWAVCFTYATFFAIKGLVAAGRTYRNSLAIRKACNFLLSKQLGTGGWGENYLGCQIEEYVDSGSPHGVNTAQAMLALLYAGSNKTQRHYTVLQKN

SEQ ID NO: 225852 - protein, 329 aa, Zea Mays
MAYVPLSSGAYSRKKPTCHKYCASVELTWKPCRLVGYRDFRLKELACQQLAHGVDEQYPVKSSTVEQAQDRQPCLPQGDAYFAGLSKKEIERRRKIGAANKGKVPWTKGRKWSEEHKKVIRQRTAEALRDPKIRKKMLGHRQLHRQTSKDKISAALRTVWERRIVSVRSRQKVLQIWSNSIAEAAKNGGHGQDMLGWDSYERIKSEMVSTFLWIKERGRMVKKLERAVAKIAAKRLQVVRRREEQATRMKKLKPDCQTLLQNADRQPARVVVSARPKLKERLAKWHGRKKELETVISSRARKRGLRNPPRRQMAAESLEALSTSAAGAP

SEQ ID NO: 225853 - protein, 410 aa, Zea Mays
MHPKLFPENHVSRPDGNGSASFHPLPLPPASKGKLLGSGTFGCVYEATNRHTGALCAMKEVNIIPDDAKSVESLKQLEQEIKFLSQFKHENIVQYYGSETIEDRFYIYLEYVHPGSIHKYVHQHCGSLTEAVIRNFTRHILKGLAFLHSQKIMHRDIKGANLLVDINGVVKLADFGMAKHLSTAAPNLSLKGTPYWMAPEVVRATLDKSAGYDLAVDIWSLGCTIIEMFTGKPPWSGLEGPAAMFKVLRTDPPIPDNLSPEGKDFLRCCFKRNPTERPTANKLLEHPFIQTLNHYSPHSVVHSFSGIKSPDTVHSSARDKVPWKSDSYMRGKHANGETSSARSSESLAYRLMTPLPNLGTNSLSPPPLSSASSSGSAAHTPNSMHFSVPYHQPSPLPKPNGKEAINLVSH

SEQ ID NO: 225854 - protein, 692 aa, Zea Mays
MLNSILERISPDVTPEDKSYSLPWIPDFVPKIGLGIISNGFFSCSTTVAGRNAEHQPFCCASLVQGLCYMRCHGNVDVSLSSISCLQRLVQLSWSVDRVIQGATKCCSECFNESGTGEAGKLLAEGISSLWHNDLLHLLTSLLPMISSQWSISQNIEMFGRGGPAPGVGFGWGTCGGGFWSLKCLLAQLDSQLVVELIKCFSSVQGSPIILDEGVKLDNVTNTVVTASNWISSTLGLSLIAGPGQIYMLEKVFDMIFEPSILKYLKSSIHKFTSDMELLKPFEWDLNEDEYMLFSSVLKSHFRSRWLAIKKKHSDKYAGDNSSTKISKTPEILETIQEETELSEAVNQPCNTLMVEWAHQRLPLPIHWILSAVCCIDDPKGTLSTSANYILDVSRAGLIFLLGLEAISATPCLHAPLIWKIHALSVSIRSSMHLLQEDRSRDIFCALQELYGLHLNRLYQKFCKPNSIEEVKGVVVGTSEEAMEISSLEILRFQEKIHGSYTTFVESLVDQFAAVSYGDFVFGRQVAIYLHRKAEPAVRLAAWNALSSAYVLELLPPLDNCIGNAPGYLEPLEDDEKILESYAKSWTSGVLDKALQRDSMAFTLAKHHLSGFVFQSSDSGTMLRKKLVKSLIRCYAQKRHHEVMLKCFVQQGIAQDSKSSELDRRFEILKDACEMNSNLVGEVQRLKACLGQ

SEQ ID NO: 225855 - protein, 510 aa, Zea Mays
MRSSLLPESPVHQQKLLAPPPPPSSCSTDFASGSAKFRRMDIDASASVMCQLLSPEGDPLGSALYLPQNVGPPQLQEIVNQLLHNEEKLPYAFYVGDEELSVYLGAYMRQKNANVEVTLRIVCQPQALFRIRPVNRCSATIAGHTEAVIAVSFSPDGKSLASGSGDTTVRFWDLSTQTPLFTCKGHKNWVLCIAWSPDGKHLVSGSKSGELILWDPKTGNQLGTPLMGHRKWITAVSWEPVHLQSPCRRFVSASKDGDARIWDITTRKCVISLTGHTSSVTCVKWGGDGLIYTGSQDCLIKVWETSQGKLVKTLKGHGHWVNSLALSTEYVLRTGAYDHTGKTFSTAEEMKEAALARYKKMRGNAPERLVSGSDDFTMFLWEPTISKQPKARMTGHQKLVNHVYFSPDGQWLASASFDKSVKLWNGITGKFVAAFRGHVADVYQISWSADSRLLLSGSKDSTLKIWDIRTHKLKMDLPGHADEVYTVDWSPDGEKVASGGKDRVLKLWMN

SEQ ID NO: 225856 - protein, 301 aa, Zea Mays
MEAGITTADILKDVISLIFEKAVFEPTFCPMYAQLCSDLNEKLPTFPSEEPGGKEITFKRVILNNCQEAFEGASNLRAEISKLTGPDQGMERRDKERLVKLRTLGNIRLIGELLKQKMVPEKIVHHIVMELLGSGTDKKPCPEEEDVEAICHFFNTIGKQLDENTKSRRINDTYFIQMKELTMNPQLAPRLRFMVRDVIDLRSNNWVPRREEIKAKTISEIHSEAEKNLGLRPGAASVIRNGRSSPGGPLSPGGGFPMNRPGTGGMMPGMPGSRKMPGMPGLDNDNWEVPRSKSMPRVVRH

SEQ ID NO: 225857 - protein, 276 aa, Zea Mays
MDGINPSMKSIGVSYAYVRRRNRLPDPVEKEKGVSLWSMIKDNIGKDLTKVCLPVYFNEPLSSLQKCFEDLEYSYLIDRASEWGKRGNSLMRILSIAAFAVSGYASTDGRSCKPFNPLLGETYEADYPDKGLRFFSEKVSHHPMVIACHCVGTGWRFWADSNLKSKFWGRSIQLDPVGALTLEFDDGEVFQWSKVTTSIYNLILGKLYCDHYGTMRIQGNCEYSCKLKFKEQSIIDRNPHQASVTFLTMERHILLNNFVEKIAWEHVFESAGNYGM

SEQ ID NO: 225858 - protein, 226 aa, Zea Mays
MMSPYGTPPPYAAMYAQGTPYQQAPMPPGSHPYSPYPMQLPNGTVQTPTSGAGGTATDKSNKNKRKASLKRSKGSLGSLDVVAVKNNKSPAKPSTSSSNEGSSQSESGSGSSSEGSSTNSKSGSRVKDNSEQGQGNDARSKCTQSSVVEPTQPSSGSVVLNPMMPFWPVPPPMAGPATTLNMGVDYWGTPASVPMHGKVIAAPTSAPSSNSRDIVLSDPTIQVFLL

SEQ ID NO: 225859 - protein, 597 aa, Zea Mays
MAQHIYATGCGRCGCARPIIRTLLPALTHHLASSSLLRRRKAPMGASDHLGLAAVAAAKPRNGRTCMAVLGEPLPALDDPGILVHPSADFAAQALVSSTKQYRDMYQKSIDDPAGFWSEIADEFYWKQKWSPDNVCAENLDVTKGPIMIEWFKGGKTNICYNAVDRNVEAGNGDKIAMYWEGNEPSQDGKLTYSELLEKVCQLSNYLKSVGVRKGDAVVIYLPMLMELPIAMLACARIGAVHSVVFAGFSADALAQRVIDCKPKVVITCNAVKRGMKIIHLKDIVDASLDQSAKNGVDVGICLTYENQSALNKVDTRWKTGRDVWWQDVVPDFPTKCDVEWVDAEDPLFLLYTSGSTGKPKGVLHTTGGYMVYSATTFKHAFDYKPTDIYWCTADCGWITGHSYVTYGPLLNGATVLVFEGAPNYPDPGRCWDIVDKYGVTIFYTAPTLIRSLMRDGTEYVARYSRKSLRVLGSVGEPINPTAWRWLYDVIGDSRCPISDTWWQTETGGFMITPLPGAWPQKPGSATFPFFGVQPVIVDEKGREMEGECSGYLCIKKSWPGAFRTLYGDKERYETTYFKPFAGYYFSGDGCSRCAYQ

SEQ ID NO: 225860 - protein, 73 aa, Zea Mays
MQNEEGKTVDLYVPRKCSATNRIITAKDHASVQINIGHLDANGLYDGHFTTFALSRFVRAQTAPWTGCGRRRL

SEQ ID NO: 225861 - protein, 244 aa, Zea Mays
MPRDSRPAGMRLFGVTIAPAPEADPPVRDPSPNPPVAAREDVMRKCKSMGNLAALGAVVDGGGGGADGGGAGDGYLSDGGLMQSSGKRRRAQERKKAVPWTEEEHRTFLAGLEKLGKGDWRGIAKNFVTTRTPTQVASHAQKYFLRQTNPNKKKRRSSLFDMMPRELSPAPNCPILPPSMAKVHDVVAMTKQLQNSNLEGTSSSNAASQVGRDLPPVPSFKATNMDPSFSKFSHMSQKMCYPLV

SEQ ID NO: 225862 - protein, 343 aa, Zea Mays
MPRDSRPAGMRLFGVTIAPAPEADPPVRDPSPNPPVAAREDVMRKCKSMGNLAALGAVVDGGGGGADGGGAGDGYLSDGGLMQSSGKRRRAQERKKAVPWTEEEHRTFLAGLEKLGKGDWRGIAKNFVTTRTPTQVASHAQKYFLRQTNPNKKKRRSSLFDMMPRELSPAPNCPILPPSMAKVHDVVAMTKQLQNSNLEGTSSSNAASQVGRDLPPVPSFKATNMDPSFSKFSHMERVWRTPYPFGPVPRAPEGTPSPTPAAAAAAAAAAANAAVPVSQANLTTACTSNTFLSQPKPSDTPSLPPKGGPPSEEDGLELTVAPPSQQNMTNMSSQNAEILNLYT

SEQ ID NO: 225863 - protein, 364 aa, Zea Mays
MIRTPDGKLAILDFGLVTKLTDDQKYGMIEAIAHLIHRDYDAIVKDFVKLGFIPEGVNLDPILPVLAKVFDQALEGGGAKNINFQELAADLAQITFDYPFRIPPYFALIIRAIGVLEGIALVGDPEFAIVDEAYPYIAQRLLTDESPRLRSALRYTIYGKTGVFDAERFIDVMQAFENFIRAAKSGGGENLKGNMAELAELGGQPSTSLVPVFAMAVAQPEQPVKARAALAFLLSERGNFFREFILDEIVKAIDAISREQLIQIAASFGIGNAAPVFSMVPVRARALLPTITEEDRVILNNVEKVVKFLTSGTATPTVGGDVNVVSVVQELLPVLPGISSKILPDVLSRLSSRVFARIIRETFL

SEQ ID NO: 225864 - protein, 337 aa, Zea Mays
MIEAIAHLIHRDYDAIVKDFVKLGFIPEGVNLDPILPVLAKVFDQALEGGGAKNINFQELAADLAQITFDYPFRIPPYFALIIRAIGVLEGIALVGDPEFAIVDEAYPYIAQRLLTDESPRLRSALRYTIYGKTGVFDAERFIDVMQAFENFIRAAKSGGGENLKGNMAELAELGGQPSTSLVPVFAMAVAQPEQPVKARAALAFLLSERGNFFREFILDEIVKAIDAISREQLIQIAASFGIGNAAPVFSMVPVRARALLPTITEEDRVILNNVEKVVKFLTSGTATPTVGGDVNVVSVVQELLPVLPGISSKILPDVLSRLSSRVFARIIRETFL

SEQ ID NO: 225865 - protein, 564 aa, Zea Mays
MPGLPLPQSLNQNIGCEYAYPGSTGQAFRQQLRTALSPDEKLTAEKDLALYCKPVELYNIIQRRAMKNPLFIQRCLLYNIHARRKKRIQITISLSGSTNTELQTHYVFPLYVLLARPTSNLSLEGHSPIYRFSRVCLLTSFSEHGNKDNSEATFIIPDVKSLSTSRACNHDIIFISCGQVGQSNGEDNCSGNHVEDSSLQMLEGKCSWGKIPTNLLASSLESCVNLSLGHIVELASKVTMRPSFLEPKFLEQDSCLTFCSHKVDAVGSYKLQLCMSAQEAGARDMSLSPYSSYSYNDVPPSSLSDIIRLRSGNVLFNYKYYNNTMQETEVTEDFSCPFCYVRCGSFKGLGCHLNSSHDLFHYEFWISEEYQVVNVSLKADAWRTELFAEGVDPRHQTFSYRSRFKKRRRSKNTMEKIRHVHSHIMESGSPEDEAGSEDNFVQGENGTSVANASIDPAQSLHGSNLSPPTVLQFGKTRKLSERSDPRNRQLLQKRQFFHSHRAQPMQLEQVFSDRDSEDEVDDDIADFEDRRMLDDFVDVTKDEKLIMHMWNSFVRKQRCTRLIG

SEQ ID NO: 225866 - protein, 186 aa, Zea Mays
MVTLIGTSVANASIDPAQSLHGSNLSPPTVLQFGKTRKLSERSDPRNRQLLQKRQFFHSHRAQPMQLEQVFSDRDSEDEVDDDIADFEDRRMLDDFVDVTKDEKLIMHMWNSFVRKQRVLADGHIPWACEAFSQLHGRQLIQNPALLWGWRFFMIKLWNHNILDARTMNTCNTVLQILQEESTGLK

SEQ ID NO: 225867 - protein, 337 aa, Zea Mays
MGDTALVLVAPTRGGRFEVIFVSPTGEEVKSKRQLTQYLKAHPGGPASSEFDWGTSDTPRRSARLSEKVKATESPEGEKTPKRGRSSSKRGKKEEKEDTEAANEAGEDGASEEGKGTDVEMKDAENAEDEKKEVPNADAAEKTEEGEDKKEEAPAVDAAEKTEEGEDKREEEAPAVDAAEKTGEKEVAPAVDATEETEKSTEGQAQPNYVAAPESEYKGDGKPGESEAAPLAFVDETAPHVIIGEEKKEENTENENSQAAESAVPSLASLEGEKKENGGAPEQPALPVAETKADAPPAEAEKGAENSGQPNTGSQEPKAANCDEGQIQPGASAVRCT

SEQ ID NO: 225868 - protein, 822 aa, Zea Mays
MIMEQGMWKEGMPDEEPLNVVARLMGLHDAPVQQSNFHLARQLDKEYQRGGFEENYRNLKPNKESKCHQNQKAGHTWNGSGDQPSRINSSRSKHQGNEPCCEKRMSLVREKFAEAKRLATDEKLLHSKEFQDALQFLSSNRDLFLEFLDEPNPLLSSNRYEFQPVAPPSQAKQITILKPSELAKRKGSILVGRQLFSDGDERGLNRYRRHQSLDVCPANSNLSEPTKIVLLKPGRLSKPHDSRIARSSLSSAENSEDESMTTVDETVCSRRLAKEVTWQTRMRLKDKQDEKSTLSCEYLDFYIGDDSFSKSEVEISKEMPGETSEELEFGTPTSGRSWDFLSRSGSPYSASCSSQASHRREPSVVREGKKKILERWSMVSSTVSSEEEMEGRRSTGTLGDILTIPKVKDQEGIGAETLGSPAPELEPEEPFSCLPRSRSLPLSLSCGVAESNGGVASGSTQEAERERIRKSSSFREKVSSLFSKNKKPVREKADLSVSNRLEVYGGAETTADVKKGLNRLALDNLQKQSTSRVNTDGKKNAAQGLVTSSCGTNDTANTTPAKDNIASIPSLGAPGILGDPQDQPSPVSVLDGPFIIRDNSRNVLYSSPSPQALSRSPLIGSFPRSLPVSWEDPPPEATSPNSLRLSRLFSKADEDLDSLTFIQKLVRSCGMDRASCVLAGPLDPDLLEKVSEHEDDGTRFGRRRLLFDAVNEALAELAWTAELAAYPWGGGRSRLDCNCKNGSGGDSAAEEIWRVIRNWSTLDKYPPCETIEGNVLLEMILRREADSGETARLEVFGLGASVCAVVLEELVEETVVDLLTDC

SEQ ID NO: 225869 - protein, 94 aa, Zea Mays
MVPVNLIERWGNAMDIVYPEFKRCCCFTKSYYRYVKGTGSLLATSKNLNVPEEKLQISSLKELGLRFFTPREVANFHSFPSNFCFPDHISLRQQ

SEQ ID NO: 225870 - protein, 1055 aa, Zea Mays
MVDTRRSSAAKRRGPSEDSSPSPPTTQADPTTAGLPVEPASPPPSSGSRSGKRAKVARAEDPGAPRGKAVDPAAVDVLDSSVANLQGVARPPAANVAASSAVSNSVGRRKRNQSVRAIPTGEGTLWKPRPAGGRAEAWGRLISQSSEYPSIPIYTTHFTIGNGGKCDLKLTETSPGPLICKLKHVKRGAALEIYMNKVVHVNGKALDKAAKVTLIGGDEVMFVSLGTHAYIFQQLLEEKASTPSLCSKCVIQQEQYPVVKDKEIVSSLCKTVGEQSYHPSEENMTFGRHQLLKDDLKKAAISASDISESFDNFPYYLSENTKNVLLSSSYVNLCCKESTKWTKDISSLCKRVLLSGPPGSEIYQELLVKALTKSFGAKLLVIDYSLLSGGQPSKSKESKPYKKGDRVRYIGPIQSSGFMFEGQRAPDYGSQGEVRLTFAENGSSKVGVRFDKQIPGGIDLGGSCELDHGLFCSVDSLCLDGPGWEDRAKHSFDVVFEFASEESQQVPVILFLKDVEKICGNNYTYHGLKNKLESFPAGVFIVGSQIQTDARKDKSNNGSPWLKFSYSQAAILDLAFQDSFGRAGEKNKEALKMSKHITKLFPNKVTIESPEDETELSQWKQLLGRDIEILKAKANFLKIQSFLTRHGMECTDLESVVCVKDRNLTSECVDKIVGYALSYQLKDHPIQTPGKDARVVLSGVSLKYGIDLLESIQSGPKKKSTKKSLKDVVTENEFEKRLLPDVIPPDEIGVTFEDIGALENVKETLQELVMLPLQRPELFSKGQLMKPCKGILLFGPPGTGKTMLAKAVATEAGANFINISMSSIASKWFGEGEKYVKAVFSLASKISPSVIFVDEVDGMLGRRENPGEHEAMRKMKNEFMVNWDGLRTKDKERVLVLAATNRPFDLDEAVVRRLPRRLMVNLPDAPNRKKILSVILAKEDLADDVDLEALANLTDGYSGSDLKNLCITAAHRPIREILEREKKERTLAEAENRPAPPQCCSGDVRSLKFSDFKHAHEQVCASISSDSKNMNELVQWNDLYGEGGSRHKTPLSYFM

SEQ ID NO: 225871 - protein, 286 aa, Zea Mays
MLPLQRPELFSKGQLMKPCKGILLFGPPGTGKTMLAKAVATEAGANFINISMSSIASKWFGEGEKYVKAVFSLASKISPSVIFVDEVDGMLGRRENPGEHEAMRKMKNEFMVNWDGLRTKDKERVLVLAATNRPFDLDEAVVRRLPRRLMVNLPDAPNRKKILSVILAKEDLADDVDLEALANLTDGYSGSDLKNLCITAAHRPIREILEREKKERTLAEAENRPAPPQCCSGDVRSLKFSDFKHAHEQVCASISSDSKNMNELVQWNDLYGEGGSRHKTPLSYFM

SEQ ID NO: 225872 - protein, 286 aa, Zea Mays; identical to SEQ ID NO: 225871

SEQ ID NO: 225873 - protein, 286 aa, Zea Mays
MKNLNEAKYGFWGTLARKAKSFLDEDCSPEQYKSPRDDVHVGVQLPHSKQLPGETWKPETPPSQKRSESITSSLTYIGGTIKNALEEGRTIVENKTADIIQETRKLNIRRKGAGLNTQGEAGHKIAQRHLPQNPLDHETQLKASRDVANAMAAKAKLLLRELKTVKADLAFAKERCAQLEEENKMLRESYDKGDNPEDDDLIRLQLETLLAEKARLAHENSVYARENRFLREIVEYHQLTMQDVIYVDEGIEEVTEVYPTQVLPRTGSSVSRAATAATPKSAPTST

SEQ ID NO: 225874 - protein, 490 aa, Zea Mays
MGPAAGDGDRGPGAAAEHKVNLSARQPFVESVRTCLAETFFPDDPFRGLGSRPPAARAWGALKYFVPALEWAPRYTAGKFKYDLLAGVTIASLAIPQGISYAKLANLPPIIGLYSSFVPPLLYAVFGSSNNLAVGTVAAASLLLASIIETEVPPEENPQLYLQLFYTAAFFTGVFQTALGVFRADSGFPVAVDDHRVHGRHGDDHHLAAAQGDAGDEALHAKDRPRLRHALHLLLQARVEVAEFSSWHMLPPALAVKQALEEEETKSVLGVGHCAFPDRGHRRRLRLPGQRRRAWHPDSRRSEERDQPAVYFAADVYRQARQYGNESGVLVRDPGAGRRDRRRTEPGAGKERADRREQGDDRIRHHEHRRVLHFLLPHHRAVLQIGGELPRRVPDAHVQRGDVGVHPAGAAVPGPALQVHPPGGALVHHRRRHDRAHQGQGVLPPVPGRQVRLLHLHGRIHRRRLLHHGHRPQCLGRLVRGQGTAARGET

SEQ ID NO: 225875 - protein, 435 aa, Zea Mays
MLGMKHFTPKTDLVSVMRSIFYYRHEWRWQSLVLGICFLLLLLLSKHLRKKKPNLFWVSAIAPFLIVVIGGVFAFLVKGDEHGIPIVGDLKKGINPLSISQLTFTDKHVNTAMKAGFLSGILALAEGIAVGRSLALVKNEQIDGNKEMIAFGIMNIAGSFTSCYLTTGPFSKSAVNFHAGCRTPMSNVVMSVCILLVLLFLAPLFKYTPLVALSSIIVVAMIGLIKVREFCHLYRVDKFDFCICMVAFIGVVFFTMVIGLSASVGLSVVRALLHVARPSTCKLGSVAGGDIFRDVRHYPHARSVPNVLVLQLGSPIYFVNAGYLRERILRWAEEEENGSKIDGQDLQYVVLDLAGVTSIDNTGIGMLVEVHKSLDRKGIRIALTNPRLEVTEKLVLSGYIKDIIGEEWVFLTVKDAITACRYALQRSRSKDDGEV

SEQ ID NO: 225876 - protein, 337 aa, Zea Mays
MATVMQKIKDIEDEMARTQKNKATAHHLGLLKAKLAKLRRELLTPTSKGGGGAGEGFDVTKSGDARVGLVGFPSVGKSTLLNKLTGTFSEVASYEFTTLTCIPGVIMYKGAKIQLLDLPGIIEGAKDGKGRGRQVISTARTCNVILIVLDAIKPITHKRLIEKELEGFGIRLNKTPPNLTFRRKDKGGINFTSTVTNTHLDLDTVKAICSEYRIHNADVSLRYDATADDLIDVIEGSRIYTPCVYVVNKIDQITLEELEILDKLPHYCPVSAHLEWNLDGLLEKKTVEDFCDRIHKDMVKQFKYALVWGSSVKHKPQRVGKEHELDDEDVVQIIKKI

SEQ ID NO: 225877 - protein, 354 aa, Zea Mays
MARTQKNKATAHHLGLLKAKLAKLRRELLTPTSKGGGGAGEGFDVTKSGDARVGLVGFPSVGKSTLLNKLTGTFSEVASYEFTTLTCIPGVIMYKGAKIQLLDLPGIIEGAKDGKGRGRQVISTARTCNVILIVLDAIKPITHKRLIEKELEGFGIRLNKTPPNLTFRRKDKGGINFTSTVTNTHLDLDTVKAICSEYRIHNADVSLRYDATADDLIDVIEGSRIYTPCVYVVNKIDQITLEELEILDKLPHYCPVSAHLEWNLDGLLEKVWEYLDLVRIYTKPKGLNPDYEDPVIVSSKKKTVEDFCDRIHKDMVKQFKYALVWGSSVKHKPQRVGKEHELDDEDVVQIIKKI

SEQ ID NO: 225878 - protein, 315 aa, Zea Mays
MGKAKGKQRQDKFYHLAKEQGYRSRAAFKLLQLDARFRFLLTAHSVLDLCAAPGGWVQVAVNHAPVGAFVVGVDLVPIRPIRGAHSLTEDITTTKCRAAVRRLMDSNGVSAFDVVLHDGSPNVGGAWAQEATSQSALVIDALRLATMFLAPKGAFITKVFRSQDYNAIMYCLKQLFEKVEATKPTASRSTSAEIYIICLKYKAPAKIQPELLDIKHLFSVVPEQTKSRDVMDGRKKRHRDGYEEGNTTLRKVGLASDFIWSDAQAPLEFLGSYNAISFDNPESLPIKNHELTTDDMAYSLTKSTVSVFTSHPKGQ

SEQ ID NO: 225879 - protein, 297 aa, Zea Mays
MNSFIVEIYPHNKEERIARTWGTTAPGLPYVDEAIASAGNWLIGGDLEVLEPIKYNDGLDHYRLSPRQLRKEFDKRGADAVFAFQLRNPVHNGHALLMNDTRRRLLEMGYKNPILLLHPLGGYTKADDVPLPVRMEQHSKVLEDGVLDPETTIVSIFPSPMHYAGPTEVQWHAKARINAGANFYIVGRDPAGMGHPTEKRDLYNPDHGKKVLSMAPGLEKLNILPFKVAAYDTVAKEMAFFDPSRSQDFLFISGTKMRTYAKTGENPPDGFMCPGGWKVLVDYYNSLQAEEATPVPV

SEQ ID NO: 225880 - protein, 509 aa, Zea Mays
MYVLEGVTPCIQSLQLQAGDTVTFSRIDPGGKLVMGFRKATNTDSQISAIANGSLLSETLFSTANESIGVVSGYPGFLHSIKGAADFHPSSLYDHHINSADGDVSWNKADKFGSRPDEGSLQFLQKRSRNIGSKSRRFLIDAEDAMELKLTWEEAQELLRPAPTAKPTVVMIEDYEFEEYDEPPVFAKRSIFTIRATGEQDQWIQCDECSKWRRLPLNVIVASKWTCTDNSWDPKCCSCSAPEELTPKELQSVMQQYEEMRRRKGSYGLKLNVAEMDASSFDALATGAVFGEVGNQGTASVATTTRHPRHRPGCTCNVCMTVRRRFKTLMMRKKQRQSEREEAEASKKIAWVNRDEPEGSSLSRSPQTLDTTRDSSDVTMFDKVAADVNKGHIDLNFHPAAPAVRGAGDQGQNGAQQPRAVSMMGLLEVASRPLDNYMKQNGLTSLAGEQGGGSSSTATVPPAPVESEDRTSDEGRVASAEREADAMAIDEAGENQQDKPADSAAAAAT

SEQ ID NO: 225881 - protein, 527 aa, Zea Mays
MQEEKNGIFSLGFGQIITAECMSWRVLHHAYNHCNYKLAIQDSQISAIANGSLLSETLFSTANESIGVVSGYPGFLHSIKGAADFHPSSLYDHHINSADGDVSWNKADKFGSRPDEGSLQFLQKRSRNIGSKSRRFLIDAEDAMELKLTWEEAQELLRPAPTAKPTVVMIEDYEFEEYDEPPVFAKRSIFTIRATGEQDQWIQCDECSKWRRLPLNVIVASKWTCTDNSWDPKCCSCSAPEELTPKELQSVMQQYEEMRRRKGSYGLKLNVAEMDASSFDALATGAVFGEVGNQGTASVATTTRHPRHRPGCTCIVCIQPPSGKGPKHNPACTCNVCMTVRRRFKTLMMRKKQRQSEREEAEASKKIAWVNRDEPEGSSLSRSPQTLDTTRDSSDVTMFDKVAADVNKGHIDLNFHPAAPAVRGAGDQGQNGAQQPRAVSMMGLLEVASRPLDNYMKQNGLTSLAGEQGGGSSSTATVPPAPVESEDRTSDEGRVASAEREADAMAIDEAGENQQDKPADSAAAAAT

SEQ ID NO: 225882 - protein, 449 aa, Zea Mays
MRISSEKNTIKSLKNDIKQLNNKLAELQASLEEKEDEISLLRRNYNSGGYGNKNVVGTSTAGSPHEEMSENYEESSASSSMIQGFDSRSSSSVKSYTRGGKFHESSEINHTEDQQVLVTEEEFPEVKVDFQETFLGHNSPISRCRFSASGSNIASSSIDGTVRIWTYDSSTASSRNATIYCGSEVSALSWECRSDRLLLIGTANGGIKAWNADAKRVVCDLSTSRNFPSILDLKCSPVEPVFVSAAASRRHGSTTFERTGFANLTVWHMKTWKPLTVLPLGEDPPAITSLCFNHNGKILAASATDGMIHMFDMSAGLQITGWPAHDSPVSSVLFGPAETSIFSLGSDGKILEWSLHNQGQILWSRDCSRFCNPESFKTRMHEIALDSNGKRLLVTSGLVRAPIYQVQGHESELRTLPHSSSITSVDWHPTLPMYITGSADHSVRVTSIL

SEQ ID NO: 225883 - protein, 153 aa, Zea Mays
MASPTVASPTRASPADIPTAAPSSAPRPRRLASAPPAVYASASSSPASAYSGDQLSAPDASSPLLASRSEEYRLLFRLPPDEVLVQDFNCALQENILLQGHMYLFLHHICFYSNIFGYETKKTIPLQEVTDVRKAKTAAIFSNAIEIVAGSRR

SEQ ID NO: 225884 - protein, 712 aa, Zea Mays
MNNQFRVGIQTIAIIPVLPRGVLQLGSAGLVMENINFVMFAKKLCSQLNNRSSMAASASAKNALSQHGQSRPDTATVSTRTPPNALLNASLLKVAQQSGHPVREHVVYAEPDLRFRQQASFCENQFGSNLQSVVMNSSLTSPSLASVKKQPLLMNSIGQLQFSNYVHSSADLARDVILKSLVRQDSSVCETTNMNMHRGRYMVSNDINGSGDFDFLPVGAKASRANLSTSVSSQILDHTTRTLQQKQSLVPFKVTQSSEFNKKMENPENGSFQTPSVPTSESGGQVSNSFNMDQENQLIMSNNVRQVQKINRFSDPSANVSTQRMKNRDVCESGMPIERGSSLLVEPGADNDLFDMLGSEFHQFSHNVGSDLVTWSGTESQNSDRDGPESSIYLNSSPLFSSLDNELHYSGILSLTDTDQLLDAVISNVNPSSKQCPDDSASCKTALTDVPSTSHLGSIDLKRCESSGVPSVLIKHELAQLVKQPCIFDKSENCLSQNNGMHKSQIRLWIESGQNMKCESTSASNSKGLDTPSKANRKRSRPGESAKPRPKDRQLIQDRIKELRELVPNGAKCSIDGLLEKTVKHMLFLQSVTKNADKLKDSTESKILGSENGPLWKDYFEGGATWAFDVGSQSMTCPIIVEDLDRPRQMLVEMLCEDRGIFLEIADFIKGLGLTILRGVMEMRKSKIWARFTVEVMQLNLIIRILSDQNLK

SEQ ID NO: 225885 - protein, 922 aa, Zea Mays
MANVPLPSHKDATTVSHRRSSKLRISPQSEKGSEVIIDLEALSGFTEFFLEIQDNIFPHRIAAFGVSLQPVSYNLPVPSQVVLIAPRYVLSNESDAAIAVRQCFVEHGIDGLTVEAKQRAALQTWKPGKKREVNYFDLFVKKHRNVFEDSHIFIQFCPKEPGYSWSGPICVSSIGRFFLKFRRLEGMLEDGIKRDPLNAGKLKLFASVDVAQETTSFVLHFTKPPKVTLPYRIENYLSESSILYFQKDSVDSDVLHPQESEQYAWDDLSSPRKLVVRIVDTPALREIKIDKISPWKPFLKMRQNSRLNLDFSFSGGLNSRKQRFDESFGLRVFKIGYEVYADGLTRVLRICEHADNPKIEKIQWPIANIQFRISYVCIHLLDKDQNGENVQLPSTILAARLQHVSSDSVVTNRFKQVSVAIHSLNVDEKWEGASIGTILRRNKLQDATLDENILRMIFVLNSTDSSVKQIQYCAIILQPVDLKIDEETLMKLVPFWRASLAPSGTTSTQFYFRRFEVHPIKIIASFRPGGRRTTYSSAQEALRALLHSVIKVPEISNSAVELNGVLLNHALVTFRELLLKCAQHYSWYVLRAIYVTKGSKLLPPSFASIFDDSASSVLDVFFDPSDGSLNVPGLTIGMFKFISKNMKSGGFSGTKRYLGDLGKTVKTASSNALFAAVTEISDSVVRGAETNGLNGMVTGFHQGMLRLAMEPSVLGQAIMEGGPDRKIKLDHSPGLDELYIEGYLQAMLDVMYKQEYLRVRVIDDQVILKNLPPNSALINEIVDNVKSFLVSKALLKGDSSTVRPMRHLRNEPEWRIAPTVLTLCEHLFVSFAVRVLHREASKAIAGVMSRVKKPTGEEVEGDSPASGGVLCKRNRLWTVGRFAVSGMVAYVDGRLCRHIPNPIARRIVSGFLLSFIENRGNE

SEQ ID NO: 225886 - protein, 186 aa, Zea Mays
MATVFLRSLAMAMADTALPPSHKLLPTVSLPLLPSSTRAAPLLLCASRRLPPAPLVASSDAVETNIEWVDDDEEEAGEAFDEEGGDVEEEVLASGDEGEGEYAAVEPPEEAKVYVGNLPYDIESEGLAQLFDQAGVVEVAEVIYNKETGQSRGFGFVTMSTIEEADKAIEMFNRYWEASECKQGIS

SEQ ID NO: 225887 - protein, 96 aa, Zea Mays
MERPPRQFAPAFRAYVGNLPWQADDSRLVQLFSEYGEVVNAAVVYDRETGRSRGFGFVTMVSKEELDDAISALDGQELDGRPLRVNVAAERPQRGF

SEQ ID NO: 225888 - protein, 181 aa, Zea Mays
MGDDGDWIGGDSGFGFSAMEVEVNRGFNSDAVLAMETIHSLSASKSSYPMADLTQLFMTATQEGKRSESQGQILRVITCLHRFEDTGYSFSVETAARVKVIDFGSALPWRVLDVNGLKREAASRGGATGHGKPRLLIISRRGSRRFLNEREMERAAGDAGFEMCGNGVRCFGRFIAEIENL

SEQ ID NO: 225889 - protein, 714 aa, Zea Mays
MALFGFEEKRFHNWLEGARDWAISRSRFWGTPLPLWMSQDRKEIVVMDSIEKLEKLSGVKVTDLHRHYVDDITIPSKRGPKFGTLKRVDDVFDCWFESGSMPYAYIHYPFENRELFEKNFPGNFVAEGLDQTRGWFYTLMVLSTALFGKPAFKNLICNGLVLAEDGKKMSKSKKNYPSPKDLIDEFGADSLRLYLVNSPVVRAESLRFKRTGVFAVVKDVFLPWYNAYRFFVQNAKRLEVEGLASFSPMEQAVLLKSSNVLDHWINSATESLVSFVHQEMDAYRLYTVVPYLVKYIDYLTNIYVRLNRKRFKGRTGEEDCRISLSTLYHVLVTTCVVMAPFTPFFTEVLYQNLRKVSSKSEESIHFCKFPSTTGERDERVEQSVNRMVTIIDLARNIRERHNKALKTPLKEMVVVHPDNDFLEDITGKLKEYVMEEINVKTVTPCNDPLMYASLRAEPNFSVLGKRLGKDMGKVSNVVKKMTQEQILDFEKSGEISFFGHCLKLDDIKVVRQFKRPENVSEKEIDAAGDGDVLVILDLRADQSLFEAGVAREVVNRIQKLRKTAQLEPADPVDVYYESVGSDKNTLEEILKSQDQYIRDALGSPIMPKEMAPTDDVILGEESHNVHDMSFVICIARSTPILAPDLLSHASGKSNHVEALRVYLLSRSLSRLKNQFQAGKGMITVDCIEGYPPVSLLLGKHVFLSAGDFYLASRS

SEQ ID NO: 225890 - protein, 97 aa, Zea Mays
MSTTEDERSGAAAEAGGGEEERRERSVGLMAGLVDRAKGFVVEKVAQIPKPEAALDRVSFQSISREGVELHSHVDVSNPYSHRIPICEITYTFKSAG

SEQ ID NO: 225891 - protein, 472 aa, Zea Mays
MYQHTMAAMHAIVHHRAPPPGRCCRGHGRSVVVRASAATVTTSIPGSAATVPDSPSAAFWDYNLLFRSQRAESPDPVVLRVTEGAIPPDFPAGTYYLAGPGMFTDDHGSTVHPLDGHGYLRSFRFDASGAAHYSARYVETAAKREEHDAGGASWRFTHRGPFSVLQGGSRVGNVKVMKNVANTSVLRWGGRVLCLWEGGEPYELDPRTLETIGPFDILGSLCGGTDEVARDASGEAAHHGRRQPWLQEAGIDVAARLLRPVLSGVYSMPAKRLLAHYKIDPKKNRLLMVACNAEDMLLPRSNFTFYEFDANFALVQKREFVLPDHLMIHDWAFTDSQYVLLGNRIRLDIPGSLLALTGTHPMIAALAVDPSRQSTPVYLLPRTPEAEAEASGRDWSVPIEAPSQMWSMHVGNAFEERNARGGINIQLHMSGCSYQWFNFHRMFGYNWLNKKLDPSFMNIAKGREWLPRLVQC

SEQ ID NO: 225892 - protein, 299 aa, Zea Mays
MLALVLVGFAFSLTGKKSLVSTAVFLAWIIITATLILSGTFLLLHNVIGDTCVAMDEWVAQPQGQGQSHTALDDILPCADAAVTAEALRRSKEVNYQLVSKLNQLLSNVSNGNVPPQAGPPLYYNQSGPPVPLLCSPYSADLSDRPCAVGEVTAADAQQVWQRYVCRAAAGSGREEVCSTAGRLTPAMYSQMVAVAGLSDGLRRQSPALADVASCVTVRRAFRTVGQRGCPPLRRDSRRVYQALLAASAAGMLAAAAWLVHSRERRRRRDSERFKVSPYRLPIEDKVLLNSPRRPYRRV

SEQ ID NO: 225893 - protein, 307 aa, Zea Mays
MGGWYSAIAATRLKMLRRGCRGAAAVLPVASHDSVTGKERKRKRRKHASILGDSGTVDPDFSRRYRLGAELGRGEFGVTRRCEDAATGEALACKTIRRKRLLLRRAGLDADDVRREVEITRRMSEAGGGRVVRLREACEDDDGVHLVVELCEGGELFDRIFEREHYSERAAAKLARTIVEVVQVTTEPSVVHWPADGPSEAAHEFASALRPRYAAVPRERSDAQGPEAGELPVREQVGGVASQGYRLRPLRVLQAWGSVRRSGWQRVLHGSRGSQEKLWARDRRVERRRHPAPPPLRIPAVLGRWSP

SEQ ID NO: 225894 - protein, 619 aa, Zea Mays; identical to SEQ ID NO: 223752

SEQ ID NO: 225895 - protein, 76 aa, Zea Mays
MSLFIIPLVSQESGPRPGPNPFSFVQLRARSTSPSQLVLTVRPASPPARDLAQLPPPSGETQISCSWPRPAPSTLR

SEQ ID NO: 225896 - protein, 115 aa, Zea Mays
MWAGTWRVGGVLAMSRAFGNRLLKQFVIADPEIQEQEINDELEFLIIASDGLWDVVPNEDAVSLVKMEEDPEAAARKLTETAFSRGSGDNITCIVVKFEHDKPGGGGYSPPGDKS

SEQ ID NO: 225897 - protein, 144 aa, Zea Mays
MAFSGDIKCANILVDASGLVKLADFGLAKEMSILSQAKSSKGTVYWMAPEVAKAKPHGPPADIWSLGCTVLEMLTGEVPYPDMEWTQALLKIGRGIPPEIPNTLSEDARDFIKKCVQANPNDRPCAAQLFEHPFVQRPLQQYGV

SEQ ID NO: 225898 - protein, 536 aa, Zea Mays
MANSEYEYVKREFEFDRCLPPSNWIVVRIDGCHFHRFSKVHAFEKPNDENALRLMNACATAVLEKFPDIAFAYGVSDEYSFIFREETEFYHRRESKILSLCVSYFTSVYVMKWKDFFPNKELKEPPYFDARAVCYPNLKTIRDYLAWRQVDCHINNQYNTCFWMLVKSGKSEQEAQLALKGTFAKDKNELLAKQFQINYDDELAMFRKGSSVYREKVETTVKIDDYGEPIKRPRLKVTVAHVDTIGTAFWENHPHILREGKFMHGFVKKFGINHIFSPCNWIIVRIIACQFDQFSTIHSFDKPNDETALRLMNESASLMMEQYPDIVFGYGFSNEYSFVFHEKSELYQRRESLILSSCSSYFTSLYMTKWKEFFPYTELMQTPHFEADALCYPKLKIICEYLSWRQAECHAGNQYNTCFWMLVKSGKSEKEAHEILKGTLSKDKNELLFQQFQMNYNNEPAMFRKGSCVYRRKVEELAGAEDGGNGTSRERWHVKVDHVDLGPGFWRKHPWSRNERRLFVHTSRLLFTLYYVLMVF

SEQ ID NO: 225899 - protein, 441 aa, Zea Mays
MGKCSWHHDIDISTNNFSKILSLCVSYFTSVYVMKWKDFFPNKELKEPPYFDARAVCYPNLKTIRDYLAWRQVDCHINNQYNTCFWMLVKSGKSEQEAQLALKGTFAKDKNELLAKQFQINYDDELAMFRKGSSVYREKVETTVKIDDYGEPIKRPRLKVTVAHVDTIGTAFWENHPHILREGKFMHGFVKKFGINHIFSPCNWIIVRIIACQFDQFSTIHSFDKPNDETALRLMNESASLMMEQYPDIVFGYGFSNEYSFVFHEKSELYQRRESLILSSCSSYFTSLYMTKWKEFFPYTELMQTPHFEADALCYPKLKIICEYLSWRQAECHAGNQYNTCFWMLVKSGKSEKEAHEILKGTLSKDKNELLFQQFQMNYNNEPAMFRKGSCVYRRKVEELAGAEDGGNGTSRERWHVKVDHVDLGPGFWRKHPWLMTNCTQ

SEQ ID NO: 225900 - protein, 134 aa, Zea Mays
MNCSLCKHTVERELWDLHTGIQCPQRMLACQYCQFELPAVDLFEHQDLCGNRTEYCQSCRKYIRLREWIGHELQFHTILNAASELSRTRAAAEQPVPKPARPATGSLHKQLLLTVAVTGVAVLIGSILYQGKGK

SEQ ID NO: 225901 - protein, 260 aa, Zea Mays
MEIPSIFGFGWIKIQETTHIKIFGPSVMRSMLGTAAVLEAFQRMYGVHLDHDLDSLLHMPNDGDTWSVMQSWVLPTRSFLEFVMFSRMFVDALDAQMYDKHHQTGHCILSLHKDRHCYSRVLELIVNVWAFHSARRMVYVNPQTGAMQEQHHLSGRRGQMSVQFFSYTTLKSMDEELAEEFDLDHPDRRWLWPQTGEVFWQGLYQRERIMRQQEKERRKQQSREKIQRIKNRARQKTLGKYIKPPPDDTGGSNDTTSVDL

SEQ ID NO: 225902 - protein, 233 aa, Zea Mays
MQNPNCMVMVDNCYGEFVEISEPAMVGADLIAGSLIKNPGGTIAPCGGYVAGKEHLVEAAAARLSAPGLGVEFGSTPGHVMRALFQGLFLGPQMVGEAVKGGLLIAEVMSAKGYKVEPLPRVPRHDIVQAVELGSRERLIAFCEVVQQTCPVGSFIKPTAGETPGYASEVIFADGTFIDGSTSELSCDGPLRDPYAVFCQGGTHWTQWALVLGNVLKEWWILTPSQFIRLYKA

SEQ ID NO: 225903 - protein, 216 aa, Zea Mays
MAAASLALASPLRLLLRVRHPRGAIAVPCYFISRGRYSTAIAVAAARDLAVKGSVDRNSAEEVRNILNMAERASQRRNVFHTNFLTPPIVKEAMLALEKFADTKAVAQGGYPQAERCRISVGHPDVMTSNPDVVAALSISGNFRLESCSHGDFLGAILGTGITREKVGDILLQVGKVGVSCTQIPLLALEYEPPRTNSFKTVESSLRVDALASAGF

SEQ ID NO: 225904 - protein, 781 aa, Zea Mays
MEKMQESLGVHCLQHSRLYVDVDVGAARVARTREVEFHPTSPAWNQSFRLHCAYPAAAVTFTVKNQHLIGAGVLGAGSVPAARVASGQPLECLLDLRGGEHAHETHTPSLRVRLQFFGVERDPFWGAGVRLPDFAGVKPAFFPERTNCSVTLYQNAHLSDAFDPGVRLDGGLAYRPARLWEDLYAAIRDARRFVYVAGWSVNTEITLVRDAGRRAVPGAEGDTLGELLKRKADEGVAVLVMPWQDNTSVSFLGNAGLMKTHDEETRRFFEGTNVRCFLCPRNADASLTMVQHVETSAEFTHHQKTVTLDAATPGTDERHVVSFIGGIDLCDGRYDDENHTLFRDLDTTYSHDFMQNNYKHASLRRGGPREPWHDVHCRLKGPVAWDVLANFEQRWRKQAPDDMRGCLLDLSPAAFPDPVSFDGNDPWNVQVFRSIDDASVVGFPSDAAEAAAMGLTSGKDVTVDRSIQIGYVEAVRRAQRFIYIENQYFLGGCASWAADRDAGCLNLVPVEIALKVAAKIRCGERFAVYVVTPMWPEGVPAGEAVQAILLWNRRTVEMMYGIVAKAIDDAGLRGQAHPCDYLNFFCLGNREAPLPGEYSPPETPDEDTDYWRAQVNRRGPIYVHAKLMIVDDEYVMVGSANLNERSLAGNRDSEIAQGSYQPAHLNGPGGRARGQVYGFRMSLWHEHFMGRHASEDADDGALFLEPESLECVRAVRRAAERLWDSYTQDRVEDLPGHLLPFPITVSEFGEVADLPADGCFPDTRAPVRGTKAVKLPDILTT

SEQ ID NO: 225905 - protein, 781 aa, Zea Mays; identical to SEQ ID NO: 225904

SEQ ID NO: 225906 - protein, 609 aa, Zea Mays
MAAPATRVIGSKPADCFQFQDPNTWTCVSELASDVVVEVGDTSFHLHKKLVNESTGDGSKPCTVRLDDVPGGAEAFLLAARFCYDVQTELNAGNAVPLRCAAERLAMTEDYGEGNLVEQAESFLSEVLAGWSDTVRALGTCDDAVLPAAEDLLIVQRCIDSLADKACADPTLSGWPMLEYFTAKSLEETAIWTGIGAAGRPRSPGAGWWYDQASSLPLPLYKRLIAAVRSRGMSPENVAGSLMHYARRHLSGLRRLGDNSDGSSRGGAAAVLSGGDQRTLLEEIVAMLPVEKGVAPTRFLLGLLRVATVLHAAAACRDALERRAGDQLEEAALEDLLIPNTGYSAETLYDVDSVQRMLEQFMMTTPPAFAVLPETTDEGQLVDAPPGELMPVSSVGKLVDGYLAEVGTDANLKPSKFQTIAALVPDYARAIDDGLYRAIDIYLKAHPWLTDSEREQLCRLMNCQKLSLEACTHAAQNERLPLRVVVQVLFFEQLRLRTTVSGWFFVSDNADQGSSSDNCVLPRRPDDDLDLAARSEVTTDEDGSAAAQHEPSPAMSVAEIHRPGKPKSTLSRLLGKLGLGGRSSSRQRQQQPPLPGASDKRRRSFDFGC

SEQ ID NO: 225907 - protein, 97 aa, Zea Mays
MDLENADLRMMRVMEAYQVKEFHPDVCKDPEIADLRMSERWRSIRECSSLLSIVKHVLQYPLPTSSCICCLLDSLKHRRLQCCVVLVHCTTNNIEED

SEQ ID NO: 225908 - protein, 132 aa, Zea Mays
MADGMGSFLKRKSHAKQGRPLGSASTCTPKRQKVVQNESTNISPGPVTRSQSALSTIGEGSSQEMATPKRQQVVTNQSTNISPVPVTRRQLALSMLDESTSQELATPSRATKSPSKPTSRIARKITPRKFKK

SEQ ID NO: 225909 - protein, 722 aa, Zea Mays
MLARALAHYFQAKLLLLDPTDFLIKIHNKYGTGGGTEKTFKRSISETTLERVSGLFGSLSILPQKEQPKGTIRRQSSMTDVKLRSSESTSNLPKLRRNASSSSDMSSMASQGPSTNTAPLRRTSSWTFDDKILVQALYKVLLSVSKSYPIVLYIRDVEKFLHKSPKMYLLFEKLLNKLDGPVLVLGSRIVDMESDEELDYRLTVLFPYNIEIKPPENENHLVSWKSQLEEDMKMIQFQDNRNHIMEVLAENDLECDDLGSICLSDTMCLSKYIEEIVVSAVSYHLMNNKDPDYRNGKLVLSTKSLSHASEIFQGNKMTDKDSMKLEVTDGTLKASEKAIAPTTAKSETKPASSLPPVRPPAAGAPAPRVESKTELEKKDNPPPSAKVPEGTADNEFEKRIRPEVIPANEIGVSFDDIGALDDIKESLHELVMLPLRRPDLFKGGLLKPCRGILLFGPPGTGKTMLAKAIANEAQASFINVSMSTITSKWFGEDEKNVRALFTLAAKVSPTIIFVDEVDSMLGQRNRAGEHEAMRKIKNEFMTHWDGLLSRSDQRILVLAATNRPFDLDEAIIRRFERRIMVGLPSMESRELIMRRLLSKEKVDERLNFKELATMTEGYSGSDLKNLCTTAAYRPVRELIQKERKKELEKLKREKGETPSDLPKKKEETITLRPLSMTDLKEAKNQVAASFASEGVCMSELRQWNELYGEGGSRKKEQLTYFL

SEQ ID NO: 225910 - protein, 521 aa, Zea Mays
MERKSVVMSALGIGIGVGVGLGLASAPWAGGASASASARAAGVTVERVEQDLRRLLADGADSKVTFDEFPYYLSEQTRVVLTSAAYVHLKQAEISKYTRNLAPASRAILLSGPAELYQQMLARALAHYFQAKLLLLDPTDFLIKIHNKYGTGGGTEKTFKRSISETTLERVSGLFGSLSILPQKEQPKGTIRRQSSMTDVKLRSSESTSNLPKLRRNASSSSDMSSMASQGPSTNTAPLRRTSSWTFDDKILVQALYKVLLSVSKSYPIVLYIRDVEKFLHKSPKMYLLFEKLLNKLDGPVLVLGSRIVDMESDEELDYRLTVLFPYNIEIKPPENENHLVSWKSQLEEDMKMIQFQDNRNHIMEVLAENDLECDDLGSICLSDTMCLSKYIEEIVVSAVSYHLMNNKDPDYRNGKLVLSTKSLSHASEIFQGNKMTDKDSMKLEVTDGTLKASEKAIAPTTAKSETKPASSLPPVRPPAAGAPAPRVESKTELEKKDNPPPSAKVPGQQIMSLKSVLDQK

SEQ ID NO: 225911 - protein, 289 aa, Zea Mays
MDVSTTAQEISNTDVTVLEGHSSEVFACAWSPSGSLLASGSGDSTARIWTIPDGPCGSNMQSSPPGVHVLKHFKGRTNEKSKDVTTLDWNGEGTLLATGSYDGQARIWSRDGDLKQTLFKHKGPIFSLKWNKKGDFLLSGSVDKTAIVWDTKTWECKQQFEFHSAPTLDVDWRNNNSFATCSTDNMIYVCKIGEQRPVKAFSGHQSEVNAIKWDPTGSLLASCSDDWTAKIWSMKQDKCVFDFKEHTKEIYTIRWSPTGPGTNNPNQQLLLARLGVQATEEMEQASKDA

SEQ ID NO: 225912 - protein, 1278 aa, Zea Mays
MDAGGDEDGAGKAALESTAEAATLPPASTVAVPSPVPASAPGAATGTSGSGEKPVKRMMKTPYQLEVLEKTYAVEQYPSEAMRLELSAKIGLSDRQLQMWFCHRRLKDRKPPSKRQRREEESALVPVMPPPPVLPAPVMPLASSDLVVGAPGPYDEPLHPLHSRRGAGRGRSSAVPRISMPDIGRRYYEPPPIMIAPPIPSMQLTQYELRVINSVESQLGEPLREDGPALGVNFDPLPPGAFGAPIVPEQQKQPVRSYDAEIFSWHDQKLLKASAFLPNMESPFVPNSFTGKRKSPVGNSAIVQPHVGSRAVHEYQFLPEQPSDTYERATRSHYYDTPVEVSNARIPSITSGSQLLHGSEEAAPSYAFQGHTSGSSLLPPSSRPQVFPAAPTDYEMTQSNSNLSSVPVEGQFDISQVAAFENPPVSSEIIAYHDEDTSRVERKRKHSEEAKIAKEVEAHERRIRKELEKQDMLNKKREEQRRKEMERLDRERRKEEERLLRERQREEERFQREQRREHERMEKFLQKQSRRAEKQRQKEELRKEKEAARQKAANERATARRIAREYMELVEDERLESMELAAQNKGLPSMLYLDSDTLQQLDSFRGMLSQFPPTTVRMKLPFSIKPWTGSEDNVGNLLMYSYNFISGDILLTGLQVWKFLITFTDVLGLCPVTLDEFVQSLHDYDSRLLGELHIALLRSIIKDIEDVARTPSIALGVNPGGGHPQIVEGAYAWGFNIRSWQRHLNLLTWPEILRQFALSAGFGPQLKKRTVEDSYYRNDNEGHDGENVILTIRNGTAAVNAAAKMKERGYTNRRRSRHRLTPGTVKFAAFHVLSLEGSNGLTILEVAEKIQKSGLRDLTTSKTPEASIAAALSRDTKLFERTAPSTYCVKSPYRKDPADSEAVLSAARERIRAFQNVLSDSEAEKEVDEAERDDDSDCDDGDDDPDGDDVNTEVEDDKDPLLAVKSQDEVPSTTTVIGIKANLDGVGNALNSSSSFTKSAKGAPLPSLGRSNAADTSNDLPLGVSSANHEVVPDDSENTQIDESNQAEPWVRALAEGDYCDLSVEERLNALVALVGVATEGNSIRAVLEERLELANALKKQMWAEAQLDKRRFKEEFTSRVQYNSDMGLKPDIYQENNVTEITSTPACDAYRENDEHVGTINNCEMLDQHNQGNAGSLPYERNGVCQEILATPDTSYVQQYAYADKRRSQLKSYIGHRAEQLYVYRSLPLGQDRRRNRYWQFTTSASPNDPGSGRIFFESKDGYWRVIDSEEDQCYRE

SEQ ID NO: 225913 - protein, 50 aa, Zea Mays
MAACSCLCYTLCLECTLRFLHGKYVCNICDEHGNYPLNSRIINELGKIVT

SEQ ID NO: 225914 - protein, 230 aa, Zea Mays
MAWVVMALVQGRTTGGHGMADHRFGTAPGPQFAVGEEYGWAILGYISTAISDGPGCLMLRCPDPSCAAAVGQDMINSLANVEDTEKYGRYLRRSYIEDNRKNMHQGYPKETLVRFLKAREWNVAKAHKMIVECLNWRIQNEIDSVLERPIAPVDLYRSICDSQLIGLSGYTKEATTTAKIIKVSGLKLSALSQIKGEIENKDIVNQDELFMDIDSAECGLGELAWSNTIC

SEQ ID NO: 225915 - protein, 226 aa, Zea Mays
MEFMLTSPFSVSRNSQARYISTAISDGPGCLMLRCPDPSCAAAVGQDMINSLANVEDTEKYGRYLRRSYIEDNRKNMHQGYPKETLVRFLKAREWNVAKAHKMIVECLNWRIQNEIDSVLERPIAPVDLYRSICDSQLIGLSGYTKELTGHCLVIMVCRIIGLPIFGIGVGHSTYDKASATTTAKIIKVSGLKLSALSQIKDSGSHQVTPPHVDFADVSILVVELR

SEQ ID NO: 225916 - protein, 215 aa, Zea Mays
MGVVLRHSFQEAAAVSSPPRPPAAPTVPYPDQPCASSCCPGRVTWPAAAAYTTSTGTAWCPQNARRIRPSSAFPRRSSGRKPASRSTPTSTQPRPVASGPGWHSPALCSRACRRTPLARRPRSGSCRAPLAGRPSGSGPSGNICTSRWYPGRASRPCTARSRPSYGTRERATPNPMPTRVPTWRTSRGSSVMSGQILGCRSYPLFRCHAIFGAFE

SEQ ID NO: 225917 - protein, 796 aa, Zea Mays
MSGMSKGAFANITSLRSTEERVVHLNNILKFAVFKKDRSLFAIGGPWNADIDGGDPSADCSCLIRTAIRCVKETVHVDLSSCTHWNRFVEVHYNRIGKDGLFSHKEITVLFVPNLLECLPSVDIWKNNWILYKKSKAEREQLTVKKVKSPGDPKEQMQGELNDGKNLDADQLKEADVGCSDMKNEKDDVDIKQQGNDGEGTGKVEEPVQKMGGDVEGKSTGDSSIDHATTGDKKPTKKKIIKKVVKVVRKKITGPSVDKSSEDKIVVAESANKTAEGGQSQQKNDDAGKQQEGAGISQQPEAKKTVKKKIIRRIVKRKVSGSGSQLNTPTTPAETSRQEAEVQPEKNVESSADVGNSQTKLQEGSKIPSEDISNQKKEEKPAEKEHPLTDLSLNADKGNHKEAFEQKDMKNDGKKDKTKDDKEKNRDLKMDLKQKLPLDTQEKKRSDEPPKYPGFILQAKRNTESKLRLTSLSLHGLLDYTAKDIEESVFELSLFAESFSEMLQHRMGCVILSFLEKLHRRYVVKRNQRKRQREEDLKKEEKSSEKRSKTTHETTKTESVDNPGGSFKMTKEGEEKMSTDQSANVHAELSKEGQIKLGTDHPIANHGEPAKGGDENMEEDPEYEEDPEEVEVYEDDEDMDDAHAEEQIAEQNENTNDREIKPKEVATTDGGNNKSTRQPEVENVTNIHERAASMEEKQSVPEIGDLVGGGEKVVSKEIKPAKDEVIDKDLLQAFRYFDINGAGYLKVDDLKCILHNMGKFLSSRDVKDLVQIALVESNSARDNRIIYPKLVKIVDL

SEQ ID NO: 225918 - protein, 767 aa, Zea Mays
MAGRPPAAPLVGTALASESQSLWPFAGVEEVKPDTEVLSSDTLPQTPHSAGSLRHWVRPTGAQQCGKCALVYTPELAVNKIMIGNLIHCHDKVKHEAGINGNIKIFTEDEIKRITNNFNTLIGKGGFGEVYRGTLDDDNEPVAVKKYINEDLREVFMEEVRIHSKISHKNVVKLIGYCIGKSTLMIVMEYMSTGNLNDILHCTEISIPLDVRLGIAIGCAEALSYMHSMHLSSGNLICHGDVKPANILLNDNLTAKITDFGVSRLLVGGITQYTTSVKGSIDYMDPIYIQEGRLTPRSDVYSFGLVLCELISRKRIRKGDINLILYVNKGSASGKGFREMSDAAIANEDNMKILKEMKKLATECVSLSIYRRPQMTDVVRRLRMLRKELKERHEYYSESILASHHSWRKNNKQEIIMPTYNSKMQIKKSLGFFKRSLSNSKIQSEPSDVRIFTQEELKEVTNNYSYLISGGTSGKVYRGTLEDNTVVAVRIFSEVLEGFEEAFVNGGMILSQISHRNIIKLVGYCLDADCPAFLYEYAAKGSLSDVLDGHEDFPLDLRAKIVVKIAEALEYLHSPATGIIRHGYVVPSKILVDNNFMPKLTGFSWARRLIQESNTTASDDVISSHQHPSSGFNNDPIHDHYVSLKLKTDVYQFGVLLLTLISRKSFVFYADHDGLVSQFLTACQEDGSGRAFFDDDVAVHGGDVVLLEEMGRLSLKCVCEEIEQRPTMREVAEHLRMITRSWKDFSGSYAGAEGNTPERPPSSDIGD

SEQ ID NO: 225919 - protein, 279 aa, Zea Mays
MPGPDARGGGGGAGQGGSHLPAAAAGVGGVGQRRLVGAGGGGARVARGAAAGLPAGGRYGGAGVRVRARGAAKLQLPARRHLLRHRRLHRRGGPPRPRPPRRRQLRRLPRRALPRARRDAARPALLRPQAKSGRREGADRGGRRAGGVQQRAPRAWDPRHVARTRLLRPEVIAEPEITVTERTVEDECLILASDGMWDVISNDIACNVARQCLEDGNPPPADPTAGGGGGAPAAGVVVVAAREAEPRCLRAASLLARLAIGRETQDNVSIVVVDLKHRD

SEQ ID NO: 225920 - protein, 193 aa, Zea Mays
MGGHGGLNILPQKRWNVYNFDNREKVQKDEAAAAREEQLQREAERRRESDLRLAALRRNRGLVQAETPPAPPSHPAGPADPADALPSPADALPSPATDGDHINLFSGGSGVATDFDALASASGGRGAAREREPDADPNPKKRKKKEEEVRVVGPDEEKKKREAKEKERERAILVAAGRKERQVDRGRQSRWAR

SEQ ID NO: 225921 - protein, 470 aa, Zea Mays
MQDRVFACQKLGFYFGSGCLRCSNLSDAWRSAVKQYCGEGSEKSHATLHQDVPRKLLRWSTENSSRNACERSGLNENNQDIGDSSEKQEHLLAVPGVILLCCGLMLPCFHAERKEVSRHDNATIQRNALESVSSYEGSMSSEKVPPTPHRIPPSPSRFAPSPQIARVGSVNLSIQQILRATQNFSPSFKLGEGGFGMVYRAVLPDGNVVAVKRAKKDQFAGPRDEFSNEVDLLAKIDHRNLVRLLGFTDKGNERIIITEYVPNGTLREHLDGQHGRVLDFNQRLEIAIDVAHALTYLHLYAEKTIIHRDVKSSNILLTDSYRAKVSDFGFARSGPSDTEKTHISTKVKGTAGYLDPEYLRTYQLTPKSDVFSFGILLVEILSARRPVELKRTPEERITIRWTFKKFNEGNTREILDPLLEDHVDDEVLEKLLSLAFQCAAPTRDDRPTMKEVGEQLWEIRKEYGKSVRKV

SEQ ID NO: 225922 - protein, 957 aa, Zea Mays
MMLQPVNKYDRDAMLASELGLKQNKQPTEFFCKTLTASDTSTHGGFSVPRRAAEKIFPPLDFTMQPPAQELIAKDLHDISWKFRHIYRGQPKRHLLTTGWSVFVSTKRLLAGDSVLFIRDEKSQLLLGIRRASRPQPALSSSVLSSDSMHIGILAAAAHAAANSSPFTIFYNPRASPSEFVIPLAKYNKALYTQVSLGMRFRMLFETEDSGVRRYMGTITGIGDLDPLRWKNSHWRNLQVGWDESTASERRTRVSIWEIEPVATPFYICPPPFFRPKLPKQAGMPDDENEVESAFKRAMPWLADDFALKDVQNALFPGLSLVQWMAMQQNPQMLATASPAVQSQYLTSNALGMQDGIGSVSEDPTKRLTMQAQNIGLPNLQAGSKVDHPAITPLAQHQQQPHHVLQQQQVQPLQQSSAILQQQQAQLLQQNAIHLQQQQEQLQRQQSQPQQQFKATACLQSSDQHKLKEQQPSGGQAASQVHLLNQILQPSSSQLQQLGLPKSPTQRPGLPSLTTMGSLQQSQLPQTPQPQQTAEYHQALLQSQQPQLQQLSQSELQLQLLQKIQQQNLLSQLNPQHQSQLIQQLSQKSQEILQQQVLQHQFGGADAMGQLKHLQQTPLNHNTGSLPPQQLVRSHSALTESEEPSSSTVPSGSRISPINSFSRANQGTRNLPEMPATPHIEHLLQEIQSKTDNRIKNDIQGSKETVHAPNRHLASDQLDASSATSFCLDESPREGFSFPPVCLDNNVQVDPRENFLIAENVDTLMPDALLSRGMSSGKGICNLPSGQRDHRDVENELSSAAFSSQSFGVPDMSFKPGCSSDVAVADGGMASQGLWNSQTQRMRTFTKVQKRGSVGRSIDITRYRGYEDLRHDLACMFGIQGQLEDPYRTDWKLVYVDHENDILLVGDDPWEEFVSCVKSIKILSSVEVQQMSLDGDLGCIPQTQACSASDDANAWRA

SEQ ID NO: 225923 - protein, 957 aa, Zea Mays; identical to SEQ ID NO: 225922

SEQ ID NO: 225924 - protein, 205 aa, Zea Mays
MAPLLFRDMKGLSCSSQASTATCPSLERHPAPRPHKASAGASPLAPVPAAEPRTRTHRLDGKKGQQPQHKAAVVPANAGGGLVSPAGSSRYLLLSGRFAAVAEEIQEVLEPAPAVDAIAKREEASDAADAKTAQAQEQVSLHCKACAGKVKKHLSKMEGVTSFNIDFAAKKVTVVGDVTPLGVLSSVSKVKNAQLWAAPPAIAAA

SEQ ID NO: 225925 - protein, 57 aa, Zea Mays
MRCGAVSDMRLHKGQQGFCGHPQAIVLSGALRQRAKAKGGLLASRPFHGRTIAPEFH

SEQ ID NO: 225926 - protein, 157 aa, Zea Mays
MLLYNGKTRCAIGLLDHLVHLCYATLCIRNLPRLNRKFQVRDCLKQNEELRSHLEKLRLEQVSLLKVSNIATQSDGQTENSISNPPQMVIENISLKDQLIKEQSRSEGLSAEIMKLSAELRKAVHAQNNLARLYRPVLRDIESNLMKMKQETYATIQ

SEQ ID NO: 225927 - protein, 250 aa, Zea Mays
MPINGLPINRQQSAGTGSFDSHYSPASVISQGSADISDAMDQPPSDYLTRIRLLEQYASAIAGLVRDEIKGGRHLVAFSIQLIVLATWKQAIHLCNTFVASLARESPSQDIHMKGLSADASHLLANSKLADDVCVQIEKQFLSEVEYAEELASTVGQIADGTEMPDAIEMIFQSALLTGRRGGVDEMFGKAADAMTGYTRAVSMLRFLLIEAPSLALNPPLTLTRSDRHRLRTYIEALNTRLCQMQSQRH

SEQ ID NO: 225928 - protein, 371 aa, Zea Mays
MGDGASGRGGRSGAGRRVGEYELLRPIGSGAYSQVWLGRHRVRGTEVAVKEIAMERLSKKLRESLLSEVDILRRIRHDNVIALHDSVKDHGSIYLILEYCRGGDLHAYLQRHKRVSEKVAKHFIRQLASGLKMLRDNNVVHRDLKPQNILLVENNENTLLKIADFGFAKFLQPFALAETLCGSPLYMAPEVMQGQKYDAKADLWSVGVILYQLVTGIPPFNGDNQIQLLKNILRTHEIRLPSDCELSHDCIDLCRKLLRLNSVERLTVEEFVHHPFLSEHAPERTLSRTLSEIRDGFPINNISPTRPSSQSSQEDCMPFPLDDESSGQDEGPIPDSKSPMKSYGFPTVCSPGMSWEIIMHLVANTMAILIK

SEQ ID NO: 225929 - protein, 138 aa, Zea Mays
MKGLSADASHLLANSKLADDVCVQIEKQFLSEVEYAEELASTVGQIADGTEMPDAIEMIFQSALLTGRRGGVDEMFGKAADAMTGYTRAVSMLRFLLIEAPSLALNPPLTLTRSDRHRLRTYIEALNTRLCQMQSQRH

SEQ ID NO: 225930 - protein, 177 aa, Zea Mays
MMHAKSESDVTSLASSRRGRRSGAFAAAPAAAAAATTCRARRGSRTTAAAAGTSRRRCRPRRCTTTAPASRRRTPLRPPLPLLLRQRFSGGSRGRRRRAQGAQRQGLARVQRHRGGRALRGPRRRGQRPLPPLPDRARLPHLRPPLHRLLPRHLGRRPPVRARGRRQEPGDGRLLRW

SEQ ID NO: 225931 - protein, 117 aa, Zea Mays
MKALILVGGFGTRLRPLTLSVPKPLVDFGNKPMILHQIEALKEVGVTEVVLAINYQPEVMLNFLKDFESKLGIKITCSQETEPLGTAGPLALARDKLADGSGDPFFVLNSDVISEYH

SEQ ID NO: 225932 - protein, 361 aa, Zea Mays
MPEAEWNDEHTRIVCELFEEQVRAGNRPNTHLNNIGYRQVAAKFQQRTELLYTKLQLKNKWDKFKNDYITWRKLLVVGKGLPWDTAKGTFVADEEWWKKINKELPGARKFRHGGLHHEDKLNVMFDYITSNGVDPSPPAPESPKNGVNHSPPAATGLPSAPDCALNGVDHSPVTAHGLPSGPYSPMNGMDQLPLPAHDLRSVQEIPMNGVNLDGLDNNTEDNDDIYQEPVFQYTSNRKKRPISFSATKKNKKNKAETALLMQAHLYRITELAQKAQDTFKKFSSQADLVPWPSIQDVMTLVWECGARCGSNEHFIATELFVSREQREMFLTMETAEERFQWLRRKYIVKYLSAIISFGRKA

SEQ ID NO: 225933 - protein, 272 aa, Zea Mays
MGGRREAIERELKKLRAEREELDGRIRLLESQLEAGPAGFNGAAAGKGVGDDACGGSGACQSRVGNEFAPDGSLPADMIYRYSRHLLLPDFGVEGQRKLSQSSILVVGAGGRLGIVDGDDVELNNLHRQIIHKEAYVGQSKVKSAADACREINSSIKVVEYHHTLKPCNALEVARKYDIVVDATDNLPTRYMISDCCVLLNKPLVSGAALGLEGQLTVYHHNGSPCYRCLFPTPPPVAACQRCSDSGVLGVVPGVIGCLQALEAIKVATGVG

SEQ ID NO: 225934 - protein, 616 aa, Zea Mays
MTAIHSAHQHGLHIQNLDHKLNIDNQFEALKCYEMIDRDCRWINATFQSVPTSMGTNMKVDDLVQIESKRASGLVVKGFQVAPPNWVRSSSGLCPVRHPSAGRCRVDGDDPATDGSDQLTQANPLSPGDVLISKDGAFALGFFSAGNYNKSLYVGIWYNKVPEHTVVWVANRDSPVIAPSRAKLAITGKPELVLSDSQGRIRWTTTNSAAAGGADAFAVLLNSGNFVLQTPTGETIWQSFDYPTDTLLLTMRLLLNHKGQVPTRIISWKSPDDPSTGNFSYGIGPNWNLQFFTWYGTLPYSRSNALNDASMSSGMYLSSGASIVYQAIVDTGNRLYYIYTVSEGSPYTRIWLDYTGKMRTQSWNSNTSSWMLVFERPHSSCDLYAQCGPFGFCDSTGDVPTCRCPEGFEPIDGVNYSRGCRRKEALRCGKEDSFVTLPAMKVPDKFLYLRNRSFDQCAAECSRNCSCVAYAYDTLSLGDSNGDTSRCLVWTGDLIDMEKASFHGNLYLRIAGSPVKKKKKSHLTKILLPIIAFVLPLTFTALVWTCKRRGRRQKKKVQKRVMLEYLRSPDEMGDKNIEFPFISFEDIAAATDHFSDSNMLGKGGFGKVYKVITKVS

SEQ ID NO: 225935 - protein, 430 aa, Zea Mays
MAAESCGSRGASPPPPPSAGGAAGRRRKAEAYAEVLRRIRAGAGGYGAARPGLEDELWAHFQGLPARYALDVNVERVEDVLLHKKLLEQAHKPMNGLVFDVRPAQGFTLEESTGFESTTSFKQEEQDPQSSVFTSRDQRPLHEVIFACDDKPKLLSQLTSLLGELGLNIQEAHAYSTSDGYSLDIFVVDGWEYEADILQSALREGVDKIKYRAWPLVPSMSARMDHQPLEVSPSSDFVQIPADAVDVWEVDLRLLKFEQKLASGSFGDLYHGTYCSQDVAIKVLKPERVSVDMLREFAQEVYIMKKVRHKNVVQFIGACTRPPVLCIITEFMHGGSIFDFLYNRRGNFQLPDVIRIASDVSKGMNYLHQINIVHRDLKTANLLMDDQVVKVADFGVARVKDQSGVMTAETGTYRWMAPEVDFAKLLVIKH

SEQ ID NO: 225936 - protein, 177 aa, Zea Mays
MVVGGDPLLELLAVDWFKVNERFDSVALHPKSLVQVPAKPNYNLVMYYAAERPVNKDSLLGRFIDGTDAYRDARFKLIPSIVEGYWMVKRAVGTKACLLGKAVTCNYLRQDNFLEIDVDIGSSSVARSIIGLVLGYVTSIVVDLAILIEAKEEKELPEYILGTVRLNRVNPDSAVSI

SEQ ID NO: 225937 - protein, 139 aa, Zea Mays
MGRGRNRKPRNFATFRLCPRPGAADASERVFVRVDDNPYSVPGFADDDGLSSSTAVRGDGGEPDPSSSTSTDEGGSPLPEHVRREIMELGLPDDGYDYLAHLRELRPSLSSTGGGGSSAVFLPSRRLARSGLPVDVKAA

SEQ ID NO: 225938 - protein, 85 aa, Zea Mays
MVGVLYLVCLLLATLVRTFIPGVFLGLASKPHTCLSHVDSTMSTSPSTFSIDCLDCITIFVYGASFYSPPSPQHIKHTTCVAPTS

SEQ ID NO: 225939 - protein, 85 aa, Zea Mays; identical to SEQ ID NO: 225938

SEQ ID NO: 225940 - protein, 85 aa, Zea Mays; identical to SEQ ID NO: 225938

SEQ ID NO: 225941 - protein, 85 aa, Zea Mays; identical to SEQ ID NO: 225938

SEQ ID NO: 225942 - protein, 85 aa, Zea Mays; identical to SEQ ID NO: 225938

SEQ ID NO: 225943 - protein, 63 aa, Zea Mays
MQKQQQSGSACRQPAATSTSTYKPRAGMNSTPAWIDDIIAQITYQIKLSHEGLIFMQGLTFLR

SEQ ID NO: 225944 - protein, 51 aa, Zea Mays
MLKKEKKNEYDISSLHNVLLDNQHLYIHLTWNKNAGSFIGEFGPLHTETTI

SEQ ID NO: 225945 - protein, 60 aa, Zea Mays
MLKKEKKNEYDISSLHNVLLDNQHLYIHLTWNKNAGSFIGGEYIIMNYILNLTVKYSLLV

SEQ ID NO: 225946 - protein, 57 aa, Zea Mays
MGTHLMAIYNFDMRFILRLCVPIKAITISCMCMSLGYPFFFIDLFIYIAYCLLAYFF

SEQ ID NO: 225947 - protein, 423 aa, Zea Mays
MEEVDINNKQRKLEKRKLPQGTSEYQAAWIVEDTDDEDNDSDDDNQTESGMVIDEQGHSDQGSDGSDIDAVSHFTEKFDGETIGDTEMADEENLTKDQIEAEIKKIKEANADDEEFPDEVETPLDVPAKKRFAKYRGLKSFRTSSWDPKESLPLDYARIFAFDNFTRTQKHVFAKIAELDGGMKNCAQVGSYVRLYVKNVPTDIASKLCHPSRRIPVVVSGLLQHESKMSVLHFSIKKHDSYEAPIKSKEPLIFNVGFRQFTARPLFSSDNINCNKHKMERFLHHGRFSVASVYAPISFPPLPLIVLKNRDGEQPAIAAVGSLKSVDPDRIILKKIVLTGYPQRVSKLKSIVRYMFHNPDDVKWFKPVELWTKHGRRGRIKETVGTHGAMKCLFNSSIQQHDTVCMSLYKRAYPKWPEQLYHV

SEQ ID NO: 225948 - protein, 229 aa, Zea Mays
MSSLSSGISASPSAAPSTARRRHDAAPQQLRVKAAARPQLLHAGRRRSSVGRRPGGGAVVVRAGPGPLSEIEPDLEEDAIDVYRTNGISPEDFEYGKYDGHHTYFEGQDKKGFWEDVSEWYQEAEPPQGFQALISWAFPPAIILGMAFNVPGEYLYIGAAVFIVVFCVIEMGKPDKPHNFEPEIYMMERSARDKLIADYNSMDIWDFNEKYGELWDFTVNTRDDIVKST

SEQ ID NO: 225949 - protein, 296 aa, Zea Mays
MTGSILLRNGRLSDVLGELQEIMKGVNQGTSSGPYDIALIQAQIRNLAQEVRDLTLSKPITILNGKSDSGGSLSSYILPAAAVGAMGYCYMWWKGLSLSDVMFVTKHNMANAVQSMSKQLEQVSSALAATKRHLTQRLENLDGKMDEQVEVSKAIRNEVNDVKDDLSQIGFDVESIQKMVAGLEGKIELLENKQDVANTGIWYLCQVAGGLKDGINTRFFQETSEKLKLSHSAQPENKPVKGLEFFSESTMEQKVADSKPIAVTVDAEKPEKTAAVMGTTVHRSIRFSYRKAGLAL

SEQ ID NO: 225950 - protein, 521 aa, Zea Mays
MGTPLLIPLLVTLQLFTTSSPAVASSHISAIISQSGLDFAKDLLVSHAVATLTPMNVPDIERTMSIPLVGTVRMAASGIVLHGLAVTNSTVAVGDAGVVVAASLASANLTMEWNYSYDAWIVTISDSGNASVQVEGMEVGVSMVMKNQNGSIKLSVTECSCYMEDLDITLNGGASWFYQVFIDGFSNHIISSVENAIKNKVMEGALKLDSFLGNLPKKIDLDSVAAMNVTVVNDPIFKSSSVEFDIDGLFIPSDETAPRDMHLGDTQFALPLGSSSKMLWISLDEDVFNSVSALYFKAGLLQRMVDKIPDQFFLNTASWRFLVPRLYREFPDDNMLLNISAVSPPSVRINVGRIDATVDLDITVNVLDFGEIVPVACLSVSVDVYGAAAVSENNLVGRVELDYFSFTLKWSKVGKLHTILVQTVLRILLKKLFVPYVNSYLKHGFRLPIIKGFSVTDAYILTSYSRMIVSCDVAFIEPEVLSPVQESNTNEDLSYEVLSPVQESKTNEELTNEDLSFERED

SEQ ID NO: 225951 - protein, 337 aa, Zea Mays
MAAPAAASAPRRQWRYTWEALTHLPLLRLYLFPRPAFSSSFPSDLRADLRLQGSLLHLSFSLPGDGATIALRVPVPRVLIDPSAPFECRAAAAGDHLELLLALVLPVDHPVVAAAFPPPAGAELPAPLALRDDLKGLSTGDVHLYCRNCSSRLTKQPLSGLHFAPLEMSSLVPADGRVRLFKCYTSTEIPVTGSHDVFRGHTLERVFVNLLLEVAEDEISFRTVVRDLKTKRPMLQLVLLSSKAWLSSGWCYENDTNGSHGTTDLQPSVKLLYSDYRNASEADLRTVEEWASKYRAEELYMMRRQIDELTECLGSAMDNFPVSCSSLEGLLLSSLRR

SEQ ID NO: 225952 - protein, 297 aa, Zea Mays
MPGGVQHWARFLDHAAIVVVDGGGESSPAASKWALCTRTDVEEVKQVVRMLPIWATTIMFWTIHAQMTTFSVAQAEVMDRALGGGSGFLIPAGSLTVFLIGSILLTVPVYDRLLAPLARRLTGNPHGLTPLQRVFVGLLLSVAGMAVAALVERHRQVASGHGATLTVFLLMPQFVLVGAGEAFTYMGQLAFFLRECPKGMKTMSTGLFLSTCALGFFFSTLLVTIVHKVTAHAGRDGWLADNLDDGRLDYFYWLLAVISAINLVLFTFAARGYVYKEKRLADAGIELADEESIAVGH

SEQ ID NO: 225953 - protein, 151 aa, Zea Mays
MAAAVTLLRLPLARLSYHLRSVPSSRLPSPRLRIFASHRLFSSLDHGSASASASAAVAEVVGVPDAEESVEEESAAEAEAEAPRSFVLPRLPRPKLSVKERKELASYAHGLGKKLKSQQVGKSGVTPNLVSAFSDNLESNELLKLLGFSHQ

SEQ ID NO: 225954 - protein, 169 aa, Zea Mays
MQASRARLFKEYKEVQREKSADPDIQLICDDSNIFKWTALIKGPSETPYEGGVFQLAFAIPEQYPLLPPQVRFLTKTFHPNVHFKTGEICLDILKNAWSPIWTLQSVCRAIIALMAHPEPDSPLNCDSGNLLRSGDIRGYQSMARMYTRLAAMPKKVCVQEGFKCKNHM

SEQ ID NO: 225955 - protein, 169 aa, Zea Mays; identical to SEQ ID NO: 225954

SEQ ID NO: 225956 - protein, 158 aa, Zea Mays
MFTEEQNELVESAAEMLYGLIHARYILTSKGLAAMLEKYKNYDFGRCPRVYCCGQPCLPVGQSDIHRSSTVKIYCPKCEDIYYPRSKHRRRILWDNVPSSVPDDIRAPQATEALAALCSSCLWLQAPQAMNLMYLSFKLLKTWHWGHAGVLQSLKTCI

SEQ ID NO: 225957 - protein, 699 aa, Zea Mays
MLYGNLSVARTWGNYLQMVDLSSNRLTGSWPNETTQFLRLTSLRISNNLLSGELPIVLGTYPELIFIDLSINQLHGPLPGNLFTAVKLTFLNLSGNSFTGTLPLRNSDTKNSTSIDLSILPVQTSNLSYVDLSSNFLHGSLPMGIGDLSALTLLNLRQNNFTGEIPRTITKLKNLLYIDLSSNNFNGSIPDGLPDDLVEFNVSYNYLSGSVPSNLLKFPDSSFHPGNELLVLPRSESLNGSDKSDEARHGLKRGILYALIICVVVFVTGIIALLLVHWKISSWKSREKGTGQGKHVGQVQSAQRSAEISTTEMHDVALESSPSAEYGAVSLPGKERRHEAQDAPIDAAYFNEPAGSSSARKDSTKSSMPSLSSSPPDARSQHHHSILRVHSPDKLVGDLHLFDNSVVFTAEELSCAPAEIIGRSCHGTSYKATLDNGYMLTVKWLKEGFAKSKKEFSREIKKLGSVRHPNLVPLRGYYWGPKEHERIMISDYADATSLSTYLSEFDERNLPPLSAGQRLNIAIDIARCLDYLHNERVIPHGNIKSSNVLIQNSTPSALVTDYSLHRLMTPIGMAEQVLNAGALGYSPPEFSSTSKPCPSLKSDVYAFGVILLELLTGKIAGEIICMNDGVVDLTDWVRMLDLEERVSECYDRHITGVESSEGAPQALDGMLRIALRCIRSASERPEVRTVFEDLLSLSS

SEQ ID NO: 225958 - protein, 274 aa, Zea Mays
MTDQERDDVPMLLRNVELPRFPLRSTSMCIPVRDDDYEEDTFVPHTGPLFVQPSTQTAPGISFTGRDTPDRLPKPSQGKQVSKPHAIMPEEIRGNKWSYSGQVPKNEHLMMSGPLGQCDNPDCVNCPPACKNRRHFQRGSNALDNKIHNILYGHSRGWKKKIEQIMACIPIMNPHAKPVQRWNQFFVISCLIAIFIDPLFFFLLSVRQDGNCIVLNWEIATALAVVRSVTDAIYFLHMLLQFRLAYVAPESRVVGAGDLVDEPKKVAIHYLRGY

SEQ ID NO: 225959 - protein, 274 aa, Zea Mays; identical to SEQ ID NO: 225958

SEQ ID NO: 225960 - protein, 545 aa, Zea Mays
MAEQSFKEALGDGLWVSIMDGKVGSSMINWSVQNKDQSFFHQLEDAYLRLAAIAKQRNNVQLSIELIGDALKIDEKNPNALSMLGSLELQSDEAWLTAKEHFRNAKEATKGDTYSLLQLGNWNYFAANRPEKKAPKIEATHREKAMELYQTQVLKQHRSNMFAANGIGILYAEKAKWDVAKELFTQVHEAASGSIFVHMPDVWINLAHTYFAQGHFQQAVKLYQNCLRKFFHNTDATILLYLARTHYEAERWQDCRKTLLRAIHLAPSNYLLRFNVGVSMQKFSASTLQKTKQTVDEVRATVTELQNAIRVFSLLSVASTYHSHGFDERKIETHVEYCKHLLDAAKVHRDAAEQAEQQNKQKMEVARQIALAEEARRRAEEQRKFQLERRREEDELKQVKQQEEHFQRVKEQWKTSSNTPGKRKDRSKTEDEEVGNKKRRRKGIRRKDQKTKMQYGEEEDEYKDEPEADDDYADLARYNGADNSERAPDHLLAAAGLDDSDAEDDMGHPQSAIERKRRAWSESEDDEPVKKPAAQPSPGADGLSE

SEQ ID NO: 225961 - protein, 149 aa, Zea Mays
MSRLVGEIVRNGRRCLHPRRPVQLWRPPARDVHGEAADGCLVPGRPDSAELRRVLLPGQGTGGSRPWPTASAGQRVFERRGRLLRRDRRRKAAQVHGVGISSRLAMLPGTTQSENACRDCHQRTRGGQGCPAKRLSLDRISRQQKHNKT

SEQ ID NO: 225962 - protein, 524 aa, Zea Mays
MGKKAWLTAVKRAFRSPSKDDSSSPARKASRLREDADGEDDKGKRERRRWLFRRSSSPSPAPAPPAPAPAAVTEEQRHAIALAVATAATAEAAVATAQAAAEVVRLTRPGGHAAAPSFARRDHHAAVAIQTAFRGYLARRALRALRGLVKLQALVRVQARVRDRRMRLSQESVLSMSGGGGGAGAAPCGSSKSSYSVDTSAFWDPKYAHDYADRRSVERSRDGSSFAADDWDDRPRTIEEIQAMLQTRKDAALKRERALSYAFSHQIRRNPAAPSADMDVDVDVDGQPRWAERWMASRASFDTSRSSVRGAAAAAPGRASMEQHREPVKTLEMDTARPFSYSTPRRHAGASSPMHRAQQNQHHPAVATPSPVKARPPIQVRSASPRVDHHHRGTGGGGGSYTPSLLHSQRHAAAVPNYMAATESAKARVRSQSAPRQRPATPERERDRGAKKRLSFPAQLQHQVLAAEYAQSLRSPSFKSAAGRFSSEQRSTVSSSCADSLGGGCGGDVGSPSSSAADLRRWLR

SEQ ID NO: 225963 - protein, 264 aa, Zea Mays
MTFFESVSLVGSQEITNVLVSDDDSRFLLPYAFAATLSVVGILYIRNASSTCQHASAIGSYQKSFLAHVLRDKRVLILVLAQASIHFAVSAFWFLWAPTIVADGRYAQLSVIYPCFLASRMLGSAGFPWFYGAIAPFRNEDSLTIAYVGAGLALSIVAYDYQEIAPLVIVFCIFHACVGFILPSLARLRTMYLPNELRGGMMSFSMSLANAATFVFLIQGSAHHRHVANSTILSLASYGLLGAGGCVHMLRRWRKHTRLNARSL

SEQ ID NO: 225964 - protein, 264 aa, Zea Mays; identical to SEQ ID NO: 225963

SEQ ID NO: 225965 - protein, 75 aa, Zea Mays
MERHAEKPLLVLPSCLLFLVLLLAPLVSAVPTPRSLRLGSHQQHPPPALKLSYSQVLAIGCFRQVSPACCRVSPS

SEQ ID NO: 225966 - protein, 950 aa, Zea Mays
MSRFLSPSSPSNPLPLSEKKVILSGVQAPTRSGPPPPPPNKLGHAQQLMRSLRGVLIPLVLLAGLAFRVDDGGAALLPLPPPALPASPSRLALPGGTPKDDGAAASRSTEVVTAGVRSTEIVAPVGPKKQSLRELLVRPQPARHEPSSLVSGEAKAETRSVLQFYDNGTIQLVDKLSQSPLWEIATGPPLSDHITTTESGPNYLIYPFNGNENMNGNSTELWEVYNGNSVRLPWKLEEFVARSPYIRDSVVTIGSKVSTVFVVDADSGEIIYRHSIPSALKELEGPGVEGAPSKLNVRTSDDSDNIIVLVRTDYSLSASDLGNHLFNWTRTSFTANYYVKYKHPDMLDQSSCLQGDIPCIRTEGLPLALPDLNSANVIVLKDGTPFVSMHGSDALEPVQTPRKLPNTAGKSNILLDDSQNQTHDVARSHAISADPEATLNPTRNTSGWLFPLFPIFLVTGYLLSLISASKSCRQFMIQLIEPFTHNKKTVDIRGRSEGTPKKRKTRKKDGLVNSSETLTASDKECSDTGGSTEAPMKNSALTDALGGRQIGKVYVSNKEIGRGSNGTIVFEGSYDGRQVAVKRLLRSHNDIAEKETRNLIISDHDPNIVRLYGCDHDSDFVYISLERCHCSLADLIQKQSYLSSGESISNNEVSMSINSKISNVKGIDVELWTQDGLPSAQLLKLMRDVVAGLVHLHNLGIIHRDLKPQNVLISAEGPIRAKLSDMGISKHLQDDMTSVSHHGTGIGSSGWQAPEQLRHGRQTRAMDLFSLGCLIFYCITKGKHPFGEYYERDTNIVNNRFDLFVVDYIPEAVHLISQLLQPNPETRDTSDRIEKTSETDLINALESIGPVAFGGKWGEKLDAALVTDMGRYRKYNFESTRDLLRYIRNKSGHYRELSNDLKGILGSLPEGFDHYFASRFPKLLIEVYKVLWVHCKDEEAFSKHFNGSSL

SEQ ID NO: 225967 - protein, 210 aa, Zea Mays
MEGVKSKQSHDALHLEVRSLQRNLQHASTLMDLCNQKTIRLEDQLRGWSERLRRLSEDGMQQSISLGNYQKKLSGMHGEAPKLRQSMDVLQAKAGSNRLEIAELLIELENERFGKKRLEDDLDLMSSKANSLREKTDNSAVLQKLLHEAKEYRGILKCGICHDRQKEVVIAKCYHLFCSQCIQKPLGSRQKRCPSCGLSFGVNDVKPIYI

SEQ ID NO: 225968 - protein, 510 aa, Zea Mays
MATSFGFGSSATAGSTASSPFSSTPSAFSFSQPASASSPAPAFGSSLFSSSSAAASSAPTFGSSLFRASSAAAAPASSPAFGFGSTFSFGQSMAAASSAASAPSLFGATPASSAGTTLSLFGAATSAASSPGFFGATSTAASSPGLFGASATGSAATSPSLFGGTSGLFGGTSSAATTPSPFGATSSTAATVSPFGAASSAASTPSLFSGGATGFSFGSSASGSTTTTAAAPAPSFGFSFNSGPAASSTASTPTSAPALGFGGATGSSLFGSTTSAPLFSTTTASSPASAATTTPSFGFSSSPATTASAPSFGFTPSSGSATTANTAPSLFSSSATTLTTPASSSSTGFSLATSQAAPAPSLFSTSAIVAPSSSAAAATATTTTVTSASTSAGMTTTAPLTGTTGFPNFNLQTTTPASTSSPTLAFGVSTTAASSSATSTTTQATSSAVQVSSTGPTTTTSITPAASQAPKLPSEIVGKNVEEIIRDWNNELQDRTAKFRKHATAIAEWD

SEQ ID NO: 225969 - protein, 51 aa, Zea Mays
MKVKILQWHAVASWTWDAQDETCGICRMAFDGCCPDLGQFSNIHTPLPHVP

SEQ ID NO: 225970 - protein, 419 aa, Zea Mays
MYPAFKGDKSKILPVKMPICSCEETIHEFEMLTRDAGRVQKDTLKKILELNADAEYLNKFGLNGRTDVESYKSCIPLCVHSDLEPYIHKIADGDSSPLLTGKPVTSLSLSSGTTQGRPKFLPFTDELLETTLQIFQTSYAFRNREYPIGRGKALQFIYGSKQVVTKGGILATTATTNLYRRARYKEGMKDIQSQCCSPDEVVFGSDFHQSLYCHLLCGLIYSDEVHQVFSTFAHSLVHAFQTFEEVWEDLCADIRDGVLSEKVTVPSVREAVTKILKPNPELADSIYKKCTGLSNWYGVIPALWPNAKYVYGIMTGSMEPYLKKLRHYAGHLPLISADYGASEGWVGANINPTLPPEQVTYAVLPQTGYFEFIPLEVENSASSIHYLESEPVGLTEVEVGKTYEVVITTFGESAQLGCI

SEQ ID NO: 225971 - protein, 56 aa, Zea Mays
MMYRMCVFGDLLVAFAEGVNLATVCTSPVTYIYKSAKMNGFTYSLQFFIECFTFPF

SEQ ID NO: 225972 - protein, 344 aa, Zea Mays
MFIINAGQGFRLLWGTVKSFLDPKTTAKIHVLGNKYQSKLLEVIDASELPEIFGGTCRCEGGCMKADKGPWKDPEIMKMVQSGDGRCGSLGTASFEAPEKMICEDDTYPKKQALFDGETQLAGDEHSQSQKISRGRIEHPHVSPLHEELIPTSIHTPGSPYSCDVPMVEEAIDAICKSHGTPPDEKIAITKAIINVSNGSKPPLFAGIIALVMSIATMVRLTRSMMPGKVLGAAIGGATLSEGKSKVQERQRSKLSEEAVEEAEDAVSAKRLSELEEKVIALLTKPASMPADKEEVLQAAVSRVSALEEELAATKKTLQETLERQLEIVAYIEKKKKSKRFFRW

SEQ ID NO: 225973 - protein, 154 aa, Zea Mays
MGSCSTSHDDDAGGSREAAWGRTRHGAPPNADAATLATRCPCPCPCRGGFWTWSPRSRSTTRRRGGAGAGTSSTCRDGGRPEIDPSRCGDRWPGPAPHALELGDDSATTLDGDGSTTTRTRNGGAMGLARGSARRLRPHGALVVGLRLNRIVYI

SEQ ID NO: 225974 - protein, 245 aa, Zea Mays
MAICSAHTTTSLRSPCTTVSNAGLRQKQVIFVTSNRRSGGGRRHGGARSFQVSCSVDKPVVIGLAADSGCGKSTFMRRLTSVFGGAAEPPKGGNPDSNTLISDTTTVICLDDYHSLDRNGRKEKGVTALDPRANNFDLMYEQVKAIKEGQAVEKPIYNHVTGLLDPPELIAPPKIFVIEGLHPMFDERVRDLLDFSIYLDISDEVKFAWKIQSVGTALKASRPVSRPGNQILMPLLIRRSSMLML

SEQ ID NO: 225975 - protein, 260 aa, Zea Mays
MSSGGATIRTQGITSDPAPNRDNPNESLLVGSSTVHVEEMMLDTTVTVQTDTRSSGAFSGFVELDDVSTESIKISAPLFLRPFGPRAIVQHKGSPLQLICPGLEVLWVNTKGFPNSPHRPKVGIKVDIPENLSKVLGFCDDLAQSSSSSPGPGAICSNSRWKSLIERDADRRPTVWLKIPTFGSGDTAACRTHVYEKECDGVVPRLVSERVDPSELASMLQGNKVVDAFVSVETFDHYQSAGIRLVANRLDVHFKRQQQA

SEQ ID NO: 225976 - protein, 228 aa, Zea Mays
MTELAKAHAKALMPSFGDGRDDQRAIEVLTHEITDLLKRSEKRLQKLSMKDLSEDSNVRKNVQRSLATDLQNLSMEFRKKQSSYLKQLRQQKEGQDGVDLEMNMNGTKSTFEDDEFDDVGFTEIQMSKLKKSEAFTREREREIEQVVESVNELAQIMKDLSVLVIDQGTIIDRIDYNIQNVAASVEEGYKQLQKAERTQKKGGMVMCATVLVILIFIMIVLLILKTIF

SEQ ID NO: 225977 - protein, 298 aa, Zea Mays
MAASSRSRPLSKLSPSHLVPLDLSTSWCCTPHGLGGHAPHSSSSSSSSHPSSPARAAAHHMDPPPTSSTVASSYATPPQPSYAPSYPTSYTKFNSALNAGLLNPMSPPPLPLDKTRSSPTLFDMMANEQDYHPRTAAGIHSIPAPPQPHQLPPARSMDRQMLLQDRIADLIGSCSPGNQFNDADSSDVRLTLSSKDGLSVTLCVHRHILVAHSRFFAAKLSDRWSKQQRTLPHIVEISDCDDVEVYAETLRLMYCKDLRRRLMREDVNKVLGILKVRSHCIRCRGVVLLGVLGGCALG

SEQ ID NO: 225978 - protein, 82 aa, Zea Mays
METAKWICVGAIDITQLSVAGYLLSTGKLYYALVLLGLTIPQVFFQFQYFLKDPVKYDVKYQASAQPFFVLGLLVTALATSH

SEQ ID NO: 225979 - protein, 221 aa, Zea Mays
MSSDSSLTESLHERTIVFGLKLWVVIGIAVGASLLGILLILLICLTIQSCIKRSRKPLNDRRLHQIPPAYKDIKEVGMVDQFPAKDFVVHDGLLLTIQNGPEPVEPVDRDAIQLAQEEKLKQREETNVSASFPIMDGCEGTQIVSVDEQSSTHATVDSAPLAGLPEFSYLGWGHWFTLRDLDLATDHFAKDNVIGEGGYGVVYRGRLSNGTPVAVKKILNN

SEQ ID NO: 225980 - protein, 389 aa, Zea Mays
MSSDSSLTESLHERTIVFGLKLWVVIGIAVGASLLGILLILLICLTIQSCIKRSRKPLNDRRLHQIPPAYKDIKEVGMVDQFPAKDFVVHDGLLLTIQNGPEPVEPVDRDAIQLAQEEKLKQREETNVSASFPIMDGCEGTQIVSVDEQSSTHATVDSAPLAGLPEFSYLGWGHWFTLRDLDLATDHFAKDNVIGEGGYGVVYRGRLSNGTPVAVKKILNNLGQAEREFRVEVEAIGHVRHKNLVRLLGYCVEGTQRMLVYEYVNNGNLESWLHGELSQYSSLTWLARMKILLGTAKALAYLHEAIEPKVVHRDIKSSNILIDDEFNAKISDFGLAKMLGAGKSHIATRVMGTFGYVAPEYANSGLLNEKSDVYSFGVVLLEAITGKPG

SEQ ID NO: 225981 - protein, 302 aa, Zea Mays
MSSDSSLTESLHERTIVFGLKLWVVIGIAVGASLLGILLILLICLTIQSCIKRSRKPLNDRRLHQIPPAYKDIKEVGMVDQFPAKDFVVHDGLLLTIQNGPEPVEPVDRDAIQLAQEEKLKQREETNVSASFPIMDGCEGTQIVSVDEQSSTHATVDSAPLAGLPEFSYLGWGHWFTLRDLDLATDHFAKDNVIGEGGYGVVYRGRLSNGTPVAVKKILNNLGQAEREFRVEVEAIGHVRHKNLVRLLGYCVEGTQRMLVYEYVNNGNLESWLHGELSQYSSLTWLARMKILLGTAKPCLLT

SEQ ID NO: 225982 - protein, 326 aa, Zea Mays
MSSSSGCNRGRAVLPVTASLVPFLLLLVVVSCQAALVVSATHTHGHGGGKHAGAARAAFRAGDEQEAYARIMARMARMDKDSNMTIQSPDGDVIHCVPAHLQPAFDHPRLRGQEPEDEPVERPMSKGGAAEEEAGVFPQAWSDGGSKRCPAGTVPIRRTAARDVLRASSARRFGMKARGGGSSSSNARRDSTSSGHEHAVGYVTGDQFYGAKASLNVWPAKVASAAEFSLSQIWVISGSFGNDLNTIEAGWQVSPELYGDSSPRFFTYWTTDAYQETGCYNLHCSGFVQTNSRIAIGAAISPTSVYNGRQFDISLLIWKTDVRARA

SEQ ID NO: 225983 - protein, 472 aa, Zea Mays
METADYSGKLFVGGISWETDEDRLREYFGRFGEVTEAVIMRDRSTGRARGFGFVVFADATVAERVTIEKHMIDGRMVEAKKAVPRDDHSIVSKSNTSSIGSPGPGRTRKIFVGGLPSNVTEADFRGYFEQFGVITDVVVMYDHNTQRPRGFGFITYDSEDAVDKALHKSFHELNGKMVEVKKAVPKEQSPGPVARSPAGVGQNYAMNRVHSFLNDFNQGYNPNPIGGYGMRVDGRFGQLSGARNGLSSFGPGYGMGMNVEGGMSGTFGANSGFISNSNGRQMGSYFNGSSNRLSSSIGYLGYDSGSMLSSMSRNFNAGVNYPINPTNMSAFAALGNGGGVNYMGLPSIAPELAQLGNISSLGSGNFSRGAGVNNLSLPSGSYGRSNSTGTIGEPFSASGNAYEVNNPDTYGNSSIYGGTSWRFPSSEVDVPSFSHDLGNVDPNMKSDISANYMGNYSVSNNQPSRVTRCFFF

SEQ ID NO: 225984 - protein, 267 aa, Zea Mays
MVRAVSSVTSGAAKLHDLSAPILTSQTKYLELLARYYVRKGERIAAARMFLILAERQCSNSEEVPTLDKRYEYLRDAVLQAKSAGIEADSSRKPIDSSTVDLLEGKLTVLRFQMQIKQELELMTARVENISSSSESPSGLFPRDNILADAEAAKAAKDKAKELSLNLKSITQLYNDYAVPFELWEVCLEMLSFANYSGDADSKILREIWARLLDEALTKGGVAEACSVVKRVGSKLDPADGACLPLDIICLHLEKAALIKFRRRISR

SEQ ID NO: 225985 - protein, 1081 aa, Zea Mays
MAWGEDEAIGPDVASAGLHVSERIGRDAAAQPDLEEALEASRYASHPYSSHPKEWPPLVEVAEIRQLPPMLIERYNTAAGEGTALCGIFSDIHRAWATVDNSFFVWHFDKWDGQCQEHNVDEQAICAVGLARAKSGIFIEAIQYLLVLATPVELILVGACCSASADGTDPYAELSLQPLPEYMIATDGVTMTCITCTEKGQIFLAGRDGHIYELQYTTGSGWRKRCRKVCLTTGIGSLLSRWVVPNTFKFSTVDPIVDMVMDEERNTIYTRTEGMKMQLFDLGANGDGPLTKITEEKNIVDPLDAPYGGRRTNAPPPRTARSPKPSIVCISPLSAMESKWLHAVVVLSDGKRLFLTTSGGIGSSVGLNSGLRRPTCLKIVATRPSPPLGVGGGLTFGAVSAAGRVHPEDLALKVESAFYSAGALIMSDSSATAMSSLLAVQKGSAAQLSLPSTFGTASRASRALRETVSALPVEGRMLCASDVLPLPDAAYMLQSLYADVECFTGFRKPFEKACIKLWAKGDLPTQHILPRRRVVVFNTMGLMEVIFNRPVDILRKLFDGNTLRSQIEEFFNRFGAGEAAAMCLMIAAKLLYAEDSLISNSVSEKAAEAFEDPGLVGMPQIAGTTALSNTRTQAGGFSMGQVVQEAEPLFSGAYEGLCLCSSRLLYPIWEFPIMVIRRPAGTNKCEDGVIVCRLSAGAMEILESKIHSLETFLRSRRNKRRGLYGYVAGLGDSGSILYKTGPIIGPGGHSNGRSPYNSQIQDMDPADKSASNKKPRLLYTSAELAAMEVRAMECLRRLLRRSGEALFLLQLICQHNVARLAQTLGNDLHKKLVQLTFHQLVCSEDGDQLAMCLISALMEYYIGPEGRGTVEEISTKLKEGCPSYFNESDYKYYLAVECLERAASMANNPDERDILARDAFNLLTKIPESADLSAICKRFENLRFYEAVVRLPLQKAQALDSNADITNGQIDPRHHDTIMLQREQCYEIVMNALRTLKGVGHSRMQSADKSSGVATAVDPASRTKYIKQILQLSVQWPDTVFHEHLYKTLIELGLENELLEYGGSDLASFLQSAGRKHQEEV

SEQ ID NO: 225986 - protein, 395 aa, Zea Mays
MRTRHLYFTSLGMEVQVLDLSSDSEGEVSAHSPDHKRPSQQPGVDPNRRVGDNGSSAVDSLFEEAGAARPPRHPSDALNKGKEKVVDVESVESPKHGGESLGAAGRVLGAGSDPWSALVSKCKAGDSGNNGTECWDSWGDWGDQLTNSAPVARLGSERTGFHETYELRGTPQLHSDSSAFSDQWKGILGASPADPVNSLWCSRDTSMKDSEDETLSQRSVSVREISSCDYFLTEDSSSSWLSKVKGLNFPLPDEHQLRTRQIENDEMFARRLQEQLNQQQPGSQHSEAVDKTIAWTLHEQDAEHARFAAREVQSSSRDRSMAHLYSYGRHSPVQSFASWASNHTPISMSSRGGLQRNSNCPQAEQRNMLISQLTRGCFREDMDLQTRLGCTGLTF

SEQ ID NO: 225987 - protein, 554 aa, Zea Mays
MASAAVETLVSFPIASRPRSLLRPFPRRPAAAAAAGGCAPSIRISAVPPRGLGLALVHRRARRCPPAARANVEHGGDGASGNGEPSSSSGDGDRDAAADSGGDTTGTSTTSAAQTPPPPSSKRGENKWRRRLTKGGGVGRWLWEPIVQGREMGFLLLQLGFAVFALRMLRPEIALPGSEPRPQTTYVSVPYSDFLASIDKDQVKKVEVDGVHVMFRLRPEVESQVRVEQTPSQRGTDAVVDNAGVSRRIVFTTTRPVDIKTPYEKMVENMVEFGSPDKRSGGTLNSALVALIYVVLIAVVLQRLPISFSQHSAGQLRNRKNSNSGRAKVSESTDIVTFADVAGVDEAKEELEEIVEFLRNPERYVRLGARPPRGVLLVGLPGTGKTLLAKAVAGEAEVPFISCSASEFVELYVGMGAARVRDLFAKAKKESPSIIFIDEIDAVAKSRDGRYRIVSNDEREQTLNQLLTEMDGFDTNSAVIVLGATNRADVLDPALRRPGRFDRVVMVEAPDRFGRESILKVHVSRRELPLSKDVDLADIAAMTTGFTGPCKLGK

SEQ ID NO: 225988 - protein, 184 aa, Zea Mays
MPRDRDEPAAVRVYTVCDESRYLIVRNVPSLGCGDDLASLFGTYGPVEECTPMDAEDSEPYTDVFFVKFSQVNNASSSLPAAQVLPSFLAVKVQNQRPPFEMQNWCSCCRFAKRKLDESVFLGNRLQVTYAPQFESPQDTKEKLEVRRKEVLGRIKSSAGRPEGSSPAQGSSSGNHHQMNSNKS

SEQ ID NO: 225989 - protein, 1489 aa, Zea Mays
MASSSSFAPDDQTDADFFDKLVDDDDPATSLPDDPPIPEPQAPPEGSGKGGAGVHTAVKQVQWASFGGGADDGPDPFAHLSGGAGDDDGFLVTTAGTQTASDHAFFGGTQSLAAEVTDQDFFAGSNSSNQHNVSGQHDQGGGSTAVDSADPMSLEAMYPGWKYDEASQQWYQLDDSVNSTGNAAQVLDNSTRYAQQQQQLHASYLHNSVHSGLETIAEEGTTATGAVSSWGQGAASEYPPNMLFYAEYPGWYFDTNTQQWHSLELYQQAAMQAGTASMGQTVIANDGVAATSSLTGYNAAQNEDLAAHDQVTQHNSFSNSFAHQNQWQITDAFGNNVRSECATENSLASSSYGFQQHRNADSTSSSTNQRAGFNAAETVTDHYGGRKGVESPSIQSGYSTSDIQQSSHKAFEPYTGYQDHYKAFEPATGHHASNNMFKQSTGNQGGYKAFEPAMDNQSGYKAYEPSMGHHSASWEPVPSTGHQTDFKGSGASTVHQAGYKEFETSTGYNTSLKAFEPSSSQHAGYMGSQSNYMGFDTSTNHHGYGDANVVASTQGFVPMQTTYQGQTQAIANSQVHLSNSYLGIDNSMNFNQQQFLGANASNLQFSHSPHDGRAGRPPHALVSFGFGGKLIVMKEASSMPASFNNGIQGNSSGTVSVLNLSEVVMDKIDSSSITNGSALSYFHALCRQPVPGPLVGGSAASKDVNKWIDEMIAWYDSSSELQRSDTRKLLISLLKILSQHYGKLRSPFASDPSQEETDGPEMAVTKLFSSFKSTVNMGDYGSIVSCMKNIPSESQMQEVQNLLVSGRRKEALQCAQGGQLWGPAIILALQLGDMFYVDTVKKMAHFHFVSGSPLRTLCLLIAGQPADVFNVDNNVNIDYGTSHQPMEPGPNGMLDDWEENLAIITANRTKGDDLVITHLGDCLWKEKNEIAAAHSCYLVAELNIDSYSESARLCLIGADHLKCPRTFASPEAIQRTEVYEYAKVLGNSQYILLPFQPYKLIYAYMLVEVGKVSDSLRYCQASMKVLKASGRAPELEVWKQLISSLEERIRTHQQGGYGTNLAPAKLVGKIFTSLDKSISRMMGTPSAPLPPLPHGSVSDRESHSMPEAAKFINSQSVMAMSSLMPSASMQSMTEIAENSDGTGRKMAHNRSVSEPDFGRTSKQGGGSDGTQSSAAGSGSSRFGWLVQKTMGLVSKSHRQAKLGDQNKFYYDEKLKRWVEEGAVVPAEEPPLPPPPTKSSFQNGMPDHKLNGHMSVGHAPSGVTEWKSSNYSEQGLGMPPIPPSQNQFSSRGRMGVRSRYVDTFNKSGASGAVPSYNKPAAPSVTPPAGAKFFIPTAAPVAADQMMPHQAAEIHSETMQQDERAASPPAGTSFSSTPPPTQFSSPPPHTQFSSPMQSTIHRQSSMANISTPYQSSGVSSLSSDTSFSKSRAASWSGTYSEQFSAFAGTRSPDGQTVRSPLMPGKPSHSRSNSNSSVQLNGLTEDLHEVEL

SEQ ID NO: 225990 - protein, 128 aa, Zea Mays
MNVIVTSSSTRDRGRTSTRRTRAAPKNNDQLLAMSTITSEVDDEIVDVKPIVSMSVEGWNTSNSKKSHSRLDNIIMEAIKNLNEPTGSHRTTIANYIEEQYWPPSDFDHLLSAKLKYLATSGKLLKLT

SEQ ID NO: 225991 - protein, 105 aa, Zea Mays
MENPASVLVLPAQFTKLTFGNLYIRRAGPGSREITEEGSVCTASPFVLASPSTPSSSPILTALGRGAPLGDGVDSGAMFERSTLATPRMSGKSREHTAHLKVPLR

SEQ ID NO: 225992 - protein, 333 aa, Zea Mays
MSGNSHGGVVAAARKLHIRRKACSMDFRAANLTPASPSMSPMLADMESPQLKASRDVANAMAAKVKLLQRELKTLKADLAFSKERCAQLEEENRLLRDGNHDADEDLIRRQLETLLAEKTRLAHENTVYARENRFLREIVDYYQLNMQDVVNLDDDDDDIEEEDDDYDVNADDVELEAEQYQDRRKCLPSRLVLEEEEHQAADPGAEPQSPTEQTESPRMLNTNSGGGVTPDHESPRILNTNSGGGGTPDRESPRILNTNSGVTSDHESPRMLNTNSGGTPDHEPPRMLNTNSGVEIASESPRMLSTNTGGNTNESPRGYKDDGSSPETTRDG

SEQ ID NO: 225993 - protein, 265 aa, Zea Mays
MLAMGLTLQLSDFAALLRDRPLAILFGCAAQYTIMPAFGAIISHALGLPPSLSAGLILLGCCPGGTASNVVTLVAQGDVPLSVVMTVCSTLAAVFLTPLLTKILAGAYIPVDAVKLSLSTLQVVVAPILLGSLIQTAFPSVAQFLSPFAPLMAVLASSLLASSVFSENFVRLRSTIADASPVNGMFFGDVGTVIFSVFLLHFAGFFVGYAAAAIGGFKEKQRRAISIEDTEIDESSKSSSGLTLKLMGVKYLGGSTSWLIINIRL

SEQ ID NO: 225994 - protein, 305 aa, Zea Mays
MSGGGPGGACGPDSRVETISRLAQWRIDTFGPCSYRRSDPFKLGIWNWYLSVEKSRSIVVRLFPEPGRVAKEQPPLARFLLRVSWAGPPRRSCVSPVHEHLLRTSDDFVWQVDAMSHGRFTIDVEFLDLRIATNNASYGIVIGVAKRRHGAEDREQERPGLPVAHAGGLHPRGRDHQHDGRGAEGAQGGAGGVLPRVQEHVRARPEGEGVVDGGHRRHVRGVVLGAAGLRVRDDRAGTVLEAPAAAAGGGGQVRDRRHQGLLRGEPAGGHRLGQRAGAAPRGVAVPAGAAEERVPHLPVRVREDL

SEQ ID NO: 225995 - protein, 480 aa, Zea Mays
MPPAPPPQQPKNRSRVPTPTGENRRPQRRMESRNASERAAFFARREAAAVLRRVLRGDATRRAAGSIKSLVYSPTVRNKRATFALVCQTLKYLPILKEVLASSEILSSKWKKQEELVYVTTYDILFGQGIAVSGSVEQLIMLQKDSLRTTLDKVCARKRVRCVEDLLSNKSAVKPKPRFLRVNTLKVTTESVIEELNKMHMVDKDEMVPDMLVLPPGTDLHNHPLVTDGKVFLQVIDACAAPGNKTVHLAALMNGEGSIIACELNKERAKTLQHTVRRSGANNIRIVNGDFLEVDRNDPSYAEVHAILLDPSCSGSGISTERLDYLLPSHSRDSQDDAGTSSRVMKLSAFQKKALSHALSFPSVERVVYSTCSIHQAENEDVINSVLPLATSLGFELATPFPQWHRRGLPVFQGSEHLLRTDPEDGLEGFFIALFVRKAGPTSEEPSEDATVEVRTKQVRGRRNGVRAFSSLRLSRMILW

SEQ ID NO: 225996 - protein, 194 aa, Zea Mays
MNCTMHSIPASTLDPQGMVPEPGQPKQIFVPGSSSFEDSFRSANNTPSSSRFSVADRSLDWSSSRFSETSGLAQQDDDDSDQAKERPLVLCNKEPRWHEQLQCWCLNFHGRVTVASVKNFQLIAAPQLDSEPSQQAQQQTQPSNSSSASDHDKVILQFGKVANDMFTMDYRYPLSAFQAFAICLTSFDSKLACE

SEQ ID NO: 225997 - protein, 341 aa, Zea Mays
MATEEAGRALATKAKLVAAVLVLELLVAGFHVVSRAALDMGVSKMAFLVYRNAAALLVVAPVAYFLDKKDRPPFTLRLLMDFFLLAAVGVTFTQGLYILGLYYLSPTYVSVIQNSVPAITFVMAASLRIEQVNVRSRYGLAKMLGTVVTIAGATVITLYKGTPLLTETAHAEGTTHTLEGTHTLGGWVAGCLIMFANCICLSAWMVLQVPVLKKYPAKLSSFTITLALGFVQLAVVAPFFESDVERWKISSGGELFTILYAGVVVLGIAWYLMIWCINKGGPHFVSVFQPLQTVMVAIMAAIFLGDTLYIGGCGDHSRGSVLCTVGEEQGDQKQRRSPSPS

SEQ ID NO: 225998 - protein, 1516 aa, Zea Mays
MESGGKAPEKPALLKGPCLPKVEVSTSEDKASPASGPGPAQVMKASPKEPLKIGPVSVPEHCNTTVIKSEQDLERNIQRTPGRSDYNAERGKSVPAESGSVDVEQAKRTGSTSSAPVPRDVPRKYHGPLFDFPSFTRRHDSMGSANYNSNLSLGYDVKDLLAQEGMIVLGRKREDNLKKISGLLAINLERKRIRPDLVLRLQIEEKKLKLLEHQARLRDEVEHEQQEIMAMPDRIYRKFVRQCERQRVELVRQVQQMQRASREKQLKSIFQWRKKLLEAHWAIRDARITRNRGVAKYHERMLREFSKKKDDDRNKRMEALKNNDVERYRQILLEQQTSVPGDAAQRYNVLSSFLTQTEEYLYKLGGKITATKSQQQVEEAANAAAAAARAQGLSEEEVKAAAQCAGQEVMIRNTFSEMNAPRDNTSVNKYYTLAHAVSERVTKQPSLLRAGTLRDYQLVGLQWMLSLYNNKLNGILADEMGLGKTVQVMALVAYLMEFKGNYGPHLIIVPNAVLVNWKSELLNWLPSASCIFYVGAKDQRQKLFSQEVMAMKFNVLVTTYEFVMFDRSKLSRVDWKYIIIDEAQRMKDRDSVLARDLDRYRCQRRLLLTGTPLQNDLKELWSLLNLLLPEVFDSSKAFSDWFSKPFQRDGPTHNEEEDDWLETEKKVIIIHRLHQILEPFMLRRRVEDVEGSLPRKDSIVLRCRMSAVQGAIYDWIKSTGTIRVDPEDEKRRAQRNPMYQVKTYKNLNNKCMELRKVCNHPLLSYPFLNHGKDFMIRSCGKLWNLDRILIKLHKSGHRVLLFSTMTKLLDIMEDYLQWRRLVYRRIDGTTSLEDRESAIVDFNRPGSDCFIFLLSIRAAGRGLNLQSADTVVIYDPDPNPQNEEQAVARAHRIGQTREVKVIYMEAVVDNISSYQKEDELRNGGSGDLEDDLAGKDRYMGSIESLIRNNIQQYKIDMADEVINAGRFDQRTTHEERRMTLETLLHDEERYQDSVHDVPSLQEVNRMIARTESEVELFDQMDEDFDWTGDMTKHHQVPKWLRVNSNEVDAVVASLSKKPSRNMSSGGIALDTNETLEKRRGRPRGTGKYSIYREIDDEDLEESDEDSEERNTASLPEEGEVGEFEDEEDNDDSVPDNKDESEEEEPMNDDVYEFTEGLRGRKANRMEEAGSTGSSSGSRRLPPPVPSSSSKKLRSLSALDARPGTLSKRTPDDLEEGEIAMSGDSHMDLQQSGSWNHERDDGEDEQVLQPKIKRKRSIRLRPKPNAEKQEDRSGEGAFPQRAARQQDAVHPIVKQKRNMSSRKVSPASRSGKLSHLSGSGEGSAELSKENWSSKAIDSTAPEFGGTKMSDSMQRKCKNVISKLWRRIDKEGHQMIPNISSWWRRNENSSFRGPAGSTLDLQKIEQRVDGLEYGAVTEFIADMQQMLKSVVQHFSYRHEVRIEAETLHNLFFNIMKIAFPDSDFMEAKNAMSFSNPGSGAHSDHQAGASSSAPGIGDIQWAKPAKRLRTDRAGRGGRA

SEQ ID NO: 225999 - protein, 803 aa, Zea Mays
MRGGGRGGGGRQPSYAAPDGADAAAIPVASRKMVQSLKGILADRSEGEIYATLCDCGMDPDIAVERLISQDTFHEVRRKRDRKKETKVNHETRPRPFQKYTYRGYKAVSDRSGRDPTGGFKGPVKKEPEMQAPLNSSALDVKTSDTTEIFSATINVAQTDAKNTTSQPLSKVQHGWGGIPGRPSMAEIVKMGRPQAKVGSRSVASSTALPTVGDSVISNTPNLVPEEYNRTVFASEAGHVAADKLPNGAVEVHSLPKDASAFDMLPSAEGTDVEAPSMSANAQGSSTPDANEDDIEKYANLEEGNTESLISPGQVSASGKDIQSEYTEVVSHVDEGSIEKTNDFQLNGLPFEHNQNLNGDVSTATTQFDHLTLHEGPKLSDDNPAVIIPDHLQVSNADCAHLTFGSFVSGTLDSSLTTKPLESHGDAAAVPDDDSIDQSDGSNEENLDITSVQQSEVTRADFLDVTSNTEYNLTSTPDYATSSAPLQDSASQSLQENRQFQNISPFSSFMQMQNGLLPPAIPPLREFDPAFSLLLTHPPMMHGTMSSSMSNTTVSTQPQENANPVGLPNPQLTQSQQSTSIASGPPLPQHLLHPYAQPTLPLGYASMIGYPSLPPSYAYLPPAAFQQPYMNSGLFHQAAAAVPTSSVKYPLPQYKSNIALASLPQPGSLLSSYVGGFGTASNMPGNFPLNQSTAAATTTLGFDGTVPSHFKDGNQFISLQQNENPAMWMHGASSRGMPPLAASTMYGYQGQSHQAGLRQGQLPSQFGSALGQSQPGLGPEHRNPSDSNLSGAAQANQMWPNTY

SEQ ID NO: 226000 - protein, 267 aa, Zea Mays
MDRYHRVERARNQSTIEENEIRITAQGLIRNYVSYATFLLQERRIKEIVLKAMGQAISKSVAVAEIIKKRAPELHQDTNISSVSITDVWEPIEEGLVPLEMTRHVSMISITLSPRELDKHTPGYQAPAYVEHPRQQQVPPLQRQPRRPSGQQFQQLEYEDSYARGRGRGRGRGRGRGWARGGYGGYGNNQGGYNQGGGYYDNQGGYGGYDDQGGYGGGYGYNQGRYGNYQENGGYNRGRGGGMRGRGNWGYRGGCGLPVEPASFLSS

SEQ ID NO: 226001 - protein, 94 aa, Zea Mays
MVGSNNDVNKFNQSPLFADALKGEAPNINFALNGHGYNHGYYLDDGIYLLWLVLVKTFHVEGRTEGHDEAILGVQGLISYSHNPRSFFFTRYSA

SEQ ID NO: 226002 - protein, 266 aa, Zea Mays
MAAFELDSVWLYDRLLGEIQLHGGMKVKADRDESSPYAAMLASQDVTQRCKELGITALHIKLRATGGNKTKTPGPGAQSALRALARSGMKIGRINPKKKEKKHLRIKNEEFEVLAKSHQLQANNYEKQIYSLQEKNHYMEEVLEQEQQKNVNASISIDEQDKKAALFTECQKYAVENHSANMLVSQLMGEARYHGEERKTLLKHKEKPRQGISKQMKVLNICKDLASTDLAEDEVLPQTVLDETINTLRLKFEKILGILHGSPRIS

SEQ ID NO: 226003 - protein, 264 aa, Zea Mays
MSCPGNVEECMHKVQSVKYGEEVCFNGIFMLKASSSGLELGNSTWTIQSPRASITYLPSSVFVSAHALDFDYSSLKENDVILFSDFSSLNDTDEDNEKLNEHSMDETDSSLCRYSVFRDDGADADERVPFVCNNDDITEEIERISFICSCIFGAVKSGGSVLIPIGRLGVILLLLELISEMLHSSSLKVPIFVISETAEEIFAFTNTLPEWLCKSRQEKLFAGEALFGHVELLKEGKLFLFPHLHSKGLLMEGALYCAMSTLEP

SEQ ID NO: 226004 - protein, 412 aa, Zea Mays
MSDEDRDRERDRDRVWLHGEKVGAGFKCKYCRETKSGGGGTRLKEHLAHRGKNVKKCPSVPPDIKAYFQLDIDKTKEKKSSRFRQQLRADEAAQTHFGDDEYEDDLKAALHQSRVEHEFSQRAGARHNEAIRDWMERGRSNAPPTLDEDSPISDTPLPSTLFTSLVREQGGTEEVQEWADETIGDTHLGKRKTRLGPSDRKGKRVKIIDQIEEEDEDEDSDDNTTDPSAGDDGSHGDAGLYGVGGSGAGGSGMGGSGAGDWRSTGGSRFTHSTQDSYHDAPHSQRETISGRRRSVSFPVQDGIRSSSSSGSSNYPTGQDPVYNPYAWQWQPSQGTYGPPPPSGEAPPSIMYGYGNYGPPPPPYSNLSNMYPPGPQYGYGQVPAAPAYHYQYDGLDQYHDPSNMPEYYHYDSS

SEQ ID NO: 226005 - protein, 126 aa, Zea Mays
MGGCIGNLRKSQSLPDSKPKRSLRKKSLDSSTGNRRRWQSSLEAMEKNVSISVSLEGNISSIPNSIVNDSKTLMENGVDTSFINHVGPQHMMISCRQVSVFHSESHYLRWLIFWSTYGTKKGSMVS

SEQ ID NO: 226006 - protein, 517 aa, Zea Mays
MAEELGVFIPYVGGVEHAHVLLPPLETLCTVEETCVRDKAVESLCRIGAQMKETDIVDWFIPVVKRLAAGEWFTARVSSCGLFHIAYPSASDQLKTELRTIYGQLCQDDMPMVRRAAASNLGKFAATVEQNHLKTEIMSIFDDLTQDDQDSVRLLAVEGCAALGKLLEPQDCVAHILPVIVNFSQDKSWRVRYMVANQLYELCEAVGPEPTRADLVPAYVRLLRDNEAEVRIAAAGKVTKFCRILNPQLSVQHILPCVKELSSDSSQHVRSALASVIMGMAPVLGKDATIEQLVPIFLSLLKDEFPDVRLNIISKLDQVNQVIGIDLLSQSLLPAIVELAEDRHWRVRLAIIEYIPLLASQLGVGFFDDKLGALCMQWLEDKVFSIRDAAANNLKRLAEEFGPEWAMQHIIPQVLEKINNPHYLYRMTILQAISLLAPVMGAEITCQKLLPVVINSSKDRVPNIKFNVAKVLQSLVPILDQSTVKPCLVELSEDPDVDVRYYANQALQACDQMMVSS

SEQ ID NO: 226007 - protein, 138 aa, Zea Mays
MASASAPVAGAVAGNDDELADLVRRLVDALARYADRLPFDLDRQKLRSLTTLAAISITLLFAWKMLRGPQEQPPRPRRRIAPSSSNTSTRSRPGALTTTDACSSADSRAHEAVNQLFQPVNVLLDFHLLNTEMVQLFC

SEQ ID NO: 226008 - protein, 103 aa, Zea Mays
MSLMSTPFIDNSDLFETGSTGGMSRDLIDRIPKTRFSAASNCDQETDSSCCPVCLQDFGARQFVRALPQCQHIFHVRCIDSWLLRHASCPLCRAGVHIDHIHM

SEQ ID NO: 226009 - protein, 972 aa, Zea Mays
MASSSSLNPSSYSCFLFVTAAAVFFTASDAQVPGFVSIDCGGSTNYTDELGLQWTGDAGWFPFGQTATISVPSEKRAQYSTLRYFPSPSASSSSSSKHCYTLHVRTRTRYLVRATFLYGNFDSSNVFPEFDLYLGASHWSTIVIYDDSKVVTREAVVLAADPALSVCLSSTGTGTPFISTLELRQLNGSLYYTDYEADAFLALSARINFGAPTADPVRYPDDPYDRIWESDMVRRANYLVDVAAGTVNVSTDRPVFVAGSERPPQKVMQTAVVGSLGELTYRLDLPGFPGNGWAFSYLAEIEEFLVPETRKFKLYIPGLADVSKPTVDIGENAPGKYRLYEPGFPNISLPFVLSLALRKTNDSSKGPILNALEIYKYMHMELGSPDGPVMATLSLALASSSSSLADVAMEGGDPCLPSPWSWVKCNSEAQPRVVSINLSGKNLTGSIPPQVADLPCLAEIGFANNMLTGPIPDLSGSSNLSIIHLENNQLTGTVPSYFGSLPKLSELYLENNRLSGPIPKALLSRSIIFNYSGNVYLGTAGKQKKKHVIIIISALLGASLLLAAALCCYMLTRKAMNSSSSPQAQEKALPAEQNKLQKYPSTQQLQSIATETAHPYSLCELEEATNKFASRIGSGGFGIVYYGKLSDGKEIAVKVPSNDSYQGKKQFSNEVVLLSRIHHRNLVAFLGYCHEDGRNILVYEFMHNGTLKEQLHRRDKHISWIKRLEIAEDAAKGIEYLHTGCTPSIIHRDIKTSNILLDKHMRAKVSDFGLSKLLAAEGKDSHASTNVRGTMGYLDPQYYVSQQLTEKSDMYSFGIILLELISGCPPISTIAFGDNFRNIGPWAKFYYESGDIEAIIDPSISTAAEYQDVQSVWKIAEAAVRCIDAEPRKRPCMPEVVKEIQDALALERAAAETTTSDRALACPFSPAAASVRSGGTMRSHDMVMDNLLLLDDDDDSTFSGSTVTKLKYPELR

SEQ ID NO: 226010 - protein, 307 aa, Zea Mays
MMESQPLQAPTATAPAPGSAEPAGAPPAVTPGKEFTRTCKGLVVVLIGGYVLLQLLPSSLNYLAIIPSKTIPYVWTVFTAGYIEQVLPGAIGSSLGLLFCGKDIEPAWGRKEFLKFIILINSICGILAFCFAIGLYYVTGKESFLVTPLSGFHGCLAGFLVALKQLLPNLELPMCFFWKIKAKWMPFFVVCFSSIMAFIVPDSINFLPTLVSGMYVSWLYLRYFQRNPLTGLKGDPSDDFSFPSLFPAAMRLLCARSRPLEVALPISDPTKASRRRERGERVLEERLAADNAGDTEASPRGHGTAED

SEQ ID NO: 226011 - protein, 320 aa, Zea Mays
MLLVQLKPLKPFCATMVLLYFMSVTGAHSSVHCICSLGLLILFLHEVVQMAHGGTNFGFYNGANTGQDESDYKADLTSYDYDAPIKEHGDVHNAKYKALRRVIHECTGTPLHPLPANIKKASYGIMKLQKVVSLFDIIDNINDPLKVSVSEHPLYMEQIGQMFGFLLYMSEYQGKLPSSILSIPKVHDRAQVFVSCSAGVRTLRYCGVIERWSNKTLEIPNLRCSSKTSLYILVENMGRVNYGPYIFDRKGILSPIQIDGITLRHWKMYPLALNSLDILPKLQLITQIPYAGASKMSIHGDSEKILQDSSCCSNVMVFVK

SEQ ID NO: 226012 - protein, 383 aa, Zea Mays
MVYEQDRGNHHQLPRFCTAGAAPGVARASKKSKPKKAPQRGLGVAQLERILIEEQKNMEEGPTTAMPVTTRTAHLGPLLPMHPPPPPPPPLSLSALPRDAGVHCGYDPPVLWDPAAADPLKHPYKKRSLCPQPPPLPTCHGQVSTALSLTVSTSTHPTEPPSMYSSRSSAPPPADEDDREAAGVDRFCPFVFEGPNPATYRTTAAGKASFVARTRRTREAAGFPGVCPDPDLSRYELRAANYFSSSASYSEWSSELARHIKSSKGNEHEPACCYLTLNAQPPPAPRVKQPAALPPNHRPELRDFGGVTQPQHGSASASSSRPFYNFMPLPREQRSSSSRRRLWRRVWFCNLKHRHVHQNLRSLQDFFAPNKRLAGESRQEKQC

SEQ ID NO: 226013 - protein, 353 aa, Zea Mays
MMFPLAFGVVDCESDDNWNWFISELRKMLGVNTDKMPVLTIVSERKRQVVAAVGSNFPTAFHGFCLRHVSENFRDEFKNTKLLNIFWSAVYALTASEFDAKVNEMMQVQDVMPWLQRFPPNLWAFSYFQGIRYGHFSLGITEILYNLSLDCHELPIVQTIEHIRHQLACWFAERQNLAQSYNSVLVPSAEKVILEAIHDSQCYQVLRANKVEFEIVSSERTNIVDTQARFCSCRRWQIYGIPCAHAAAALLSCGEDPRLYADDCFSVMKYRETYSQPIYPIPDRSHWNDSSPWSQGAVSKADVVLGPPNIRRPPGRPKMKILKIESMKRPKRIVQCGRCHLLGHSQKKCSLRS

SEQ ID NO: 226014 - protein, 69 aa, Zea Mays; identical to SEQ ID NO: 223173

SEQ ID NO: 226015 - protein, 206 aa, Zea Mays
MAVTVVRDVETGLDASTSDRDGDAGDNPSWFTPKRLLVMFCIINMLNYIDRGAIASNGVNGTRKSCSGGTCTSGSGIQGDFDLNNLEDGTLSSAFMVGLLVSSLIFACLVKRYNPFRLIGVGLLVWTIATAGCGVSFDFWSITICRMFVGVGEASFISLAAPFIDDNAPVAQVLLLGAVEFGPAERIWKTWAPGKCKFFMWLVVHD

SEQ ID NO: 226016 - protein, 186 aa, Zea Mays
MHPFGHYPMPTNGHAETHGAAPSAPEMNGKSEPGRTSAPSANGITSHRESGSESESEGSDDNSQNDSHSKDNDGKEDGDSQNDISYSASQGVVNQTMAMLPMQPGAMVGGVPSSTAANLNIRVDYWAAPGSAAVPAAHGKAPAGSTRGDQWDERELKKQKRKQSNRESARRSRLRKQVLCNPRAEC

SEQ ID NO: 226017 - protein, 256 aa, Zea Mays
MVVVTELLVGGSLRKYLVSLRPRSLEPRVAVGFALDIARAMECLHAHGIIHRDLKPENLLLTADQRTVKLVDLGLAREETLTEMMTAETGTYRWMAPELYSTVTLRHGEKKHYNHKVDVYSFAIVLWELLHNKLPFEGMSNLQAAYAAAFKNIRPSADNLPEELSEILTSCWKEDPNDRPNFTQIIQMLLHYLSTLSPQETLAGPRRTFSSENTILPPESPGTSSLMASRGDLGDTPKGKKEDKPRGFFFCFSECY

SEQ ID NO: 226018 - protein, 259 aa, Zea Mays
MSGNKCAVKLKPSIFETNRERKQRDRECSKDVRPLQLRPGMVLLKRFIKPNDQVKIVKLCSQLGVGPGGFYRPGYRNGALLKLWMMCLGKNWDPDSSSYGDRRLFDGAQPPTIPEEFQKFVQDGIQASHEFLKQQKGATNVVQEIPAMSPDICIVNFYNSSGRLGLHQDKDESQSSLDKGLPVVSFSIGETAEFMFGDVRDEEKISKVDLESGDVLIFGGESRLIFHGVNNTKPKTAPKWLTDETSLRPGRLNLTFRQY

SEQ ID NO: 226019 - protein, 281 aa, Zea Mays
MAEQGGAAGEAAGSDPPAPAPATAPAPAPALAADAAGQRSLPTPFLTKTYQLVDDPAVDDVISWNEDGSTFVVWRPAEFARDLLPKYFKHNNFSSFVRQLNTYGFRKMVPDRWEFANDFFRRGEKRLLCDIHRRKAAASGSVSASASGDTGEENERLRRENARLTRELGQMKKLCNNILLLMTKYASSQQLDASAALSSVVNCSGESSEAVPAPPPLPPAILELMPACPGLATAAAGLVAEADPDQHPWPIYRPTPVYHSMRPCNGPDQGAGSDQDGSNSR

SEQ ID NO: 226020 - protein, 330 aa, Zea Mays
MFRGSPKIVALPKAAQKKASPKAAKSKKCGVERAAWNVELEKSLVDLLFEHNMPPHRAQNGWSPDAWNKIVSKFHKKHEYVTFNKIQIQEKERELKREYKILKEARKQSGVSWNEKRCMIIAEPTIWDNIITTFPRAKKFRNKSFPIFDALGELYDGHIAQGTWNITSTQPLQNSDDGEKFKTIEVEYEDTNEPQVDARIEQDEDIVIVERVEHRLPKRSGAPTVNQEKETKRVRKDALEGLIGRYLDVKTKQVADEATQSTKEKEVAQDNDFSIKRCISVLKTMDITRDEKIKAAEVFNTPNYRETFICFNDDEPEVALLWPRGKMDKL

SEQ ID NO: 226021 - protein, 82 aa, Zea Mays
MISPGMADLVKKLKSNNIDVFLVSGGFRHMIKPVAFELGIPPENITANQLLFGTLGEYAGFDPTEPTSRSGGPWLQDSCYDW

SEQ ID NO: 226022 - protein, 115 aa, Zea Mays
MTLKLWDLNMNSGPVSTFQVHEHLRPKLCDLYENDSIFDKFECCLSGDGLRVATGSYGNIFRVFGRPPGSIEATTLEASRNPMRRQIANPARPTRTLTSFARGVRRGHFLSSTLT

SEQ ID NO: 226023 - protein, 546 aa, Zea Mays
MGRSYLEGGRDAGADLGYPLVAVCIDKDKNSQNALKWAIDSLVQKGQTIVLVHVNTKGTSGGVEDAAGFKQPTDPHMKDLFVPFRCFCTRKDINCKDVVLDEHDVAKSIIEFSAQAAMEEEQKTQDSRITEDSAMAMIEREKARAKAAMEAAEASQRIAEMEVQKRISAEKKLLKEAEERKNRGGSGMSHEARYRRYSIEEIEQATDNFNDARKVGEGGYGPVYKGFLDHTQVAIKVLRPDAAQGRSQFQQEVEVLSCIRHPNMVLLLGACPEYGCLVYEYMASGSLDDCLFRRSGGAGGPVIPWQHRFRICAEIATGLLFLHQTKPEPLVHRDLKPGNILLDRNYVSKISDVGLARLVPPSVADTVTQYRMTSTAGTFCYIDPEYQQTGMLGVKSDVYSFGVMLLQIITAKPPMGLSHHVGRALERGELQDMLDPAVPDWPLEEAQCLAEMALRCCELRRKDRPDLGAVVLPELNRLRALGEDNMQYCGAIIRGGGGGGGMHSSSPFHSNISRSHAEMMIDSQYPRSVFSSRAGDSPMPPRRSNA

SEQ ID NO: 226024 - protein, 213 aa, Zea Mays
MLVPSSYSCADQCYGMLTTYGMRSMSGGRMLLPLIAPADAPVYVNPKQYEGILRRRRARAKAESENRLTKGRKPYLHESRHLHAMRRVRGSGGRFLNTNKGGHGTDVAANGGSKMAAAAAPSRLAMPPSAEPPWLSGLSDGSNPCCHSRSSVSSLSGSYVASIYGGLEQHLRAPPFFTPLPPVMDGDHGGPTAATISSFKWAASDGCCELLRA

SEQ ID NO: 226025 - protein, 568 aa, Zea Mays
MASAAGAAFAAITLLILVPLTAASDSDHKYQAAEPVTLWVNKVGPYNNPQETYNYYSLPFCHASENHVHKWGGLGEVLGGNELIDSQIDIKFGKNVDKATICSLDLDLVKAKQLSDAIENSYWFEFFIGFVGEADRNNDNKYFLFTHKNIVIRYNGNQIIHVNLTQESPKLIDVNKALDMTYSVKWEPTNITFAHRFDVYLDYPFFEHQIHWFSIFNSFMMVIFLTGLVSMILMRTLRNDYAKYARDDDDIETLERDVNEESGWKLVHGEELLSQHSLFAMLLLHSSLDMSVVHYTHVMEVWAYLSCKIELYTYSSIRCSVVLNPFGGGAGKNWIKAMAMTASLFPFMCFGIGLVLNTIAIFYGSLAAIPFGTMVVVFILWAFISFPLALLGTVVGRNWSGAPNNPCRVKTIPRPIPEKKWYLTPSVIALMGGLLPFGSIFIEMYFVFTSFWNYKVYYVYGFMLLVFLILIIVTICVTIVGTYFLLNAENYHWQWTSFFSAASTAVYVYLYSIYYYHMKTKMSGFFQTSFYFGYTLMFCLGLGTLCGAVGYLGSTLFVRRIYRNIKCD

SEQ ID NO: 226026 - protein, 471 aa, Zea Mays
MASAAGAAFAAITLLILVPLTAASDSDHKYQAAEPVTLWVNKVGPYNNPQETYNYYSLPFCHASENHVHKWGGLGEVLGGNELIDSQIDIKFGKNVDKATICSLDLDLVKAKQLSDAIENSYWFEFFIGFVGEADRNNDNKYFLFTHKNIVIRYNGNQIIHVNLTQESPKLIDVNKALDMTYSVKWEPTNITFAHRFDVYLDYPFFEHQIHWFSIFNSFMMVIFLTGLVSMILMRTLRNDYAKYARDDDDIETLERDVNEESGWKLVHGDVFRPPCNLVLLSALVGIGTQLAALILLVILLAIIGMLYIGRGAIVTTFIVCYALTSFISGYVSGALYSRHGGGAGKNWIKAMAMTASLFPFMCFGIGLVLNTIAIFYGSLAAIPFGTMVVVFILWAFISFPLALLGTVVGRNWSGAPNNPCRVKTIPRPIPEKKWYLTPSVIALMGGLLPFGSIFIEMYFVFTSFWNYKVW

SEQ ID NO: 226027 - protein, 411 aa, Zea Mays
MASAAGAAFAAITLLILVPLTAASDSDHKYQAAEPVTLWVNKVGPYNNPQETYNYYSLPFCHASENHVHKWGGLGEVLGGNELIDSQIDIKFGKNVDKATICSLDLDLVKAKQLSDAIENSYWFEFFIGFVGEADRNNDNKYFLFTHKNIVIRYNGNQIIHVNLTQESPKLIDVNKALDMTYSVKWEPTNITFAHRFDVYLDYPFFEHQIHWFSIFNSFMMVIFLTGLVSMILMRTLRNDYAKYARDDDDIETLERDVNEESGWKLVHGDVFRPPCNLVLLSALVGIGTQLAALILLVILLAIIGMLYIGKCLFDYIKRLIQLKDGAPILSVEQFVKILSPSMSDLILLQEARSYCHNIHCLLCSYFIHLWICQWCIILTSWRRSREKLDQGNGHDSITFPIYVLWNWPGA

SEQ ID NO: 226028 - protein, 567 aa, Zea Mays
MTIFSLLHSVQYQAAEPVTLWVNKVGPYNNPQETYNYYSLPFCHASENHVHKWGGLGEVLGGNELIDSQIDIKFGKNVDKATICSLDLDLVKAKQLSDAIENSYWFEFFIDDLPLWGFVGEADRNNDNKYFLFTHKNIVIRYNGNQIIHVNLTQESPKLIDVNKALDMTYSVKWEPTNITFAHRFDVYLDYPFFEHQIHWFSIFNSFMMVIFLTGLVSMILMRTLRNDYAKYARDDDDIETLERDVNEESGWKLVHGDVFRPPCNLVLLSALVGIGTQLAALILLVILLAIIGMLYIGRGAIVTTFIVCYALTSFISGYVSGALYSRHGGKNWIKAMAMTASLFPFMCFGIGLVLNTIAIFYGSLAAIPFGTMVVVFILWAFISFPLALLGTVVGRNWSGAPNNPCRVKTIPRPIPEKKWYLTPSVIALMGGLLPFGSIFIEMYFVFTSFWNYKVYYVYGFMLLVFLILIIVTICVTIVGTYFLLNAENYHWQWTSFFSAASTAVYVYLYSIYYYHMKTKMSGFFQTSFYFGYTLMFCLGLGTLCGAVGYLGSTLFVRRIYRNIKCD

SEQ ID NO: 226029 - protein, 231 aa, Zea Mays
MAMTASLFPFMCFGIGLVLNTIAIFYGSLAAIPFGTMVVVFILWAFISFPLALLGTVVGRNWSGAPNNPCRVKTIPRPIPEKKWYLTPSVIALMGGLLPFGSIFIEMYFVFTSFWNYKVYYVYGFMLLVFLILIIVTICVTIVGTYFLLNAENYHWQWTSFFSAASTAVYVYLYSIYYYHMKTKMSGFFQTSFYFGYTLMFCLGLGTLCGAVGYLGSTLFVRRIYRNIKCD

SEQ ID NO: 226030 - protein, 298 aa, Zea Mays
MASSSVAADMELDRPNLEDYLPPDSLPQEAPRNLHLRDLLDISPVLTEAAGAIVDRKLVEMMCSVFVASWTGVIKYHGPRPSTRPHQVFVANHTSMIDFIILEQMTAFAVIMQKHPGWVGFIQKTILESVGCIWFNRNDLRDREVTARKLRDHVQHPDKNPLLIFPEGTCVNNQYTVMFKKGAFELGCAVCPIAIKYNKIFVDAFWNSKKQSFTMHLVRLMTSWAVVCDVWYLEPQYLREGETAIAFAERVRDMIAARAGLKKVPWDGYLKHNRPSPKHTEEKQRIFAESVLRRLEEK

SEQ ID NO: 226031 - protein, 60 aa, Zea Mays
MDNYGKGRPSVMKTTRLLLDEDGWRGFYRGFGPRFLNMSVWGTSMIVTYELIKRLSVKSE

SEQ ID NO: 226032 - protein, 727 aa, Zea Mays
MPPELEHHEQQTAGGGGHRAPPPPPNSMPTFSSSTPSSTCVSATTNPSGGAGAVHPTTSSPASSASARPAVNSFPLVLKFEEVAYKVKLGKPTTTTAGWCDKLSAAAASMAVGGGRKKKATAAAAGSSPSSPAALREKTRTIISGMSGVVRPGEMLAMLGPSGSGKTTLLTALGGRHGGGGRALLSGKITYNGQPFSGGVRRRTGFVTQHDVLYPHLTVAETLWYAAALRLPRALGAGEKRARAEAVARDLGLGKVAGSMVGGVRGVRGLSGGERKRVSIGLEVLVDPSLLLLDEPTSGLDSTTAARIVATLRRMAAEGGRTVVVTIHQPSSRLYHMFDKVLLLSADGRPIYYGRAADALSYFASVGFASPLSLNPADLMLDLANGIAPQTTSGDGMAALLAGGGEGEHKEVRGRLSAAYERHIAPAVKLDVCAREATPGGQQAASRRASKAASEWTTGWWTQFAVLVQRGLKERRHESFNKLRVFQVLSVAALAGLLWWRTPASHLQDRTALVFFFSVFWGFFPLYNAVFTFPLERPMLLKERASGMYRLSSYVASRAATDLPMELGLPTAFVLILYWMGGLDPRPGPFLLSLAVVLYSVLVAQSLGLAIGAVLMDVKQGTTLASVITMVFLIAGGYYVQHIPPFVAWLRWLNYSFYCYRLLLGIQFPDGGGYYDCGHGALCPVAEFPAIKAVGLNNHWVDACVMALMLVGYRVVAYIALDRLKPR

SEQ ID NO: 226033 - protein, 354 aa, Zea Mays
MADGEDAAAARRRAAITDYRKKLLNCRELESRVGTVRESLKTAKKDFTKTEDDLKSLQSVGQIIGEVLRPLDNERFIVKASSGPRYVVGCRSKVDKEKLTSGTRVVLDMTTLTIMRTLPREVDPVVYNMLHEDPGNVSYSAVGGLSDQIRELRESIELPLMNPELFLRVGIKPPKGVLLYGPPGTGKTLLARAIASNIDANFLKIVSSAIIDKYIGESARLIREMFGYARDHQVKMIMATNRPDVLDPALLRPGRLDRKIEIPLPNEQSRMEVLKIHAAGIAKHGEIDYEAVVKLAEGFNGADLRNVCTEAGMAAIRAERDYVVHEDFMKAVRKLNDAKKLESSAHYSADFGKE

SEQ ID NO: 226034 - protein, 2412 aa, Zea Mays
MDPGKSIDDKFSKLHPSFPVDTRIGIVGAGPSGLSAAYALAKLGYHNVTVFERCHNVSGMCESIDIEGRTYDLGGQVIAANSAPVITHLAKELGSEFEDMDTHKLALIDSQTGNIRDLEVAEDYVSMVSLTLKLQDEANRSGGVGIHAVSGLASDPTLDFLMQHGISSMPKSVVYGYTASGYGFVQDMPYAFIHEFTRTSMAGKIRRFKHGYMSLWDKLSQSLPFEVLCGTEVLRVKRNNCVASVIIKNNNDDVEVREFDKIILSGALPFKNGKTYRSLSMTDGENEVVELNDLERELFSKVQTIDYYTTVVKIEGFEHIPKGFFYFGEYMEDPTTVGHPVAMQRFFADTNIFLFWSYGNSADIKESYVAKCVTNVVTSMGGTVQRVLLQRRFKYFPHVSSEDMKNGFYEKVESQLQGFQNTYFVGGLLAFELTERNAFYSISSVCKHFAIASELPKVPYVKRLFPLSKGIPSPPRDIGELEGVEFPHLPSLDGYLQYWGTHRVTAEKFIYTWINEEGKIMNRRTYQELHDNVSYIAYKLLTSTKPIIKPGDRVLLIHLPGLEFVDAFFGCIRAGVIPVPVLPPDPMQRGGQALLKVENVSKVCNAVAILSTSSYHAAVRAGYIKNIVTLTKSAQKCSAQWPDLPWIHTDSWIKNYRRSPGSFNSESVVPMITKPQPSELCFLQFTSGSTGDAKGVMITHGGLIHNVKMMKKRYRSTSKTVLISWLPQYHDMGLIGGLFTTLVSGGTSILFSPMTFIRNPLIWLKTISDYHGTHSAGPNFAFELVIRRLETEKNKMYDLSSMVFLMIAAEPVRQKTVKRFIELTQPLGFSEGVLAPGYGLAENCVYVSCAFGECKPIFIDWQGRICCGYVDTNDTDVVIRIVDPDYLTEHQEDGAEGEIWISSSSSGVGYWNNKETSQRTFCNWLKNYPNIKFTRTGDLGRIIDGKLFITGRIKDLIIVAGRNIYSADVEKTVECSSDVLRPGCCAVVGVPEDVLTQKGISIPDSSDQVGLVVIAEVREGKVISEEIVDSIRTRVAEEHGVTIASVKLIKPRTISKTTSGKIRRFECMKQFVDNTLSLASGSRISNKKSLFRSLTTGTGMDIRRPFLKHTVDPTIRPQPRSKVKNLMEIIEFLMQLVSDQKGISKDKISPNDSLPSYGFDSIAVVRAAQKLSDFLGTPVGAIDIFTASSISELANSLENLVHKSQPQLAPQPRSKVKRSSDIIEFLTEIVSDQAGVPKDKISPTDSLPSYGFDSIAVVRAAQKLSDFLGIPVGAIDIFTASCIADLASFLENLVLKSQPQLKPDVSHSAEDENLVITDATDLDLSVFATGILQLLALTYVCFILLLPAYLASSMYKSMISSVSLVKSSLLSYLSSLVLAPVAWICYALFTSLSLSTLGKPFLQPNYILTPDISIWSVDFVKWWALNKAQSLAAKMLAVHLKGTIFLNYWFKMQGARIGSHVVIDTVDITDPSLLAVADGAVIAEGVLIQSHEVRNEVLSFRHVKIGRKASVGPYAVIQKGTVVHGGVVIPPLQKTEQGKSAYPPSGASAYTKDEEGTANIAFEHLVSIYAVGFLGALSGATVFMLYTRFSGTTASLQHFSFACVAGAFHWLPAVLAAYAVIVRETKTTKSPVEFALFIAFAYLSYGIIVSLLASVTNKALATRSGTKKKDVARLIQQRITIAAHLRFAKMISGTEAFCMYLRLLGAKIGRHCSIRAINPVADPQLISIGDGVHLGDFCNIVPGFYSKGFTSAEIKVRDNTVVGSGSLLLPGSVLQENVILGALSVAPQGSVLLQGGVYVGAQSLTLVKNTLLAEDERIVEMDPMYKKIVGNLAANLAITTMNVKSRYFHRTGVSGRGVLRMYQDIPSLTEHKIFGAGKSFPVIVRHSNSLSADDDARLDARGAAVRILSDDGEVPLLDLTLKSGKAFYARTIADFATWLVCGLPAREDQVKRAPHIRDAVWGSLRNTDSYTKLHYYSNICRLLRFEDGRQMYAKFKLRPADQAISEDSGQVVPRGILPPETGAIPRDEGDTRPLLFLADDFRRKVESPEGVRYVFQLQLRDVPADSATREIALDCTRPWDEDEFPYIEVGEISIGSNLSAEETEKLEFNPFLRCQEVDVISATSCKQSASIDHGRSLVYEICQRVRNGEPLPASWRAFLEQSDTKIDLSGCPVIAAKRSSPDVRQATKVTLARTWYQALWATLCQPLLQTLVPYFVVGLVIFLPLRGLLATMAAGVPLYWTLPIFWATSGVAAMGACAAAKWALVGRRADGDTVHIWAPPVFLDTVWQAVRTATEEYFAELTPGSVLFAWWMRAMGASVAVSDGVYVDSTGALLNPEMVHLERGASVGRDALLFGHVYEGEGGEVKFGRVHVGEDGFVGSRAVAMPGVRVDDGGCLGALRLAMKEEIVMNRT

SEQ ID NO: 226035 - protein, 244 aa, Zea Mays
MAASCALTSSHGDLAHGGSPCSAYSPLQELAQPLSAGDRAISLDTPLPLLLPMVALADLSHGVGNSSTSLHGRPRSSPYSPSTSSSPRPQPLFRRCGDPVSLACCPILASRPGRLHGRRRKAQSDAPHVLDEKPEREIICFFCGIRVEFINEILGCLGEEEGYAPCSSFPWFPTAAAGNIPTPDAEIHASGSIFLNVGCLSDLAVDLLLTAACALFPPSSSPGSAQPRPYYRPQTRAGLITRRC

SEQ ID NO: 226036 - protein, 242 aa, Zea Mays
MLPPADPHLTGSPTPSSSYRAQEHSRSRRKFEDEDQLHCGRTSGMEGQFQVGKEEVIQAWYMDDSEEDQRLPHHREPKEFIPLDKLSELGILSWRLNADDWENDENLKKIREARGYSYMDICDVCPEKLPNYEAKIKNFFEEHLHTDEEIRYCLEGSGYFDVRDQDDQWIRVAVKKGGMIVLPAGMYHRFTLDSDNYIKAMRLFVGEPVWTPYNRPHDHLPARKEYVEKIINRGGNQAVEAR

SEQ ID NO: 226037 - protein, 354 aa, Zea Mays
MKVNTKIKLEPVMAPSSSLPRSASELPDPPSPFSSNTAHHPVSVPTTPRLSLSCSSFGHMVTPPTDTPPITPTKKQDDKPKPTPEAATAANYASLWSPKRLMQRAARAFRRSRSRARVRTVKDLAEERASVLAASSKVSDEAAAAATAVPPAGAKTSSSNDARDGAMGSVQDEPRQQRHDDYHHPEIVPEKIIHEDALPVVAAEKETAAAAATSKEEEEVESPKKGAALSPVPEAIVAVAAVEDVVADKFVTVVKEAIKKQEAEEDEKEEAMRRFQGSRVRTALEARAESEQPRRREVARSNDVIEEARTKLLEKRRSKVKALVGAFETVIDTKKDSDDAAAGKPEHHNRNKSA

SEQ ID NO: 226038 - protein, 73 aa, Zea Mays
MPMGRPMDGEDICASGHLVLWGYGRLEQPCKSGTARVSSAHPLQSVPVLGLALFSLYGVVFTVNVCKKKKSWP

SEQ ID NO: 226039 - protein, 308 aa, Zea Mays
MVEPSFAERSLIYHKDYLSDATIVTSSAVNITEHAVLTADGHSLPYDYLIIATGHALASPASRAERIKEFQRDNGKIESSESVLIIGGGPTGVELAGEIVVDYPGKRVTLIHRGPRLLEFIGDKASKKCLDWLTSKKVDVLLQQSVELGSLSDTEKVYKTSGGETVTADCHFVCIGKPLSSSWLHDTILKESLDSKGRVMVEKDLRVKGFNNIFAIGDITDIPEIKQGYLAQKHALLVAKNLKLLTKGLPNSKLATYSTGYPLALVSLGRKEGLAQFPLLTLSGCLPGMIKSGDLFVSKTRKQMGLNG

SEQ ID NO: 226040 - protein, 206 aa, Zea Mays
MGRKGRKKGLLYPLTSLSPRPSAPSSLYLALASLPVARQRWLPLPPPRRRRRQRCCCCSSCRSPRRRTCRSCPTGSAATRRRGGCTRSGWRRTAGPTTPSARRSGGTRCSGTTSATSTRTTPPPTRASTPSASASTASPTSPTTSTAPPTSAPGPGRRGRGSSAPGTTPPTTRTCRSPSTGGPRAPSPRSRTRAAALEHGKLLQPC

SEQ ID NO: 226041 - protein, 66 aa, Zea Mays
MHLDESDDHGGTQTQKAMACLLSISFIILQFRQSSVVRCPHDDHMDSEELLVYSALFPHSFVPLLM

SEQ ID NO: 226042 - protein, 208 aa, Zea Mays
MECRLHHLALLLGLLVWAAAAATGGGAQPVCEPSIIATQIALFCMPDMPTAPCCEPIIASIDLGGGVPCLCRVAAQPQLVLARLNATHHLALYASCGGQHTMGAHLAAACQQAPSPPATVLVLAPPPPQAANTRDDPSPAAAEQEAVPYRGHRRRPRPGQPHASPAAAPTMPPPPPPHSGSDKGCVVVVSAALELVFFVMAGIVFVLE

SEQ ID NO: 226043 - protein, 525 aa, Zea Mays
MAANQEEQEQEQRRRLIAAATRFPLPSGCRFSYGTAGFRADGATMAPAVCRAGILAALRSVKLAGAAVGIVITASHNPIGDNGVKIADPDGGMMAQHWEPFADALANAPDPDALLQGINAIVGARAVDMGILTTPQLHWMVRSKNKGVMASESYYFRQLIGSFRRMLELVPKGKGGDEVAKKLIVDGANGIGGVKLEQIKVELSGIDISVRNSGKEGEGILNHMCGADFVQKERVTPHGFNPEDVGVRCASLDGDADRLVYFRLSSASDNRVDLVDGDKILSLFALFIREQLDIVNNNGGQANKSLSARLGIVQTAYANGASTLFLKSLGLEVVFTPTGVKYLHKRALEYDIGIYFEANGHGTVVFSEDFISQLESLSNELSSQADIGSAQYHAVMRLLAASQLINQAVGDALSGLLLVEAILQYKGWSFQDWCGLYSDLPSRQLKVKVKDRSVIVTTDAETKVSQPSSLQELIDKETANYTHGRCFVRPSGTEDVVRVYAEASTQVEADGLAKSVAHHVERLLG

SEQ ID NO: 226044 - protein, 368 aa, Zea Mays
MKIKLVILGILLLLVIIASFKRLMLKQQGMRTTWEYPFAVAGSCWAFSTIAAVEGINQIVTGDLISLSEQELVDCDTSYNQGCNGGLMDYAFEFIINNGGIDTEKDYPYKGTDGRCDVNRKNAKVVTIDSYEDVPANDEKSLQKAVANQPVSVAIEAAGTTFQLYSSGIFTGSCGTALDHGVTVVGYGTENGKDYWIMKNSWGSSWGESGYVRMERNIKASSGKCGIAVEPSYPLKEGANPPNPGPGARRACIVRPSINIAAPGLPPSEPREGNTGNPAPTPPDCADRAGGSCPERAAQTAAPEEPHRSCTHRSSLSNGLCTMRMLLLLRWDRSKDFQTTTGSDAGPTCSVTKINLPVYHVYSVQGQR

SEQ ID NO: 226045 - protein, 171 aa, Zea Mays
MVVAAPGILPWPHLPLPSSSHPSDASDAAAAATDANTSAYDIQIFEPTSIEERRRLLIQRRRLRLAASHASRLTVASRVSSKLISTTASCSSGVASDLPPPLLMARRCLPPLPQPRPCRPWRIPNPTTSSVGPRRRGCAMNFSSSVRFCIDGNGFQNSTQGNFKTVIQLLK

SEQ ID NO: 226046 - protein, 437 aa, Zea Mays
MMNAAIRCASTSVAQRSSGGFWTWLTGARSNEIPPPDFTLPGVTIPPPLPDHVEAGKTRVTTLPNGVKIASETSAGSSCSVGVYVDCGSVYEAPETTGASQLLKTMAFTTTANRSELRVVREIEAIGGSAKASASREMMSYTYGALKTYMPEMVEVLIDCVRNPAFLDWEVKEQILRLQAELAKSSSFPENFLLEALHSTGYSGALANPLIVPEYSVSRLNADVLEQFITENYTASRIVLAASGVDHDELVSIAEPLLSDIPSVSGTTRPKSTYIGGEYRRSADSSSTDVALAFEVPSGWLKEKDCVTVSVLQALLGGGGKFSWGRQGKGLHSRLNRLVNEFDQIKSISAFKDVHSNTGIFGIHTSTDASFVPKAIDLAARELTSLATPGQVDQSQLDRAKASAKYAILANLESQASLTEDMGRQVLAFGERMLSDI

SEQ ID NO: 226047 - protein, 394 aa, Zea Mays
MKGRLLFKSPLPRSYLSHTSSVTSAAVATHRVYQVWRGKNDVVVLVLTSGRDPGIIPRNARPPEPDSFATTTTEMSSGSPATGASWSLPPTRDVYVNGVAVKVKYCHTCMLYRPPRCSHCSVCNNCVERFDHHCPWVGQCIGRRNYRFFFLFIASTTFLCLYVFGFCWVDLLLTSRRRGGVGIGRAVAESPVSGCLIAYTFVTAWFVGGLTAFHSYLVCTNQTTYENFRYRYERKANPFNRGAGSNVAEIFCSPVPPSRNDFRARVSPADPDAAALYYLGPLASESRISFYTRASGLSFDMAKASFDRNYSAASVASSSDFGDIYGAGGGLDRVSSHQQPRHSIFGVGGGGHAREGKKQAEDEADAVTAELGATMHMHYGRGAGRTRGREFGMV

SEQ ID NO: 226048 - protein, 686 aa, Zea Mays
MIDVIWAGLPKTHISYVRNIKEGLPLFLFNYDDRRLYGIYEASGNGKFCPESNAWSQDSKGKTSYPAQVAMRVKVWCFPLAENQFRNAIIANYYQKIPGVPGQKLHFFKFELDHAQTRVLMDMFTPSPSPNSFWTPPAAAPADEHAKELVLSPGWAPECEGNNNLKSEKVVKSYADIVKKNTFVEVGTRDVDVEHAGSGDESSGGFDELDCQYTPTEREDYALSDRVVQVQQQYPDKQAEVLSFDRVLQGRITFPGQQWHSDFYANTTQTEDNDAYSCEYAQEVKYAILDGSSNLPETLDSEVDKLSLGHSDLLVQLLDSESCTEAKLIDAVKQLSGRIEVMEKKQAWSNKEVKHLQGMNERLLKRIVELKGTVMTLNSKIDPLTLDDSLNQFVEQCLGSEDVIYLVGGFDGFSSLPSLDSFSPSLDILTPLKPMAVGKSYSSTVALEGKIFVLGGGDGACWFDTVDCYDRSRDDWSTCPSLTCDKGSLAGVSVNGRIYAFGGGDGTKCFSDVEMFDPVHGKWIKNQPMLEKRFALAGVALNGAIYAVGGFNGVQYLSCAERLDPREPNWKMLPKMSAGRGCHTLTVLNEKIFSIGGYDTRAKAMVSTVEVYEPRMPSWVMVEPMNYTRGYHSSAVLGGSIFTFGGVKGEADTILDVVEHYKEGCGWMTTGLKSIGRRCYCSAIVL

SEQ ID NO: 226049 - protein, 464 aa, Zea Mays
MRVKVWCFPLAENQFRNAIIANYYQKIPGVPGQKLHFFKFELDHAQTRVLMDMFTPSPSPNSFWTPPAAAPADEHAKELVLSPGWAPECEGNNNLKSEKVVKSYADIVKKNTFVEVGTRDVDVEHAGSGDESSGGFDELDCQYTPTEREDYALSDRVVQVQQQYPDKQAEVLSFDRVLQGRITFPGQQWHSDFYANTTQTEDNDAYSCEYAQEVKYAILDGSSNLPETLDSEVDKLSLGHSDLLVQLLDSESCTEAKLIDAVKQLSGRIEVMEKKQAWSNKEVKHLQGMNERLLKRIVELKGTVMTLNSKIDPLTLDDSLNQFVEQCLGSEDVIYLVGGFDGFSSLPSLDSFSPSLDILTPLKPMAVGKSYSSTVALEGKIFVLGGGDGACWFDTVDCYDRSRDDWSTCPSLTCDKGSLAGVSVNGRIYAFGGGDGTKCFSDVEMFDPVHGKWIKNQPMLEKLC

SEQ ID NO: 226050 - protein, 57 aa, Zea Mays
MDDFEAAINYYHKALWLKPDDQFCTDMLTYALESICQITARRKPGRGLLTATGGVTC

SEQ ID NO: 226051 - protein, 790 aa, Zea Mays
MASPSSSPPPKLPIPGRRNILITSALPYVNNVPHLGNIIGCVLSADVFARYCRLRGYNALYICGTDEYGTATETKAMEEECSPKEICDKYHAIHSEVYKWFDIEFDKFGRTSSPQQTTICQAIFHKLMENNWLSENTMQQLYCDTCQRFLADRLVEGACPTEGCTNKAARGDQCDNCSHMLNPTELIDPKCKVCKNTPHIRETDHLFLDLPRIEDKLVNYINDTSVAGMWSQNAIQATNAWLKEGLKSRCITRDLKWGVPVPIEKYKDKVFYVWFDAPIGYVSITSSYTPEWERWWKNPDNVELFQFMGKDNVPFHTIMFPSTLLGTGENWTMMKTICVTEYLNYEGGKFSKSKGIGVFGNDAKDTNIPPEASDTLFTWTDLQAKLNSELLNNLGNFINRVLSFIAKPAGAGYDSIIPDAPGAESHPSTSVIAEKVSKSVEQYLDAMEKVKLKQGLKSAMGISTDGNRYLQDSEFWKLYKDNPASCAIVMKTSVGLVYLLACLLEPFMPSFSKEVLRQLNLSPEENISFSEENGESVKAKPPWDLVPAGHKIGRPVPLFEELKDEKVSEYREKYAGSQAERNSKAVADAEATKIANQTQSIALSGGSKKEQKKQSGNSKSKVAEAELSVAKLEIRVGLIRKAEKHPDADSLYVEEIDVGEEAPRTVVSGLVKYIPLEEIQNRKVCVLCNLKPVVMRGIKSDAMVLAASNEDHTRVELVEPPADAAVGERVTFAGHSGETEASLSGKSKVWEKLAADLRSNGDLVACYQDVPFMTSAGVCKVQTIANGEIR

SEQ ID NO: 226052 - protein, 177 aa, Zea Mays
MMKSRIYCTVDGSCNYEDWYCLSKTLAEMEAFDYAKRTGVDVVSVCPSLVIGPMLQLTVNASSSVVVDFLKGDRLVKMKLRHFVDVRDVADALLLVYETPEASGRYICNSHARLVSDVIRLLRSWYPTYQCATKFVQVSHEPAFSSNKLQALGWKFRPFEETLRDSVESFKAAGVIH

SEQ ID NO: 226053 - protein, 150 aa, Zea Mays
MSMQSTSNLTIRWALRGKPKNPLFASVGGDVIVRVESRFVLNQISGQVLEQAESWDLSASSLPAQAYFWLSRRVYSAVESGKDAIEAAKSAASSGLTTKGDQNLEAYPDPSADPTKFFQRPDDGFSQDVYQIGLLLAVIYFIVQFLKATL

SEQ ID NO: 226054 - protein, 772 aa, Zea Mays
MNREKKQAKSREAAVRHARETAVARERWKTAKDIAKKHAAGLQSSLSRTFSRKRSLRTHESSKGGTGAGLPSTSGDQTTTNEAGGKKEDSHTDMARSTEDNPEKGEGVSVQVGGGEKKKTKGKHAHTQSQIFKYAYGQIEKEKMMEQEAQNLTFSGVISMATDEDIKKRPTVEIAFKDLTLTLKGSKKKLLRSVTGKLMAGRVAAVMGPSGAGKTTFLSAIAGKATGCETTGMILINGKTEPIRAYKRIIGFVPQDDIVHGNLTVQENLWFNARCRLSADMLKADKVLVVERVIESLGLQAVRDSLVGTVEQRGISGGQRKRVNVGLEMVMEPSVLILDEPTSGLDSASSLLLLRALRREALEGVNISMVVHQPSYTLYRMFDDLILLAKGGMTVYHGPVKKVEEYFAGLSIVVPDRVNPPDYYIDILEGIVKPDAKEPVNVKDLPIRWMLHNGYEVPRDMLQSASDSESSLRGERGHASGSDAGQSIAGEVWGNVRDIVGQKKDEYDYNKTSENLSNRRTPGILRQYKYYLGRCGKQRLREARIQGVDYLILGLAGICLGTLAKVSDETFGALGYTYTVIAVSLLCKIGALRSFSLEKIHYWRERASGMSSLAYFLSKDTIDHFNTIIKPIVYLSMFYFFNNPRSSIWENYVVLLALVYCVTGIGYTFAIFFQPSSAQLWSALLPVVLTLIATQQKDTFFANLCYTKWALEAFVIANAQKYSGVWLITRCGSLLNSGYDINDRILCIVVLVANGVIFRCVAFFCMVIFQKD

SEQ ID NO: 226055 - protein, 87 aa, Zea Mays
MFLGPVNLRTTRKIVQQKVKEDRRRGMDGRQRHWCGDKVGEHRRGARCASDTGATQKGAGDKVRVSTIRVRRRRSRALLPCVDPIQR

SEQ ID NO: 226056 - protein, 263 aa, Zea Mays
MLCDAEMEAESCVVLLVHWMFGSSSSLLGCSDMMNQSLFLVGEIGGNDYNGPLLSGVPMEKIRAITPSVVAKISSTISELIRLGAKTLVVPGNLPIGCIPDYLMIFKSNKEEDYEPQTGCLRWMNEFSQYHNKVLVEQLKKLRKLHPGATIIYADYYGAAMEIFLSPEQYGIEYPLVACCGGEGPYGVSPSTGCGFGEYKLCDNPEKYGSWDGFHPSESAYRAIAMGLLLGSYTRPSITSTTTSCPQLMELGSSAEYKPLYDL

SEQ ID NO: 226057 - protein, 537 aa, Zea Mays
MAEKLRDLSQPVDVTLLDATVAAFYGTGSKEERSAADQILRDLQNNPDMWLQVVHILQNSQNLNTKFFALQILESVIKYRWNALPVDQRDGIKNYISDVIVQLSSNEVTFRQERLYVNKLNIILVQVLKHEWPARWSSFIPDLVAAAKSSETLCENCMAILKLLSEEIFDFSRGEMTQQKIKELKSSLNSEFRLIHELCLYVLSATQRPELIRATLATLHAFLSWIPVGFIFESPLLETLLKFFPMAAYRNLTLQCLTEVAALQFGDFYNVQYVKTYTFFIIQLQAILPPEKIPDVYANGSTEEQAFIQNLALFFTSFFKNHMRILETTQENIAALLMGLEYLIGISYVDDTEVFKVSLDYWNVFVLELFEAHNQMEPAVTVSMMGLQAQMVPGMVDGGTAVKQRRQLYSGPLSKLRMLMICRMAKPEEVLIVEDENGNIVRETMKDNDVLVQYKIMRETLIYLSHLDHEDTEQQMLKKLSKQLNGEDWSWNNLNTLCWAIGSISGSMVEEQVCCWSVSKISQGSLEVFENCGQQIV

SEQ ID NO: 226058 - protein, 231 aa, Zea Mays
MRNCVGGYLLYFISGFLWCFVIYYWKRHAYIPKDAIPTNEAMKKQIAVASKAMPFYCALPTLSEYMIESGWTRCYFNISEMGFSAYLCYMAMYLIFVEFGIYWMHRELHDIKPLYKHLHATHHIYNKENTLSPFAGLAFHPLDGILQAIPHVLALFLLPTHFRTHIALVFLEGVWTTNIHDCIHGKVWPVMGAGYHTIHHTTYRHNYGHYTVWMDWMFGTLREPDDILKKA

SEQ ID NO: 226059 - protein, 581 aa, Zea Mays
MGHNKGFFLTKPEIRPQGGSKPGPEGTEVCERLAYYGISKSLVTYLSTRLHEGNVSAARNFTTWQGTCYLTPLIGATLADSYWGKYRTIAVFSTIYFLGMSALTLSASVPSFQPPQCVGSICPQPTLSQYLLYFVGLYMIALGAGGIKPCVSSFGADQFDDTDPVEKAKKGAFFNWFYFCINIGSLISGTVLIWVQENCGYSIGFGIPTFFIALAIGSFFIGSDIYRFQIPGGSPLTRACQVVVAATHKRKTDLPVDSSLLYELDGKTSAIEGSHIHLYCTFVLTLHAFKLVSWNFLDTATFFQNYESFLDKAAVILWNECDGPRNSWRLCTVTQVEELKILLRMFPIWATGIVFFTVCAQNSSMFIEQGMTLDNQIGPFKIPAATLSSLDVISVVVWVPIYERLVVPIARRFSGKERGFSELQRMGIGLFVSTVAVAVAALVEINRLQVAVAEDLVHQKVPVPMSILWQAPQYLLVGVGEVFTSIGQAEFFYNQSPDAMRSLCSAFALVTVSLGSYLSSFILSLVSYFTTRNGQLGWIPDNLNEGHLDRFFWLIAGLSSLNFLVFIYYAQQYKCKIASVA

SEQ ID NO: 226060 - protein, 387 aa, Zea Mays
MAVAVPNAPGRLFLLQSTPFPNPSSSASAARAQSFRVPPLRLSLFRRMAGRSLTVIAGASGGSERDLSASAVSVEALDSVASDSDLETKEPSVSTMLTSFENSFDKYGALSTPLYQTATFKQPSATDYGTYDYTRSGNPTRDVLQSLMAKLEKADQAFCFTSGMAALAAVTHLLQAGQEIVAGEDIYGGSDRLLSQVVPRNGIVVKRVDTTKISDVVSAIGPSTRLVWLESPTNPRQQITDIKTISEIAHSHGALVLVDNSIMSPVLSRPIELGADIVMHSATKFIAGHSDLMAGILAVKGESLAKEVGFLQNAEGSGLAPFDCWLCLRGIKTMALRVEKQQANAQKIAEFLASHPRVKQVNYAGLPDHPGRALHYSQEDCPDQLCL

SEQ ID NO: 226061 - protein, 75 aa, Zea Mays
MAIVPVRRVPGVPDAHAQRHGFGAHDVATRCPGLQGIGLAIRRWMICHYWRPAVMVSGLDYAIPREFIVLGWRLS

SEQ ID NO: 226062 - protein, 231 aa, Zea Mays
MALPLYGCRSCAVHDAIIFCHCCDARLCLHCDAAVHGATEAGALHPRARLCDACGAAPAALRCDGTVTLCAVCVGRGAPGVTRTRVATYTGCPGPAEMVRLISVDPPQLEQDFEAWLADKLPRLVVEEDVGLPPDWDVAVETARLEKMLAECCEPETEEADQQRLQMQMLLQDASAMAKKREGRERAKQRYIEKRKNRRFCKQIMYASRKARADTRWRVKGRFAKQASASF

SEQ ID NO: 226063 - protein, 236 aa, Zea Mays
MALPLYGCRSCAVHDAIIFCHCCDARLCLHCDAAVHGATEAGALHPRARLCDACGAAPAALRCDGTVTLCAVCVGRGAPGVTRTRVATYTGCPGPAEMVRLISVDPPQLEQDFEAWLADKLPRLVVEEDVGLPPDWDVAVETARLEKMLAECCEPETEINLMQEADQQRLQMQMLLQDASAMAKKREGRERAKQRYIEKRKNRRFCKQIMYASRKARADTRWRVKGRFAKQASASF

SEQ ID NO: 226064 - protein, 61 aa, Zea Mays
MSASSLDSTDRIYPEITESIPYGDCLFERYAQDPDQMIMGVIRVIIINFSWILPGKNRKNM

SEQ ID NO: 226065 - protein, 181 aa, Zea Mays
MLTQMISIVFRRMESEQVSVSPGSSVVKDMPSSITNDSENGEISTDGQDEEKVTLGDALSMNRPSEAPPTSVEELQNLAGGADIKGLEAVLDKAVELEDGKKVSRGIDLDTVNIIQRDALLLFRTLCKMSMKEESDEVATKTRLLSLELLQSKHIFRMLFCEHLSLHLQLFFRGKLVSSFL

SEQ ID NO: 226066 - protein, 388 aa, Zea Mays
MAPPGWRLGWVWAKKEVIWAMTGGQATEQGDCSRFKASVLPHCCRRDPEVVDLLPGTPYNTQTANCCRGGVLASWAQDPSDAVASFQVSVGQAGSTNRTVKVPRNFTLLAPGPGYTCGAAKLVKPTKFMSQDGRRSTQAHMTWNVTCTYSQFLAQRSPTCCVSLSSFYNDTIVSCPACSCGCQNNNSSSTAAPGSCVEGSRRSPYLASVVNDPSKNSLAPLVQCTSHMCPVRVHWHVKVSYKEYWRVKITVTNFNYRMNYSQWNLVAQHPNFDNLTTIFSFNYRPLNPYGVINDTAMLWGIKYYNDLLMTAGPDGNVQSELLFRKEPSTFTFHKGWAFPRRVYFNGDNCVMPPPDAYPWLPNAASPRLSPSLLLPLVAAAWTAFAVLS

SEQ ID NO: 226067 - protein, 174 aa, Zea Mays
MVSAVPWKHIVHWRNHLKFPEDAKLSNEARDLICRLLCDVDHRIGSAGADQIKAHPWFQGVAWDKLYEMEAAFKPQVNDELDTQNFMKFEELENPPAKTGSGPSRKMMLNSKDLSFVGYTYKNFDAVKAIKISDLQRNSSLTRPSIGSIFGPSGMDSPMEPNGRDTHMHTVSSG

SEQ ID NO: 226068 - protein, 89 aa, Zea Mays
MEGPPPPPAPSMEGKPNLLARSPRKVHHLTTCRAATSMEGVVGARRFFSATATPPAPWRCCGFSATTHILTVPFFKYSQLSREARLTSS

SEQ ID NO: 226069 - protein, 334 aa, Zea Mays
MRRPHNAVQPSAMPPAVGLLPLLLLLLLFHLPVSLCSHHHHHSTPPASPSPSPSPAPSSAPLAVLLACNATRFQPACVSTLSGAAPDASTADLLAATLSALRARLPPAVSTAKSVLASSSNVNLSNAATNCLTFLALSSRRLSPSPSAPPLLSASTALLHLYDCWSAYKYVNFSRTISDAMAYLDDTITVNSNYISMLAARQRYGDETSLWRPPQTERDGYWPPPAASSGADVDALGVPKGLPANATVCGAGCDYRTVREAVAAAPDYGDGAFVVHVKEGAYRETVSVPWEKTNVVLVGDGMGKTVITGDLNADTSGVSTFNTATVAPGTLLQK

SEQ ID NO: 226070 - protein, 1466 aa, Zea Mays
MDDFSFSRSGTHQPPPRRQQRRSSAFSTPDNSTSFAATPRRTPGRRGGALDDASWQSSVSWQPADTSWAQPHGLGAAVGPWAPAGSDAASRRGPALFRRTARDYYLSKRSSRMMMHHHRSSAAQQSRSVAAAAASAAGGGGKRLELQSVVTDASRALVVAPNTSFASNDDVIISTATAGPAAKAVVKYSDDTHYVSREVSFSRDNRDKLYVPPRRGRNDAPPSFGYDDDASATSYSRSQHYGGGVDEDDYDLDLDLDLDDDDGEIEVRVGKPVSLAGLFKYSAPLDVVLLVLGCVGAMVNGGSLPWYSYLFGNFINKVVNTDKSQMMKDVKQISFYMLFLAAAVVVGAYLEIMCWRMIGERSALRMRREYLKAVLRQEVGFFDTEVSTGEVMQSISSDVAQIQDVMGDKMAGFVHHVFTFIFGYAVGFSKSWKIALAVFAATPVMMSCGLAYKAIYGGLTAKDEASYKRAGSVAQQAISSVRTVLSFVMEDRLADRYAERLDRAAPIGIKMGFAKGAGMGVIYLVTYSQWALALWLGSRLVARGDIKGGDAIACFFGVMVGGRGLALSLSYYAQFAQGRAAAGRVFEIVDRVPDIDAYGGGGRSLSSVRGRIEFKDVEFAYPSRPEAMVLYNLNLTIPAGKMLALVGVSGGGKSTMFALLERFYDPTRGTITLDGQDLSSLNLRWLRSQMGLVGQEPVLFATSIIENVMMGKEDATRQEAIAACAKANAHTFVLGLPDGYDTQVGDRGTQLSGGQKQRIALARAIIRDPRVLLLDEPTSALDAESEAVVQQSIERLSAGRTVVVIAHRLATVRNADTIAVLDRGAVVESGRHDDLLARGGPYAALVKLASDSGRSSGDAGRKSPAAPAGAATAYNSFTDDSAVYDDMSSLSMSKPRYGGGARRTYPRGEAEEDGVGKTKDDASNSKVSVSEIWKLQRREGPLLVLGFLMGINAGAVFSVFPLLLGQAVEVYFDSDTSKMKRQVGALATAVVGLGVACILAMTGQQGLCGWAGARLTMRVRDRLFRAILRQEPAWFDEEDNAMGVLVTRLARDAVAFRSMFGDRADDGAYARASSIAAGAVSNVRTVAALCAQGNIVGAFNRALDGPASKARRRSQVMGVILGLSQGAMYGAYTATLWAGALFIKRDLSKFGDVSKIFLILVLSSFSVGQLAGLAPDTSGAPVAIAGILSILKRRPAISDEDGSGSGKRRRMIKDGRPIEVELKRVVFAYPSRPDVTVLNEFSVRVKAGSTVAVVGASGSGKSTVVWLVQRFYDPAGGKVMVGGIDVRELDLKWLRGECALVSQEPALFSGSIRENIGFGNPKASWAEIEEAAKEANIHKFIAGLPQGYDTQVGESGVQLSGGQKQRIAIARAIVKQSRILLLDEASSALDLESEKHVQEALRKVSRRATTIVVAHRLSTVREADRIAVVAGGRVVEFGGHQELLATHRDGLYAAMVKAEVEAQAFA

SEQ ID NO: 226071 - protein, 351 aa, Zea Mays
MEESSCIHVQLVDPSFAWLDSICEADDKISPSKRPRNLLMENSAFGTNSELSRLQFCVDIEILEKEYILTEAQYMLSTLKSSFDFSESQSIESLMDILINEKLYDIAFTIVLKFWKESEIKKQLDRVFSVIAQQCCSNRSDNKSSKQVPLLPSSENDAWEINNRSIAVTQQLQGSNHWETLELYLDKYKDLHPRLPVIVAETLLYTDPEIELPLWLVQMFKANKAGNKISWGMSGKEADPAALFRLYINYGRHAEATNLLVEYLESFASSRPVDVLHRKKMSAVWFPYTAVERLWCQLGEMQRAGHSVDQCDRLKKLLHGALMSHLQQVVVDSDDVLSSVGDGQGMEDQSS

SEQ ID NO: 226072 - protein, 78 aa, Zea Mays
MESCKKVAASLKSCEPWGNRASWTNAVGPGWKLSFAVEPWTKGFSASCAAPYSAGATEHQLSLDEKVDNSTVASGFDG

SEQ ID NO: 226073 - protein, 62 aa, Zea Mays
MPGYERMFTDFLLSLAQSKYKRYASPPRQCTFAGDISISGRLEEVGKSQCVCSKSVAHAGLE

SEQ ID NO: 226074 - protein, 167 aa, Zea Mays
MVYIIGETIQVVRRFSLPDVNTYDLLNNVGIYRLPRVSCAAASADDADLDPLIAELPPRPLLEKLGRELRGRLGLRLFNIDMIRELGTKDRYYIIDINYFPGYGKMPGYERMFTDFLLSLAQSKYKRYASPPRQCTFAGDISISGRLEEVGKSQCVCSKSVAHAGLE

SEQ ID NO: 226075 - protein, 148 aa, Zea Mays
MPVVCPSVHNPCFLFSLMQIWYTLCRSVITSVIQYVPCLPFTLKIRINDRHMVVLFFHSTDPYFLGLHFCWDDIVSCYYCEQRTLQETVIHDLLISYLSFSGSCKGTDDRSTLQPKRAVYIIRSKQEWPYIIAKYEDGLDEKFLGCNE

SEQ ID NO: 226076 - protein, 279 aa, Zea Mays
MDARLGCLSVHLDTPQCFSAEIYAVDLNVAGAQEDLKINLAQETLRGLLIHWSKRKQKSSSHSLCNGDSSIGKDVPSKDSPRSRPEVDDATQNHATHVLPSFEFSTVSPPSIITEGSSGGPWRKRITDLDVTEGDLPWWCVDCITLNRYPKENTKCGFYLHPAEGSPAPNITQGKLSAPRILRIHKVANYVVEKLVLDKPLDGGSDAFVMGLSSAQSQLSVLDSSSRLGLKPWQKTKPCIEILCNNQVLSPEMSLATVRTYIWKKPEDLILHYRVVQPR

SEQ ID NO: 226077 - protein, 1861 aa, Zea Mays
MDVNDVIKDEDLLAQKNYWGSHVQNNGFHSFNSGHNIQQLVSTMVPRYPKHSNFRSRRLSARELNMLKRKAKSNAKDHTKAVSEDDEVTLKGSVPSNGASSEQAGAQNGVFDTAVEEDNLEYNENGRWPFQQFVDQLIHDMFDPIWEVRHGTIMALREILTHHGACAGVYFPDLSLPSSDLDGKTNFDSLKREHGIDLNEDVHLEHLEPALKKHKKEPKCAESMMDCDKELVDSDYLKTEGDLSNVPDVLTAEPNSTHVKVEPEFCVDDSADPSKGVSTCKSQKKLNSISHLSSHILAPESSKFMKLMKLAKYSYMKNWEFLQDCAIRFLCVLSLDRFGDYVSDQVVAPVRETCAQALGAVLKYMHPSLVCHTFKILLQMQHRQEWEVRHGSLLGIKYLVAVRQEMLKDLLDYIIHACKAGLEDPDDDVRAVAAEALIPAADSLVRLNDQILHPIVVLLWDILLDLDDLSPSTSSVMNLLAEIYSQPEMVPKMLGTAASGEKGEFDLNEATQIAEQEDELTSIENPYGLATLTPRLWPFMRHSITSVRRSAIRTLEKLLEVGNTRSSAGTTPSKLWPTSILGDALQVVFQNLLLESNDDILQSSERAWKLLLQCPEKDLEYAARLYFSNWVQLATTPFGSALDSTKMFLPVALPRGNRSRAAAKIRSARLEHEYTTMISFGSTGESISHEKHSDVPSIFSNIIVGSDPDKSVTHTRVLTSMALGLFASKLPVSSWQVVLSPLANHLMSLSGVQRQVASMIIVSWFKDLRGRDPVSVGTLLAFLSSLKEWLVDLLTCSDPALPTKGSVLPYSELSRTYTKMRNEANNLLHLIDSCAAFKDYSSSLNLNTDVLTVDDAINFASKLLLPSESDIPSETENIFLNNIESAKQGLLSTSGYLKCVQNNLHVTVCSLVASAVVWMSCLPSKLNPVILPLMAAIKREQEEVLQDKAADALAELIFSCIGRKPGPNDKLTKNLCTLTCTDASETPQAAIINSMQVIEDQNLLSIGKRFSSHRSRGHTTSGGDERSKMEGFISRRGSELAFKHLCVKFGPSLFENLPKLWDCLTEFLRPVKTEDGIPEDDASIAQLGRSYEDKDPQSLINNIQVVRSISPHLAEPLRPQLLNLLPSILGCVRHPHVAVRLAAARCITSMAKSLTDDVMVLVIENVIPMLSDLSSVCARQGAGILLSLLVQGLAVELVPYAPFLVVPLLKCMSDPDGSVRQTVTHSFAALVPLLPLSRGASLPCGLSERLSSSAEDVQFLEQLLDNTQIDDFKLNIDLNVELRRYQQEGINWLAFLRRFKLHGILCDDMGLGKTLQASAIVASDIAEARARNDEKILTSLIICPSTLVAHWEYEIEKYIDSSILKPLQYVGSSQDRVTLRSQFDKVNVIITSYDIIRKDIDFLGNITWNYCVLDEGHIIKNSRSKITFAVKQLKAQHRLILSGTPIQNNVLELWSLFDFLMPGFLGTEKQFQAAYGKPLLAAKDSKCSAKDAEAGILAMEALHKQVMPFLLRRTKDEVLSDLPEKIIQDRYCDLSLLQLKLYDKFSSSNAKDEISTIVKANELEESAPQPKATRHVFQALQYLLKLCSHPLLVTGENPPNHLVDLLNEIGLGSGSELHELHHSPKLVALQEILQECGIGSEISSPDASTAVGQHRVLIFAQHKAFLDIIEKDLFQSHMRSVTYLRLDGSVDPEKRFEIVKAFNSDPTIDVLLLTTHVGGLGLNLTSADTLVFVEHDWNPMKDLQAMDRAHRLGQRKVVNVHRLIMRGTLEEKVMSLQRFKVSVANAVINAENSSLKTMNTDQLLDLFTSTPASRKASDEQSKRKSGGKGLKSILNGLDELWDQSQYADEYDLNQFLAKLNG

SEQ ID NO: 226078 - protein, 1138 aa, Zea Mays
MLMTLSKTRIFLPKKIIGVHMYRIMDSIHLIQVASMIIVSWFKDLRGRDPVSVGTLLAFLSSLKEWLVDLLTCSDPALPTKGSVLPYSELSRTYTKMRNEANNLLHLIDSCAAFKDYSSSLNLNTDVLTVDDAINFASKLLLPSESDIPSETENIFLNNIESAKQGLLSTSGYLKCVQNNLHVTVCSLVASAVVWMSCLPSKLNPVILPLMAAIKREQEEVLQDKAADALAELIFSCIGRKPGPNDKLTKNLCTLTCTDASETPQAAIINSMQVIEDQNLLSIGKRFSSHRSRGHTTSGGDERSKMEGFISRRGSELAFKHLCVKFGPSLFENLPKLWDCLTEFLRPVKTEDGIPEDDASIAQLGRSYEDKDPQSLINNIQVVRSISPHLAEPLRPQLLNLLPSILGCVRHPHVAVRLAAARCITSMAKSLTDDVMVLVIENVIPMLSDLSSVCARQGAGILLSLLVQGLAVELVPYAPFLVVPLLKCMSDPDGSVRQTVTHSFAALVPLLPLSRGASLPCGLSERLSSSAEDVQFLEQLLDNTQIDDFKLNIDLNVELRRYQQEGINWLAFLRRFKLHGILCDDMGLGKTLQASAIVASDIAEARARNDEKILTSLIICPSTLVAHWEYEIEKYIDSSILKPLQYVGSSQDRVTLRSQFDKVNVIITSYDIIRKDIDFLGNITWNYCVLDEGHIIKNSRSKITFAVKQLKAQHRLILSGTPIQNNVLELWSLFDFLMPGFLGTEKQFQAAYGKPLLAAKDSKCSAKDAEAGILAMEALHKQVMPFLLRRTKDEVLSDLPEKIIQDRYCDLSLLQLKLYDKFSSSNAKDEISTIVKANELEESAPQPKATRHVFQALQYLLKLCSHPLLVTGENPPNHLVDLLNEIGLGSGSELHELHHSPKLVALQEILQECGIGSEISSPDASTAVGQHRVLIFAQHKAFLDIIEKDLFQSHMRSVTYLRLDGSVDPEKRFEIVKAFNSDPTIDVLLLTTHVGGLGLNLTSADTLVFVEHDWNPMKDLQAMDRAHRLGQRKVVNVHRLIMRGTLEEKVMSLQRFKVSVANAVINAENSSLKTMNTDQLLDLFTSTPASRKASDEQSKRKSGGKGLKSILNGLDELWDQSQYADEYDLNQFLAKLNG

SEQ ID NO: 226079 - protein, 1995 aa, Zea Mays
MAQNSSRLHRLLTLLDTGSTQATRFAAARQIGEIAKSHPQELNSLLKKVSQYIRSKNWDTRVAAAHAIGAIAENVKHTSLKDLYASVQAEKHASGFSDGSDDAGSALPRTDSAATSDLAFGSFDIGRVLEFGSPLLASGGQEYDIADSGKNPAERLARQKKNLRRRLGLDLCEQFMDVNDVIKDEDLLAQKNYWGSHVQNNGFHSFNSGHNIQQLVSTMVPRYPKHSNFRSRRLSARELNMLKRKAKSNAKDHTKAVSEDDEVTLKGSVPSNGASSEQGVFDTAVEEDNLEYNENGRWPFQQFVDQLIHDMFDPIWEVRHGTIMALREILTHHGACAGVYFPDLSLPSSDLDGKTNFDSLKREHGIDLNEDVHLEHLEPALKKHKKEPKCAESMMDCDKELVDSDYLKTEGDLSNVPDVLTAEPNSTHVKVEPEFCVDDSADPSKGVSTCKSQKKLNSISHLSSHILAPESSKFMKLMKLAKYSYMKNWEFLQDCAIRFLCVLSLDRFGDYVSDQVVAPVRETCAQALGAVLKYMHPSLVCHTFKILLQMQHRQEWEVRHGSLLGIKYLVAVRQEMLKDLLDYIIHACKAGLEDPDDDVRAVAAEALIPAADSLVRLNDQILHPIVVLLWDILLDLDDLSPSTSSVMNLLAEIYSQPEMVPKMLGTAASGEKGEFDLNEATQIAEQEDELTSIENPYGLATLTPRLWPFMRHSITSVRRSAIRTLEKLLEVGNTRSSAGTTPSKLWPTSILGDALQVVFQNLLLESNDDILQSSERAWKLLLQCPEKDLEYAARLYFSNWVQLATTPFGSALDSTKMFLPVALPRGNRSRAAAKIRSARLEHEYTTMISFGSTGESISHEKHSDVPSIFSNIIVGSDPDKSVTHTRVLTSMALGLFASKLPVSSWQVVLSPLANHLMSLSGVQRQVASMIIVSWFKDLRGRDPVSVGTLLAFLSSLKEWLVDLLTCSDPALPTKGSVLPYSELSRTYTKMRNEANNLLHLIDSCAAFKDYSSSLNLNTDVLTVDDAINFASKLLLPSESDIPSETENIFLNNIESAKQGLLSTSGYLKCVQNNLHVTVCSLVASAVVWMSCLPSKLNPVILPLMAAIKREQEEVLQDKAADALAELIFSCIGRKPGPNDKLTKNLCTLTCTDASETPQAAIINSMQVIEDQNLLSIGKRFSSHRSRGHTTSGGDERSKMEGFISRRGSELAFKHLCVKFGPSLFENLPKLWDCLTEFLRPVKTEDGIPEDDASIAQLGRSYEDKDPQSLINNIQVVRSISPHLAEPLRPQLLNLLPSILGCVRHPHVAVRLAAARCITSMAKSLTDDVMVLVIENVIPMLSDLSSVCARQGAGILLSLLVQGLAVELVPYAPFLVVPLLKCMSDPDGSVRQTVTHSFAALVPLLPLSRGASLPCGLSERLSSSAEDVQFLEQLLDNTQIDDFKLNIDLNVELRRYQQEGINWLAFLRRFKLHGILCDDMGLVAHWEYEIEKYIDSSILKPLQYVGSSQDRVTLRSQFDKVNVIITSYDIIRKDIDFLGNITWNYCVLDEGHIIKNSRSKITFAVKQLKAQHRLILSGTPIQNNVLELWSLFDFLMPGFLGTEKQFQAAYGKPLLAAKDSKCSAKDAEAGILAMEALHKQVMPFLLRRTKDEVLSDLPEKIIQDRYCDLSLLQLKLYDKFSSSNAKDEISTIVKANELEESAPQPKATRHVFQALQYLLKLCSHPLLVTGENPPNHLVDLLNEIGLGSGSELHELHHSPKLVALQEILQECGIGSEISSPDASTAVGQHRVLIFAQHKAFLDIIEKDLFQSHMRSVTYLRLDGSVDPEKRFEIVKAFNSDPTIDVLLLTTHVGGLGLNLTSADTLVFVEHDWNPMKDLQAMDRAHRLGQRKVVNVHRLIMRGTLEEKVMSLQRFKVSVANAVINAENSSLKTMNTDQLLDLFTSTPASRKASDEQSKRKSGGKGLKSILNGLDELWDQSQYADEYDLNQFLAKLNG

SEQ ID NO: 226080 - protein, 115 aa, Zea Mays
MLRFTIAAIPFVPLLLKSLRNMQILFRGLELGIWVSVAYLAQAMGLVTAGAGRASFISALTVIIVPFLDGLIGAEVPAHTWFGAFLSLFGVIMLELSGSPPCVSRIIYMDRLVIF

SEQ ID NO: 226081 - protein, 78 aa, Zea Mays
MVASYIHLMKLGSLGNPSSTPLPGCFSLVRASRPAPAGIPITLSMDQSSTGVISWRLVITLKTCGKLFLLGTCSQMLS

SEQ ID NO: 226082 - protein, 344 aa, Zea Mays
MVMMMRSCLGGGLLPVAVMLCLNVVAAVMVSLVKVAMDGGMKPLVIVTLQQLTAAVFLAPIAFFKERKSRPKLTLEIFAYIFVSAALGLRHILQGSSSSVHDLRGPALHHGHLRDRLLQHRPRAHLPPGRRHAVRSAGPQEQDGVGEAAGHAGVAGRRHGAHPLQGRGAHPRGGSLAGPAAALPRPVAAERRRQPRQVDAGHRGHPGQLRLPLLLVPAPRPPRQEVPARLLLQRAHVLAQLPPGRRRRPLHPAQHLPLDRHQQVQHPHRPIRQRSRVRGRLHTGGADHRLRHRLLHPARAALPRKRAGISASDRWPLPSAVGQEAGGPALSSSSSSKGCRRRPC

SEQ ID NO: 226083 - protein, 160 aa, Zea Mays
MDAAAVLKRKGEEAPEAWLLGGVVVPATKIRRLTPCCKRRATTELCSRRWRPGTGTSTWPWSRGRLPRSMSMPPPAPQRRQWKWWTLIRTATAHPWRSSTTLRARPRHQLAVRCRWRRSTTITSSSTSGQRSTALRRRSYSSRPRATRQALSRGRGDGAN

SEQ ID NO: 226084 - protein, 244 aa, Zea Mays
METATTSPEHPLLRRSSPSSNTNADADSVNLSSPPPSAARPSRLAALIGRVGWPRGPSMMVHEATTLQLHRRRADWAHSRPVVTLDIAWNVACAAAAALVLASSAKDSPVKPLRLWLVGYAAQCLVHVGIVFTRLETRARHAWGPASDVESAGAGTDSSGTDSEDDETAEGRSSHASRCETINRLISFLWWIIGFYWLVSGGEVLEYGAPRLYWWVHQMEILVSFRDIDIMIQVRTVRRKPMKV

SEQ ID NO: 226085 - protein, 327 aa, Zea Mays
MDHHHHHHHHHHHHMIPGQEPSATDGAAPDSFFLGPAAAVIFSGGAGAGSSSSGAAALGSSAGGGGGPSPSSSSPSLSRYESQKRRDWNTFGQYLRNHRPPLSLSRCSGAHVLEFLKYMDQFGKTKVHTPVCPFYGHPNPPAPCPCPLRQAWGSLDALIGRLRAAYEENGGTPEMNPFGARAVRLYLREVRETQARARGISYEKKKRKKPSAASAAAAGPSSEGSPPPGPSSGGGGPDTSSPQFIMPSASWSSFRCCWSRPLFFVFFSSGLHFAKDFSTSPTPTPPTFFSLFHSLESSLCACVSTGLIVVAVLFSFHQPIGSRQSLC

SEQ ID NO: 226086 - protein, 141 aa, Zea Mays
MYLSNVEKGGETIFPNAEGKLLQPKDDTWSDCARNGYAVKPVKGDALLFFSLHPDSTTDSDSLHGSCPAIEGQKWSATKWIHVRSFDLTVKQPGPSDGCEDDNVLCPQWAAVGECAKNPNYMVGTKEAPGFCRKSCKVCAE

SEQ ID NO: 226087 - protein, 243 aa, Zea Mays
MEAPPVALFDTLKAAKPFFLLAGPNVIESEEHVLKMAKHIKAITTKLGIPLVFKSSFDKANRTSSKSFRGPGLEEGLKILQKVKATYDLPIVTDVHESHQCEAVGRVADIIQIPAFLCRQTDLLVAAAKTGKIINIKKGQFCAPSVADVTHALQQPAGRKLDGGGVASGGLRELIPCIARTSVAVGVDGIFMEVHDDPLNAPCDGPTQWPLRNLEELLEELIAIARVTKGKKPFKIDLTPFQE

SEQ ID NO: 226088 - protein, 306 aa, Zea Mays
MAAALPQLDDEIVHGMAIGAVFTDYTGKINCLDFHRTEDLMITSSEDDSIRLYNITSATLLKTTYHRKHGADRVCFSHHPSSILCSSRYNLESIESLRYLSLYDNRCLRYFKGHKDSFMSGSLDHSVRIWDLRVNACQGILRLRGRPSVAYDQQGLVFAVAMEGGAINLFDSRSYDKGPFDTFLVGGDTAEVSDIKFSNDGKSMLLTTTNNHIYVLDAYVGDKRCGFSLEPSPNVTNEAAFTPDGQYVISGSGDGTLHAWNINTVQEVACWNSRIGPITALKWAPRRAMFATASTALTFWIPNRSN

SEQ ID NO: 226089 - protein, 481 aa, Zea Mays
MDQAADSSELLRRIEELQREKDEKQNSLELLLRRIEGLQYEMDEKVDLVEVLTRQVENLQRERDELRKDIEQLCMQQAGPGYVSVATRMLTQRTAALEQDIENLQKKLGGCLRENQNLQEELAEAYRIKSQLAELHGAALSKNKDLEKQVRFFQSSVAQAFAERDSSLMECEKAKEREEAVSRKFADFEERMREYQSEIDEQKHLNDDLQRELTELKAHTELSLKVILKFYDLRCRDSGCSSSLTIEEKCSILLGDSADNWSFSSDGGTSTLKYIASLEEEKESLKAKISKLQSNLRMGLEIEQHLQRNARILEKRQALYDGFLRNGLSELQKFYTCQKAEIMKILEEESLRLMKVVAEIQDKLTEICINTEVSDHPADEIQCCDSSCKDVHVTKDISPSTCRKSDYPADLNSVSFDESKALAQALQEKMEALMLFSQEQERYLLEKQRDLIVIEELQKNLSQVVPLEFLLVIIFQSQRTI

SEQ ID NO: 226090 - protein, 101 aa, Zea Mays
MVAGFYHEGYEDPLLMLMRRRTVHAGLVVKGEEGALSLTTKERSAHASKGLPVNHCSGFRTPSGINFSETDGIPRESFRVIVNAQELGFESTETPRTDRSH

SEQ ID NO: 226091 - protein, 227 aa, Zea Mays
MKTIEDLVVPASVDQLLSDYAKRFHQIKTPRKLLWKKNLGTVKLELQFDGRSVQFTVAPVHAAIIMRFQEKSSWTSKALATEIGIPMDSLNRRISFWTSKGVLTESAGPDADDRTFTVVDSMSDVNKDSIVNERMAEYQMTEEEGESSVASVEEQLKKEMTVYEKYIVGMLTNFGSMSLDRIHNTLKMFCIAEPSYDKSLQQLQSFLSGLVADEKLETRDGLYLLKR

SEQ ID NO: 226092 - protein, 524 aa, Zea Mays
MDPAAAALGAVPAAGAPPPGAAAGDQQAAPRVERLSAGVQQQLNLEGMRARAVGLYKAISRILEDFDVIIRTNPSASPKWQDVLGQFSMVSMELFNIVEDIKNVSKVFVVYPRNVNAENATILPVMLSSKLLPEMEVEETTKREQLLSGITNLPVPTQIEKLKVRIDMIGSACETAEKVIAECRKSYGLGSRQGTNLGPTLDKAQAAKIQEQEGLLRAAVNYGEGLRVPGDQRHPQSLPIHLIEVLPLGDGAQNFGDSSGSYPKNMSTFAPNSVNSQGNQIQASGGQLLGRPAPSPGTTGTPNFENVSTPPMPYANSPRSGTNMMNTPSPQQHLTPQQQRQKLMQHSQPLHQPVRPSAAGMLAQVPGQQQMQYNQALSQQFHNRQMQPGRMQPGMAQSQLNQGTQLRSHLGQFTGAANNAMFNAAQASSNSQMMANMHGSQSLMPQMQYGMAGGHPHRSHPQMLTDQMFGMGATNSSMMGMQQQQQGLYGNMQAGAQNVPQGMAGLQNQTQNPNFTQQRQQNQQ

SEQ ID NO: 226093 - protein, 291 aa, Zea Mays
MDAAAAAAAAASPTSKRIALVTGGNKGIGLETCRQLASRGVRVVLTARNEARGLEAVERVRCARGDAEVYFHQLDVTDPCSAARLADFVRDQFGRLDILVDGMDVNQRVEWMKENSKETYEEAVQCMKTNYYGAKLVTEALLPLLQLSSSGRIVNVSSGFGLLRNFNSEDLRKEFEDIDNLTESRLEELMDKFLEDFKANLVEAHGWPTGGSSAYKVVKAALNAYTRILAKKYPTLRINCLTPGYVKTDMSMHMGVLTLEEGARNPVKVALLPDDGPTGAYFDLNGEASFV

SEQ ID NO: 226094 - protein, 120 aa, Zea Mays
MFRNEYIGDTPYISCTPTLCHHKLSIRDQFLVLSSDGLYQYLSNEEVVLHVENFMERFPEGDPAQSLIEELLSRAAKKAGMDFYELLDIPQGDRRKYHDDVTIMVISLEGRIWKSSGTYV

SEQ ID NO: 226095 - protein, 309 aa, Zea Mays
MHRLVLEHGRTSMSWFGPSPKVTIVDPDLAKDVLSNKFGHFEKLKVPALSKMLGSGVASHEGEKWVKHRRILNHAFHLEKLKRMLPAFSTCCEELVSRWAAESLGSDGSCELDVWPELQNLTGDIISRTVFSSSYSEGRRIFQLQVEQASLVMTNIRKIMIPGYMYLPTANNRKMRRNNREVESILREIIGKRIQAMEQGEGTKDDLVGLLLETNMRDDMGMTIEDVIEECKVFYFVGMETTLVLLMWTMVVLSMHPEWQDRAREEVTALFGRDDKPEYDGLSRLKVIAKTGLLSKLRFQWHIPSYIGH

SEQ ID NO: 226096 - protein, 309 aa, Zea Mays; identical to SEQ ID NO: 226095

SEQ ID NO: 226097 - protein, 545 aa, Zea Mays
MNQETSFGDQGMHYYGYYYPGAYGGWDENGYFVGYNGLEVVQADNGSYLCYPLGYENGYASYIPVVPGGIASVDGQYVSKEPYYSSALPIQDPSTPGIFAQPIAYGTELVPAYSWDPFVLLDGVQGHPVGVHHTNYAPRPKYSSNKHVVPSLKASHSAKSTADTVKGSSSALETVPNAANSSTSSKGANKAPGASITKGYLPSSKFVMHSNNQAKSSVYQSKGINLKESGRSWHSSEKLKARSKLNGHGDSESNENNHTDNSKYSLSSQSDVVGLSSVGDANASIPSPVVIRKTAYNLSDFVTKYEQALFFVIKSYSEDDIHKSIKYNVWASTPNGNKRLDNAYRLAQERMAEKGTKCPVFLFFSVNASGQFCGVAEMVGPVDFNRNMNFWQQDKWNGFFSVKWHIIKDVPNPQFRHIILENNENKPVTNSRDTQEVKFSQGTEMLNIFKNFTCKASILDDFDFYENRQKVMQDRRGKPLTSFGHPLPKAEKTAEVKRQTQLISATEVGRADTTKENEEKSSSVPEILNAACSNKEKPNKIATDG

SEQ ID NO: 226098 - protein, 234 aa, Zea Mays
MLLSTSTSWKGQNAGSASTRHPISTMLLHVELVCRMIITSTSSAHFRKTSLRKCLKEWNAMKCLWKTMYYPLCSQSLLSEELIWIRMPLEPSSQNPSMQIAVIRHVVSGILLHNTIYDVVPLSSKLTVLDTQLPVKQAFKIMHDVGLALVPFWDDRQGTITGMLTASDFVLILRKLQRNIQVIGNEEPISAWKEAKLQFYGGPDGAVMQRTPLIHTGNIDLRAKKEAQLGMLPV

SEQ ID NO: 226099 - protein, 197 aa, Zea Mays
MKCLWKTMYYPLCSQSLLSEELIWIRMPLEPSSQNPSMQIAVIRHVVSGILLHNTIYDVVPLSSKGTITGMLTASDFVLILRKLQRNIQVIGNEEPISAWKEAKLQFYGGPDGAVMQRTPLIHATLISGPRKKLNSACFLFEARATNLPHQISVAKAGLVNKLCFLPDCHCFYICAFILRETFCPKKACSARFKQVI

SEQ ID NO: 226100 - protein, 128 aa, Zea Mays
MPLEPSSQNPSMQIAVIRHVVSGILLHNTIYDVVPLSSKLTVLDTQLPVKQAFKIMHDVGTITGMLTASDFVLILRKLQRNIQVIGNEEPISAWKEAKLQFYGGPDGAVMQRTPLIHVLLHIFADSFI

SEQ ID NO: 226101 - protein, 152 aa, Zea Mays
MKCLWKTMYYPLCSQSLLSEELIWIRMPLEPSSQNPSMQIAVIRHVVSGILLHNTIYDVVPLSSKGLALVPFWDDRQGTITGMLTASDFVLILRKRNIQVIGNEEPISAWKEAKLQFYGGPDGAVMQRTPLIHTGNIDLRAKKEAQLGMLPV

SEQ ID NO: 226102 - protein, 628 aa, Zea Mays
MAAMTRHFRDSSTSSDPAAATPPLPPPLPDLGVALSAADLRVTAYELLVAASRATGAKPLTYIPQPTTAASKLKGAFGLGSSPPSKVGRAAVLELVRVRMGVTEQADATIRRLLLRVAAGQLGRPAESMVLPLEFLQKCKASDFPDPLEYEAWQMRNFKLLEAGVLVHPLIPLKKSDIPAKRMQRIIHKAYVGQVEAGRNSESMQILHNTVMSLACRSLCETSNECHWADGFPFNLHIYKMLVEACFDVEEGTVVDEIDEMMELLKKTWPVFGVTQMLHNLYFTWVLFNHFVILGQEDNGLFSAIENLLVEVAKDAKITKDPDYCDVLSSTLISIMGWEEKRLLAYHETFGGSNLYSMQYTISIGISAAKILFEDVSYEYHSGTNRDIDVVRSRIETYIKSSIRTTFAQKMKEAGSNRSSRNRTPVLSILAKKTTELAIKEKNVYSPILKKWHPFAAGVAVATLHGCFGNELKKFIVGLTELTPDTAQVLKAADKLEKDLVHIAIEDSMDVGDSGKSLISQMPRYEAGTVMDNLVKSWAKEQLDRLKIWTDQKLQQQTWNPEDKDKDNFAHSSVEMLHRIEETMDAFVRLSIPIRSTLLADLTAGLDKCLHYYVSNVKSGCATSSDKV

SEQ ID NO: 226103 - protein, 975 aa, Zea Mays
MWTPSRGSNARRSGHRRIADYLADDQTTTTATDASDNESYTTAYGEEFFAAAAAGSGGAGGMLPAFLADQGDLVEVMLELDEESMVVRSVTPTSAALYGAASLPAPPSAGVLGVSPSPRRAPSEGGGRLSRCSSTSSRIRKKFAWLRSPSPSPSPYRPTPAELQREAAMAARERRREQAQLNRSRAGARRALKGLRFISRTTGSVEAAELWRRVEERFNDLAREGLLSRDDFGECIGMVDSKEFAVGIFDALARRRRQNLERITKEELYDFWLQISDQSFDARLQIFFDMVDTNVDGRITREEVQELIVLSASANKLAKLKEQAEEYASLIMEELDPEKLGYIELWQLEALLLQRDTYMNYSRPLSTASGAQWSQNLGVGGALTITGGGGDGGCGVDGDHPGPPRERRRSWGVRKAAARVRVAAEENWRRAWVLALWFAAMAALFVWKFVQYRRMAAFQVMGYCLPTAKGAAETLKLNMALVLLPVCRNTLTWLRSSWARFFVPFDDNITFHKMIATAIVVGITLHAGNHLACDFPRVIAASPEEYALVAGAFGADKPTYAGLLSGTEGVTGVAMVVLMTVSFTLATHPFRKGEPKGAGAAAGTSRLPAPLNRLTGFNAFWYSHHLLGIVYALLLAHGYFLFLVRRWYEKTTWMYISVPLLLYVGERMLRALRSNAYTVKILKVCLLPGNVLTITMSKPYGFRYRSGQYIFLQCPIISPFEWHPFSITSAPGDDYLSVHIRTNGDWTQELKRIFVENYFSPHLNRRASFSELGAAEPRSLPKLLVDGPYGAPAQDFRNYDVLLLVGLGIGATPFISILRDLLNNIKIADELMDLAMETSRSEDSANSFSVSTASSNRKRAYRTSRAHFYWVTREAGSFEWFKGVMNEVAEMDKKGIIELHNYLTSVYEERDARTTLLSMVQALNHAKHGVDIVSGTRVRTHFARPNWKEVFTRIASKHPNSTVCSTAAHRRLPRS

SEQ ID NO: 226104 - protein, 351 aa, Zea Mays
MASASRALLLSRALQAGASRRVPALLRPVAAAASLLPAVAGPAGAALGARVRCFATQPATSSLRDSSPNWSNRPPKETILLDGCDFEHWLVIMEPPPGDASNPDITRDEIIDSYIKTLAQVVGSEEEARQKIYSVSTRHYFGFGALVSEELSYKLKEIPKVRWVLPDSYLDVKNKDYGGEPFINGQAVPYDPKYHEEWVRNNARANDRNRCHPTIVRATCLRNHHMLVVANQTISPKCKTHRRATTLAVLLTTSKVLLLATKVVTLVIKVATHHLPTKEATHHLLTREAAHQGHHLPTEEAAHQGHHLPTEEATPTYRHIRVVAILATLVAALATRVKEATPTSSEHDHEY

SEQ ID NO: 226105 - protein, 337 aa, Zea Mays
MGTGVQAYISYRVITKTNLPEFEGPEKIVIRRYSDFEWLHDRLAERYKGVFIPPLPEKNAVEKFRFSKEFIELRRQALDLFVNRIASHPELKQSDVLRTFLQADEEIMDRARSYETGIFKKPSDFLQMFKDVQSKVSDVVLGKEKPVEESTPEYEKLKSYIFELEIHLAEAQKQAYRLVKRHRELGQSLADFGKAIKLLGSCEGDLMEKVFSEVGSKSEMLSIKLQREADNLLFNFEEPLKDYVRALQSIKATMLDRANAFRQHFDLDQERKYKELNLEKLKFMNPEKYAEAESEFRGLKADSEEATKKFEHIAKLAKDIADAWRSVLPKLEACSTS

SEQ ID NO: 226106 - protein, 308 aa, Zea Mays
MVHLFRPSLHRHRLPAGGGGVCSDSDRDAQVDAGEVLHQARVHGAHPEREAVPEAERLPGRPQGGVFRGPRRPLQPQDAEHGAHASAQPSARLRHHDGGDIRPAAPDHHGEEDRRQHQVPQVQAQAAGDLRLHQEREAEATHHRRDVVGEHHVQRRHRAASRSVAWGTAGSASTTASTRLTCSATRRRCSRGASSSSSCSATRRGTRPRSECSGASTASTTSRSSSRSSASGDEADGGECVNNRANRICTHTQHTVASGQLSFILIDEYVIVPSVHQNVCSVVYSFYTCLSIYRTKRYLIIMDYYLSS

SEQ ID NO: 226107 - protein, 404 aa, Zea Mays
MDGISVTVFADKTTLLPCVKSSGDVISLHNVMITMHGEFFVSFNKEVSSFALFESKVAECSPYQTSVKYHGSKHDKELLTQMRTWLAYNPLGLKDFELQLRSLKSDSTFDLVCKVVHVHEDNDKLIFYVWDGTDTPAVEFQATLDPKAVESPPLFEGPPLPREVLCTMPIIGTVLRIFSDMPIKEVSHMQNRVYWARFCNITCKEEFGIWKGILLASSKVRLLSHEDGSVVDRRKMYAIRKANQVLCQPMASFPSNVTVLSDVEYEEEWHSTLMQSLTHKEVTHKLKTLARVVGAYPCQASGLRLLSTGNIHLRLTLEDPTARIHAYVHKNYLVQFFGGFLTEEAITKKMNKLLGIPEPEDSEEGAPLTRNPPWIWCCLTSFYMDKNNPWDSRKYRIFATEMRD

SEQ ID NO: 226108 - protein, 185 aa, Zea Mays
MLFGAVNDIFCLFQGHIENIANLKQHYGLSKTANEVTILIEAYRTLRDRGPVPASQVVRDLSGKFAFILYDTLSKSTFVAADADGSIPFFWGVDYENHLVFSDDVGILKTGCGNSYAPFPKGCFYTTSGGLQSFEHPLHEVKAVPRVDSQGQMCGSIFKVDSESKKKQDASIPRVGSAADWSNQF

SEQ ID NO: 226109 - protein, 347 aa, Zea Mays
MAQACKKRRGVYISSESGDSDTDSDVEGSKHSQKSGVTSISTCEHQSSYNLKAASMKSSRMIRLCGNIVRKLIDHKCGWLFKEPVDPDLYGIPDYFDVIRSPMDLGTIKNKLTKKKYVSIEEFAADVRLTFSNAMKYNPPGNDVHIFAKELNEMFDSEWESVERKFRGRNLGQDQQTMKAIKVRAMMDSKSTVARGPVACSNPKTLVARGPVACSNSIAKKTLTDALSSKVKIKFSVRSSAHTSSKDILVQAAGSKEGSLNHSVPTGNKEASSNCTIPIAKEAKISRAREIERCSGSIENNHGLAMTLLLHLSLPLCKVRKVTFMMNLCHQAGLFVQQCSGVVLLGL

SEQ ID NO: 226110 - protein, 138 aa, Zea Mays
MAPVSALAKYKLVFLGDQSVGKTSIITRFMYDKFDNTYQATIGIDFLSKTMYLEDRTVRLQLWDTAGQERFRSLIPSYIRDSSVAVIVFDVASRQSFLNTSKWIEEVRTERGSDVIIVLVGNKTDLVDKRSSVSKWLF

SEQ ID NO: 226111 - protein, 193 aa, Zea Mays
MAPVSALAKYKLVFLGDQSVGKTSIITRFMYDKFDNTYQATIGIDFLSKTMYLEDRTVRLQLWDTAGQERFRSLIPSYIRDSSVAVIVFDVASRQSFLNTSKWIEEVRTERGSDVIIVLVGNKTDLVDKRQVSIEEGEGKAKDLGVMFIETSAKAGFNIKALFRKIAAALPGMETLSSAKQEDMVDVNLRRYH

SEQ ID NO: 226112 - protein, 82 aa, Zea Mays
MRTRSGKDHGAGASQRNIDAPNPSPTSALDDVVAQLVNVSTVLQQIAQPTTSTQYGRHDSNAAILYKEFLSTQPPMFTIAED

SEQ ID NO: 226113 - protein, 214 aa, Zea Mays
MAGRYDRNPFEEDDVNPFAGGSVPPASNSRMSALPHEPAGFYNDRGATVDIPLDSTKDLSKKEKELQAKEAELNKRERELKRKEEAAARAGIVIEDKNWPPFMPIIHHDISNEIPIHLQRMQYLAFSSLLGLTACLFWNIIATTAAWIKSEGVMIWLLAIIYFISGVPGAYVLWYRPLYNAMSSISYSVSGQLWLLHFHSKENPWLGFCRLLIS

SEQ ID NO: 226114 - protein, 63 aa, Zea Mays
MSPHLKATFSTVGRIIEERRSSLAPKTVEAITCLKDWNRAEERKQHQLEDPEIEFAAADLDID

SEQ ID NO: 226115 - protein, 279 aa, Zea Mays
MIRPPLHPWQQNQALLVELEAAKSEIEKWHSAFQSIPAVPSGTIPDPVSVVSYLSTLKSSEESLKEQLEKAKKREAAFIVTFAKREQEIAELKSAVRDLKTQLRPPSMQTRRLLLDPAIHEEFTRLKNLVEEKEKKIKELQDNVAAVNFTPSSKLGKMLMAKCRTLQEENEEIGTMASEGKIHELGMKIAVLKSQNNELRNQFDVLYKHMDGVTNDVERSNELVSILQEELEAKDLELTRLKEVLAQKGATQDAPVETSDDAGNGQEADSDTLQVKAES

SEQ ID NO: 226116 - protein, 233 aa, Zea Mays
MGGGGNGESCDLLQVLFEGALAGGAAGVVVETALYPIDTIKTRLQAAQGGSKIQWKGAIGGAASSLIRVPTEVVKQRMQMSQYKTAPDAVRLILAQEGIKGLYAGYGSFLLRDLPFDAIQFCIYEQLRIGYRLTAKRELHDTETAIIGAFAGAITGALTTPLDVMKTRLMIQGQTNQYRGFIDCAQTIMREEGAGAFFKGIEPRVLWIGIGGSIFFAVLEKTKSVLAERNTRR

SEQ ID NO: 226117 - protein, 302 aa, Zea Mays
MASAQAVGQGERGHFVLKSGHTIPAVGLGTWRAGSDTAHSVRTAIAEVGRGLKAAMEGGINRKDLFVTSKLWCTELAPDRVRPALEKTLKDLQLDYLDLYLIHWPFRLKDGAHMPPEAGEVLEFDMEGVWREMEGLVKDGLVKDIGVCNYTVAKLNRLMRSANVPPAVCQMEMHPGWKNDRIFEACKKHGIHVTAYSPLGSSEKNLAHDPLVEKVANKLDKTPGQVLLRWALQRGTSVIPKSTRDERIKENIQVFGWEIPEEDFRALCGIKDEKRVLTGEELFVNKTHGPYKSATEVWDHED

SEQ ID NO: 226118 - protein, 666 aa, Zea Mays
METTDEFAVPPRPALVHPDADGVRTPSALGPLSPEDPPPAFMERDWRHGGDNTAAYPGCSPFQPSAAGRPVSISLPASPTGGFDISSRTEAELQRDAAAVTDAPPPRMMMLPPFAPAPAMALEQPGKVVFRSQPIPAAPPVGDGGHDDEFGRSAPAAMALEQPGKVVFRSQPIIPGAPPEGDGAARGHDDFGRSAPAAKTRRDSRDTSYDSFKTWSGKLEKQIATHLLGSSLQQQPEHGEEPEEDDAASDRRNSSMPKVQRFFAALEGPELDKLRSSEELILPSDKTWPFLLRFPVSAFGMCLGMSSQAILWKRIAISASTRFLHITVKINLVLWCASVALMAAVSALYGCKLVLYFEAVRREYYHPIRVNFFFAPWIACLFLAIGVPDVVAATLPHWLWYVLMAPIVCLELKIYGQWISGGQRRLSRVANPSNHLSIVGNFVGALLGGIMGLKEGPMFFFSVGLAHYMVLFVTLYQRLPTSETLPRDLHPVFFLFVAAPSVACLAWARITGEFGYGSRVAYFIAMFLYASLAVRINLFRGFSFSLAWWAYTFPMTSAAIASIRYSSEVKNAFTQCMCIGLAAAATLAVAALFLATLLHAVVYRDLFPNDISIAITERRRSKPLVGEKMLLRLRSGKKVQQALSTAPADAAADLEAARAATTTSYT

SEQ ID NO: 226119 - protein, 133 aa, Zea Mays
MGARSGEERLGNQRRERDVTPLRFRWTHAVLISVFFSLNLSIVVVIFSCPWYMGCNLLSPMRTVNYNNHVLFVMLVINDCCRYKKKKKQSSNDQLQWSVTCDLCATSAAVVAGRAPFHRRSVTRHHSTKWSCN

SEQ ID NO: 226120 - protein, 141 aa, Zea Mays
MVTTGGTSLKDDIVRLYQPVHLLVGTPGRILDLTKKGVCILNDCSMLIMDEADKLLSPEFQPSIEQLIRYLPASRQILMFSATFPVTVKEFKDKYLPKPYVINLMDELTLKGITQFYAFVEERQKVHCLNTLFSKIFLQGE

SEQ ID NO: 226121 - protein, 171 aa, Zea Mays
MVWRSHKTYTQARRSCAWFGTRPCTCRTDLTFHFAVVGPNLWYGDRTRLTPKQEEAALGLSRACGSGIPAYICTMKKSNVVKRQMVFSRQFSKRHIFGRLGTYGCETRVFAGRDLFGSKLNFSMIHGGLRLLGGWPLFVKSHRIEAEHVCAFMFQEEEEGELSLRADLVIW

SEQ ID NO: 226122 - protein, 97 aa, Zea Mays
MWYTWTHQGLCFRSLQERAPSSGNLSCYIFTSHSSCYWACYWRLPCTGIVVDKNISSIRKVSILPSLLCNIVASSRIMYCMHLASGMPYHLPYYFLS

SEQ ID NO: 226123 - protein, 153 aa, Zea Mays
MVTGLPSSASWQDLKDHMRRAGDVCFTDVYREAGATIGIADYTNYEDMKHAIRKLDDSEFRNAFSRTYVRVREYDARRSRSRSRGRNRSKSRSRSHSHSYSRSRSCSYSKSRSPRSRSASESKSPVKASCTTETRKLWPCWTISIHVGYIFVC

SEQ ID NO: 226124 - protein, 318 aa, Zea Mays
MVRGSLINEAVNGDISGEGISSIGSELENVPSTVSTNEIGGSTSESGLGPSSMTSERIMSDSEVEISPQGTSSTTVMTSERSDASQSSLTSVFSNSSTASSVIVEPMPDPIPTTADVPIFSGPHGEAGGSILHDDMMSIFSNDGVGRSIDSSSSETRRSHRRILWDAFSRRGSRGYPESDADEMGFFSTWLDLGDDIFEELGESRYFHRRRHGSIRVSQYSRSRIREHRRAVFDSGNEQNTAACPLGIHQIGRCTCNSFFIAEESSARASISRIVMLTEALFEVLDEIHRQPASLSLSMVSVQAPESVVDSLPCAISA

SEQ ID NO: 226125 - protein, 502 aa, Zea Mays
MGAGSSRADAPSRRRARLSLGGCFGAGSSSSAHDGGSFAAAGPSSSRAIEVQSRQSGRQVSALNFQASLAAKDLQVSSESNPRLHSSSSTISHHLRFNHLNYHENKEDGLGSENAETSGLQSSSRKPVMVRGSLINEAVNGDISGEGISSIGSELENVPSTVSTNEIGGSTSESGLGPSSMTSERIMSDSEVEISPQGTSSTTVMTSERSDASQSSLTSVFSNSSTASSVIVEPMPDPIPTTADVPIFSGPHGEAGGSILHDDMMSIFSNDGVGRSIDSSSSETRRSHRRILWDAFSRRGSRGYPESDADEMGFFSTWLDLGDDIFEELGESRYFHRRRHGSIRIREHRRAVFDSGNEQNTAACPLGIHQIGRCTCNSFFIAEESSARASISRIVMLTEALFEVLDEIHRQPASLSLSMVSVQAPESVVDSLPCKSYKKLETPQCSDDMEQCHICLTEYEDGDQIRTLPCKHEFHLQCVDKWLKEIHRVCPLCRGDVCEVAS

SEQ ID NO: 226126 - protein, 207 aa, Zea Mays
MYAQTVRNERAYGCLRPVVAKSDGGIRLWRSHARAVRPQQKAPRRSRDVAANGKQRIHSSKQCESCNLQTQARRRDPRGRRTGPLDRLRAFQFMTVRPGWVVRVAHGSAAAWQRVACNPETLPPDRVLALICCAPLHLLARLAAFLCVPFLPGPAHTPLRLHRRRFLVLRPPEFAPHPFAYSPSSSSSSSDEEEDDDDGDGIHEHVD

SEQ ID NO: 226127 - protein, 207 aa, Zea Mays; identical to SEQ ID NO: 226126

SEQ ID NO: 226128 - protein, 985 aa, Zea Mays
MAIPVEEAIAALSTFSLEDEQPDVQGLAVLLSSERYATNSPIEYSDVAAYRLSLGEDTKAINQLNTLIKEGKEMTSLLYTYRSCVKALPQLPDSMKHNQADLYLETYQVLDMEMSHLREIQRWQASAASKLAADMQRFSRPERLVNGPTITHFWSMLKLLDVLLQLDHLKNAKASIPNDFSWYKRTFTQVSTQWQDTDTMREELDDLQIFLSTRWAILLNLHAEMFRTNTVEDILQVLIVFCVESLELDFALLFPERHTLLRVLPVLVVLATSSEKESESLYKRVKINRLLNVFKNDPVIPAFPDLHLSPAAILKELSSYFQNFSSQTRLLALQAPHEIQGRELQDYQRHYLILNHMGTIRADHDDFSIRFASAMDQMIRLKSSDGVYNDWSRDIKGNMYDIVVEGFQLLSRWTGRIWEQCAWKFSRPISDSQQNSMTCFDYEKVVRYNYTAEERRALLELIGYIKSIGLMMQHCDTLVSEALWETIHMEVQDFVQDKLDTMLRTTFRKKKDLSRILSDMRTLSADWMASTSKADPEQHSLHQETEEMRQNTFYPRPVAPTAAQIHCLQFLICELVSGGNLRKVGGLFGNSGSGIPVEDLKQLETFFYKLSFFLHILDYTATIGTLTDLGFLWFREFYLESSRVIQFPIECSLPWMLVGHVIESEDAGLLESILIPFDLYNDSAQHALTSLKQRFLYDEIEAEADLCFDLLAQKLNEIIFTYYKSCAASTLLDSSFTYACDDGDKYFVKPLRFDAIFKLRRVMVLGRTIDLRSIITQRMNKIFRENIDFLLERFENGDLCGVVELQQLLDILELTHQSISRFLELDSYSLMLSEMQENLSLVSYSSRISSQIWSEMQTDFLPNFILCNTTQRFVRSAKGTHHSSHRSSASTGKPYFYCGSHDLTMAYQGLAGLYRDFFGVPHMFAVVKLLGSRSLPAIIRALLDHISSKITGLLPKINALQEALPKSIGLLSFDGGIAGNLVHIF

SEQ ID NO: 226129 - protein, 598 aa, Zea Mays
MGTIRADHDDFSIRFASAMDQMIRLKSSDGVYNDWSRDIKGNMYDIVVEGFQLLSRWTGRIWEQCAWKFSRPISDSQQNSMTCFDYEKVVRYNYTAEERRALLELIGYIKSIGLMMQHCDTLVSEALWETIHMEVQDFVQDKLDTMLRTTFRKKKDLSRILSDMRTLSADWMASTSKADPEQHSLHQETEEMRQNTFYPRPVAPTAAQIHCLQFLICELVSGGNLRKVGGLFGNSGSGIPVEDLKQLETFFYKLSFFLHILDYTATIGTLTDLGFLWFREFYLESSRVIQFPIECSLPWMLVGHVIESEDAGLLESILIPFDLYNDSAQHALTSLKQRFLYDEIEAEADLCFDLLAQKLNEIIFTYYKSCAASTLLDSSFTYACDDGDKYFVKPLRFDAIFKLRRVMVLGRTIDLRSIITQRMNKIFRENIDFLLERFENGDLCGVVELQQLLDILELTHQSISRFLELDSYSLMLSEMQENLSLVSYSSRISSQIWSEMQTDFLPNFILCNTTQRFVRSAKGTHHSSHRSSASTGKPYFYCGSHDLTMAYQGLAGLYRDFFGVPHMFAVVKLLGSRSLPAIIRALLDHISSKVCYRK

SEQ ID NO: 226130 - protein, 111 aa, Zea Mays
MVWFQCEDCGENLKKPKLAGHFRSCSAYKLSCIDCGELFSHDTVQGHTQCISEAEKYGPKGQTKPSNGAQGKADKPKPNADVDINVGLSTRPPWFCRSLFRYLGTVYLSWF

SEQ ID NO: 226131 - protein, 982 aa, Zea Mays
MNPLPPPPGPRRVPTLLPVTAAVVSPVLFTNSEFHCAALLLPPSLSLRVRSLGSHAAAGCGGGGVRGLGFSVWRSLGVCEEEEEEEEEEEERMGTAGKGAWVVPAPAYREVEGWEGAGDDAPGFRCAHSLTAVAPTKGHGPRLILFGGATAIETGASSGLPGIRLAGVTNSVHSYDVETRRWTRLHPAGEPPSPRAAHAAAAVGTMVVFQGGIGPAGHSTDDLYVLDLTNDKFKWHRVVVQGAGPGPRYGHCMDLVAQRYLVTVSGNDGKRALSDAWALDTAQKPYRWQKLNPEGDRPSARITRSDGMLLLCGGRDASGMPLSDAYGLLMHTNGQWEWTLAPGVSPSPRYQHAAVFVGARLHVTGGVLRGGRAIEGEGAIAVLDTAAGVWLDRNGIVTSRTLKSSNEHDASSDLLRRCRHAAASVGSQIYIYGGLRGDILLDDFLVAENAPFQSEITSSMYNVDRVPRGETQNRNNNFHSDSPVHQSTNNRQEAASGFSADKKSIDMLIEASTAEAEAVSAVWRAAKEASAASSEDSLSEGIGSESPLSETSPMPEDFDDGGSLEPDVKLHSRAVVVAKEAVGDLGCLVRQLSLDQFENESRRMHPSNNDQSYPGRRTLNRQRSPQGLHKKVISFLLKPRNWRAPADRTFFLDSYEVGELCYAAEQIFMQEPTVLQLKAPIKVFGDLHGQFGDLMRLFDEYGFPSTAGDITYIDYLFLGDYVDRGQHSLETIALLLALKIEYPENVHLIRGNHEAADINALFGFRLECIERMGESDGIWAWTRFNQLFNYLPLAAMIEKKIICMHGGIGRSINTVEQIEKLERPITMDVGSIVLMDLLWSDPTENDSVEGLRPNARGPGLVTFGPDRVTEFCKRNKLQLIIRAHECVMDGFERFAHGQLITLFSATNYCGTANNAGAILVVGRGLVIVPKLIHPLPPPVNSPESSPERGDATWMQELNIQRPPTPTRGRPQAAGDRNSLAYI

SEQ ID NO: 226132 - protein, 523 aa, Zea Mays
MYNVDRVPRGETQNRNNNFHSDSPVHQSTNNRQEAASGFSADKKSIDMLIEASTAEAEAVSAVWRAAKEASAASSEDSLSEGIGSESPLSETSPMPEDFDDGGSLEPDVKLHSRAVVVAKEAVGDLGCLVRQLSLDQFENESRRMHPSNNDQSYPGRRTLNRQRSPQGLHKKVISFLLKPRNWRAPADRTFFLDSYEVGELCYAAEQIFMQEPTVLQLKAPIKVFGDLHGQFGDLMRLFDEYGFPSTAGDITYIDYLFLGDYVDRGQHSLETIALLLALKIEYPENVHLIRGNHEAADINALFGFRLECIERMGESDGIWAWTRFNQLFNYLPLAAMIEKKIICMHGGIGRSINTVEQIEKLERPITMDVGSIVLMDLLWSDPTENDSVEGLRPNARGPGLVTFGPDRVTEFCKRNKLQLIIRAHECVMDGFERFAHGQLITLFSATNYCGTANNAGAILVVGRGLVIVPKLIHPLPPPVNSPESSPERGDATWMQELNIQRPPTPTRGRPQAAGDRNSLAYI

SEQ ID NO: 226133 - protein, 526 aa, Zea Mays
MELAVGGGMRRSASHTSLSESDDFELTRLLSKPRINVERQRSFDDHSLSDVSHSGGYGRGGFDGMYSPGGGLRSLVGTPASSALHSFEPHPIVGDAWEALRRSLVFFRGQPLGTVAAVDHASEEVLNYDQGWEKKVDRFKLGEGAMPASFKVMHDAKKGVETLHADFGESAIGRVAPVDSGFWWIILLRAYTKSTGDLTLAETPECQKGMRLILSLCLSEGFDTFPTLLCADGCCMIDRRMGVYGYPIEIQALFFMALRCALQMLKHDNEGKEFVEKIATRLHALSYHMRSYFWLDFQQLNDIYRYKTEEYSHTAVNKFNVIPDSIPDWLFDFMPCQGGFFVGNVSPARMDFRWFALGNMIAILSSLATPEQSNAIMDLIEERWEELIGEMPLKICYPAIENHEWRIVTGCDPKNTRWSYHNGGSWPVLLWLLTAACIKTGRPQIARRAIDLAERRLLKDGWPEYYDGKLGRYVGKQARKFQTWSITGYLVAKMLLEDPSHLGMIALEEDKAMLKPVLKRSASWTN

SEQ ID NO: 226134 - protein, 221 aa, Zea Mays
MTNTKYHNSRTGFLGKTRGIRPCVFPAGRVGFVRTVVECKESRIGKQPIEVPSNVTLTLEEQFVKAKGPLGELSLSFPGDLKIVKEESGNLRVYKTAETKRANQMHGLFRTLTDNIIVGVSKGFDKKLQLVGVGYRAAVEGNDLVMNLGFSHPVRMAIPEGLAVKVEENTRIIVSGYDKSAIGQFAATIKKWRPPEPYKGKGIRYMDEVVRRKEGKAGKKK

SEQ ID NO: 226135 - protein, 1564 aa, Zea Mays
MGDDAELEEGEACACGDDTAFVDPDVALSYIDEKLQDILGHFQKDFEGGVSADNLGSKFGAYGSFLPTYQRSPLPQTRSPPKAGNITSKSPFHQSNEDLSQKPPAVAVSSTPQSNGPVVPFSGDSIKKEIRPSTKSERGSVSHDSYGPSKCSDQNRLKVRIKVGSDNVLARNNAAIYSGLGLDISSPSSNEDSPDGRGSLSPEVNNVPHESPQTILQIMTCFSVPGGFLLSPLPANILQLTKKVVSSSKKWESNVDVENVQESYEGHVAKRVKSDGNKKRLIDAKNSKNKNDISAVMKKEIDMELVAGQKIVSEALKISLLSDPRAMDAKGENRLEEEPAENNLVGIRDARLKERCTKTDSMTVKVEPAKAEVMECLENSSFGSSEMDLSAVKGKSKPKTEKGEATLEDRNTTNDKDLISDRKQKKKIKSGSKYNASNFEGSISNVINEGASAVFHMGKISGLEALPYDTNGENNSKSEVKKMQREQKANVSTSSDFLEEEKHIHSSAAVKERSDMQSKPIHTGKKPKAKSHRDVRDNNFPEGSYGSKEQDSLENKSAFGDPRPKEKPWKFDSEDSDAPGISRKDSSYVKLDKHLATEEQKMHILPPATASTANAAFIHAAPVVIEEHWVCCDICQKWRLLPYEMNPSDLPKKWKCSMLQWLPGMNRCEISEEETTNALNALYVPAPANGIPSVGLPHVASSGLVTSSTPNMNGHIEQSRKRKNVLSDGNFVAEGSHQTQGSGHPMSNQHAPNKSKTHTDGIQYPIDRDSVSKSVDPTIKKQRSKSKHHSSYSDGVDLVERPKKHSKVKSKRDLDRDEYKASKKIRKEERHFDRDRNLGSGLASRDVPDEAKAFPVKSVTSKGSGERSDLSSSKQKNVSHHNHLENSKKARQDYVGFPEDESKEYFHQSDVQRSDLSSKKRIVKKWEESQYNPVAQVSKGAIKETYRDQNLKEAKLMSLNSEELFSMTSSKPPKAQHADQVLFYDGGRTNSELVEDNTHFSGKTGLPEQENSLSDKALDLGKPASDVAYIQTSAVTSSSSKASVSQKKKQTTQAMKTSSIESLSLSPQRNSNIDNVSASHSRVSVNDQWSSEPILVGSSRRKSDRDNGQVQLTQGHASDGIHPERGLNEDLQPESGRKDSNIKNSHIPKSSNHLHSGEKNNYNTDGSPMQPGKHLVDPKTPVLDKGDSSMHENKKSANSLQDRNGSTHCPPDGNPLLGLPSGKEKSYLKNNRQDSQKPKPQISPLKESKLDSHSTPLKPNGSKLTPQSRQYNAENGGRHGTAKQAIRSPADTFSPARKDNTSTAYALKEARDLKHKANRLKEEGKELESTRLYFDSALKFLHVASLLEPPSFDGLKQGDAAQSMYSDTAKLCNFVGHAYEKCKKMAAAALAYKCVEVAYLKAAYCKHPTASKDRQVLQAVVQTAPGESPSSSASDIDNLNNNGLSKGPSSKDANSPQVVGNHLLLATRNQPHLMRLLAYTNDVNSAFEATRKSHMAIASASGNHENGVDGLSSVKTVLDFNFRSVNDLLSMKLNIIQQCKSIGLSFELAGQLVQRVIIFLLFLR

SEQ ID NO: 226136 - protein, 1588 aa, Zea Mays
MGDDAELEEGEACACGDDTAFVDPDVALSYIDEKLQDILGHFQKDFEGGVSADNLGSKFGAYGSFLPTYQRSPLPQTRSPPKAGNITSKSPFHQSNEKPPAVAVSSTPQSNGPVVPFSGDSIKKEIRPSTKSERGSVSHDSYGPSKCSDQNRLKVRIKVGSDNVLARNNAAIYSGLGLDISSPSSNEDSPDGRGSLSPEVNNVPHESPQTILQIMTCFSVPGGFLLSPLPANILQLTKKVVSSSKKWESNVDVENVQESYEGHVAKRVKSDGNKKRLIDAKNSKNKNDISAVMKKEIDMELVAGQKIVSEALKISLLSDPRAMDAKGENRLEEEPAENNLVGIRDARLKERCTKTDSMTVKVEPAKAEVMECLENSSFGSSEMDLSAVKGKSKPKTEKGEATLEDRNTTNDKDLISDRKQKKKIKSGSKYNASNFEGSISNVINEGASAVFHMGKISGLEALPYDTNGENNSKSEVKKMQREQKANVSTSSDFLEEEKHIHSSAAVKERSDMQSKPIHTGKKPKAKSHRDVRDNNFPEGSYGSKEQDSLENKSAFGDPRPKEKPWKFDSEDSDAPGISRKDSSYVKLDKHLATEEQKMHILPPATASTANAAFIHAAPVVIEEHWVCCDICQKWRLLPYEMNPSDLPKKWKCSMLQWLPGMNRCEISEEETTNALNALYVPAPANGIPSVGLPHVASSGLVTSSTPNMNGHIEQSRKRKNVLSDGNFVAEGSHQTQGSGHPMSNQHAPNKSKTHTDGIQYPIDRDSVSKSVDPTIKKQRSKSKHHSSYSDGVDLVERPKKHSKVKSKRDLDRDEYKASKKIRKEERHFDRDRNLGSGLASRDVPDEAKAFPVKSVTSKGSGERSDLSSSKQKNVSHHNHLENSKKARQDYVGFPEDESKEYFHQSDVQRSDLSSKKRIVKKWEESQYNPVAQVSKGAIKETYRDQNLKEAKLMSLNSEELFSMTSSKPPKAQHADQVLFYDGGRTNSELVEDNTHFSGKTGLPEQENSLSDKALDLGKPASDVAYIQTSAVTSSSSKASVSQKKKQTTQAMKTSSIESLSLSPQRNSNIDNVSASHSRVSGKDGSLNANSSTVPAMAKQLNTQVGVAVNDQWSSEPILVGSSRRKSDRDNGQVQLTQGHASDGIHPERGLNEDLQPESGRKDSNIKNSHIPKSSNHLHSGEKNNYNTDGSPMQPGKHLVDPKTPVLDKGDSSMHENKKSANSLQDRNGSTHCPPDGNPLLGLPSGKEKSYLKNNRQDSQKPKPQISPLKESKLDSHSTPLKPNGSKLTPQSRQYNAENGGRHGTAKQAIRSPADTFSPARKDNTSTAYALKEARDLKHKANRLKEEGKELESTRLYFDSALKFLHVASLLEPPSFDGLKQGDAAQSMYSDTAKLCNFVGHAYEKCKKMAAAALAYKCVEVAYLKAAYCKHPTASKDRQVLQAVVQTAPGESPSSSASDIDNLNNNGLSKGPSSKDANSPQVVGNHLLLATRNQPHLMRLLAYTNDVNSAFEATRKSHMAIASASGNHENGVDGLSSVKTVLDFNFRSVNDLLSSMKLNIIQQCKSIGLSFELAGQLVQRVIIFLLFLR

SEQ ID NO: 226137 - protein, 1555 aa, Zea Mays
MGDDAELEEGEACACGDDTAFVDPDVALSYIDEKLQDILGHFQKDFEGGVSADNLGSKFGAYGSFLPTYQRSPLPQTRSPPKAGNITSKSPFHQSNEKPPAVAVSSTPQSNGPVVPFSGDSIKKEIRPSTKSERGSVSHDSYGPSKCSDQNRLKVRIKVGSDNVLARNNAAIYSGLGLDISSPSSNEDSPDGRGSLSPEVNNVPHESPQTILQIMTCFSVPGGFLLSPLPANILQLTKKVVSSSKKWESNVDVENVQESYEGHVAKRVKSDGNKKRLIDAKNSKNKNDISAVMKKEIDMELVAGQKIVSEALKISLLSDPRAMDAKGENRLEEEPAENNLVGIRDARLKERCTKTDSMTVKVEPAKAEVMECLENSSFGSSEMDLSAVKGKSKPKTEKGEATLEDRNTTNDKDLISDRKQKKKIKSGSKYNASNFEGSISNVINEGASAVFHMGKISGLEALPYDTNGENNSKSEVKKMQREQKANVSTSSDFLEEEKHIHSSAAVKERSDMQSKPIHTGKKPKAKSHRDVRDNNFPEGSYGSKEQDSLENKSAFGDPRPKEKPWKFDSEDSDAPGISRKDSSYVKLDKHLATEEQKMHILPPATASTANAAFIHAAPVVIEEHWVCCDICQKWRLLPYEMNPSDLPKKWKCSMLQWLPGMNRCEISEEETTNALNALYVPAPANGIPSVGLPHVASSGLVTSSTPNMNGHIEQSRKRKNVLSDGNFVAEGSHQTQGSGHPMSNQHAPNKSKTHTDGIQYPIDRDSVSKSVDPTIKKQRSKSKHHSSYSDGVDLVERPKKHSKVKSKRDLDRDEYKASKKIRKEERHFDRDRNLGSGLASRDVPDEAKAFPVKSVTSKGSGERSDLSSSKQKNVSHHNHLENSKKARQDYVGFPEDESKEYFHQSDVQRSDLSSKKRIVKKWEESQYNPVAQVSKGAIKETYRDQNLKEAKLMSLNSEELFSMTSSKPPKAQHADQVLFYDGGRTNSELVEDNTHFSGKTGLPEQENSLSDKALDLGKPASDVAYIQTSAVTSSSSKASVSQKKKQTTQAMKTSSIESLSLSPQRNSNIDNVSASHSRVSGKDGSLNANSSTVPAMAKQLNTQVGVAVNDQWSSEPILVGSSRRKSDRDNGQVQLTQGHASDGIHPERGLNEDLQPESGRKDSNIKNSHIPKSSNHLHSGEKNNYNTDGSPMQPGKHLVDPKTPVLDKGDSSMHENKKSANSLQDRNGSTHCPPDGNPLLGLPSGKEKSYLKNNRQDSQKPKPQISPLKESKLDSHSTPLKPNGSKLTPQSRQYNAENGGRHGTAKQAIRSPADTFSPARKDNTSTAYALKEARDLKHKANRLKEEGKELESTRLYFDSALKFLHVASLLEPPSFDGLKQGDAAQSMYSDTAKLCNFVGHAYEKCKKMAAAALAYKCVEVAYLKAAYCKHPTASKDRQVLQAVVQTAPGESPSSSASDIDNLNNNGLSKGPSSKDANSPQVVGNHLLLATRNQPHLMRLLAYTNDVNSAFEATRKSHMAIASASGNHENGVDGLSSVKTVLDFNFRSVNDLLRVA

SEQ ID NO: 226138 - protein, 1563 aa, Zea Mays
MGDDAELEEGEACACGDDTAFVDPDVALSYIDEKLQDILGHFQKDFEGGVSADNLGSKFGAYGSFLPTYQRSPLPQTRSPPKAGNITSKSPFHQSNEKPPAVAVSSTPQSNGPVVPFSGDSIKKEIRPSTKSERGSVSHDSYGPSKCSDQNRLKVRIKVGSDNVLARNNAAIYSGLGLDISSPSSNEDSPDGRGSLSPEVNNVPHESPQTILQIMTCFSVPGGFLLSPLPANILQLTKKVVSSSKKWESNVDVENVQESYEGHVAKRVKSDGNKKRLIDAKNSKNKNDISAVMKKEIDMELVAGQKIVSEALKISLLSDPRAMDAKGENRLEEEPAENNLVGIRDARLKERCTKTDSMTVKVEPAKAEVMECLENSSFGSSEMDLSAVKGKSKPKTEKGEATLEDRNTTNDKDLISDRKQKKKIKSGSKYNASNFEGSISNVINEGASAVFHMGKISGLEALPYDTNGENNSKSEVKKMQREQKANVSTSSDFLEEEKHIHSSAAVKERSDMQSKPIHTGKKPKAKSHRDVRDNNFPEGSYGSKEQDSLENKSAFGDPRPKEKPWKFDSEDSDAPGISRKDSSYVKLDKHLATEEQKMHILPPATASTANAAFIHAAPVVIEEHWVCCDICQKWRLLPYEMNPSDLPKKWKCSMLQWLPGMNRCEISEEETTNALNALYVPAPANGIPSVGLPHVASSGLVTSSTPNMNGHIEQSRKRKNVLSDGNFVAEGSHQTQGSGHPMSNQHAPNKSKTHTDGIQYPIDRDSVSKSVDPTIKKQRSKSKHHSSYSDGDLVERPKKHSKVKSKRDLDRDEYKASKKIRKEERHFDRDRNLGSGLASRDVPDEAKAFPVKSVTSKGSGERSDLSSSKQKNVSHHNHLENSKKARQDYVGFPEDESKEYFHQSDVQRSDLSSKKRIVKKWEESQYNPVAQVSKGAIKETYRDQNLKEAKLMSLNSEELFSMTSSKPPKAQHADQVLFYDGGRTNSELVEDNTHFSGKTGLPEQENSLSDKALDLGKPASDVAYIQTSAVTSSSSKASVSQKKKQTTQAMKTSSIESLSLSPQRNSNIDNVSASHSRVSGKDGSLNANSSTVPAMAKQLNTQVGVAVNDQWSSEPILVGSSRRKSDRDNGQVQLTQGHASDGIHPERGLNEDLQPESGRKDSNIKNSHIPKSSNHLHSGEKNNYNTDGSPMQPGKHLVDPKTPVLDKGDSSMHENKKSANSLQDRNGSTHCPPDGNPLLGLPSGKEKSYLKNNRQDSQKPKPQISPLKESKLDSHSTPLKPNGSKLTPQSRQYNAENGGRHGTAKQAIRSPADTFSPARKDNTSTAYALKEARDLKHKANRLKEEGKELESTRLYFDSALKFLHVASLLEPPSFDGLKQGDAAQSMYSDTAKLCNFVGHAYEKCKKMAAAALAYKCVEVAYLKAAYCKHPTASKDRQVLQAVVQTAPGESPSSSASDIDNLNNNGLSKGPSSKDANSPQVVGNHLLLATRNQPHLMRLLAYTNDVNSAFEATRKSHMAIASASGNHENGVDGLSSVKTVLDFNFRSVNDLLRFVRISMESISC

SEQ ID NO: 226139 - protein, 612 aa, Zea Mays
MSSAAVSGSGGAAAAADGGVEGAPALSASASRTSSLRHRAMSASSKLLRSSLSRKSMGRRSSKVMSVSIEDVRDAEDMKQVDAFRQTLVLEELLPARHDDYHMMLRFLRARKFDIEKSKQMWSDMLQWRKEFGADTIIDEFVFEEMDQVLEHYPQGHHGVDKDGRPVYMEKLGQIDTTKLLQVTSMDRYVQYHVREFERAFAVKFPACSISAKKHVDQSTTILDVSGVGYKNFNKAARDLIGRLQKIDGDNYPETLCRMFIINAGQGFRLLWNTVKSFLDPKTTAKIHVLGNKYQSKLLEVIDASELPEFFGGTCNCEGGCMRSDKGPWKDPEILKMVQCGMGRCGMNSGDPRDADEKLITEDEIVPVPKKQDSMRRNAVDSPKVAREKIEHPQMSPLHEMKTASDPDPAAKDSFDGGGLFPGVDRGMDFNWSGEVSEEKLQIARDMYAQLPDAYKQGDAGDRQVVSGFMALVMGVVAMFRVGKIAPKRAMDAAMGIATMEAMAKKTRQMQMQQQLQLGGPDAVVVSAAQYQALVKRVDDLEAKVAALASGPPEVPPELEESIKAAAARVDALETELDATKKLLETSSAQQEEVLAYIEKKKKKRGMFCLQQ

SEQ ID NO: 226140 - protein, 50 aa, Zea Mays
MCEPPAVGLYSAFVFQKPDPEAIPPIVTPDLPDPDKGHEEVWSISSVLSS

SEQ ID NO: 226141 - protein, 302 aa, Zea Mays
MDTDKWCDAQVGHYIGIDASASGVNYARELWENRRKPFTAEFIELDPSDDGFEAQVQEKGIQADMVCCMQHLQLCFENEEQAKKLLNNVSSLLKPGGYFFGITPDSSTIWTKYQKNVEASHNKGLKTVPNSIRSENYTITFEVEEEKFPFFGKKYQLKFASDAVFENQCLVHFPTLMRLSREAGLEYVEIQNLTEFYDDNRTQFAPMLGGYGASFLDARGKLVARSYDILGLYSAFVFQKPDPEAIPPIVTPDLPDPDKGHEEEWLQPQQASVEDGRRSHADVLPIDPEKGILGPGPADMRL

SEQ ID NO: 226142 - protein, 301 aa, Zea Mays
MYIWPKVHRFASFPFSSSQLSRPYVVAAACLSPPTSRQLSAQIELPPSQIGFCLGSRHRRPTPGAKAFADLFAGEERPAEMNVAVPPQSPHLRLYDFAKSAIIKIFAFPYATVCDLYCDGGMDTDKWCDAQVGHYIGIDASASGVNYARELWENRRKPFTAEFIELDPSDDGFEAQVQEKGIQADMVCCMQHLQLCFENEEQAKKLLNNVSSLLKPGGYFFGITPDSSTIWTKYQKNVEASHNKGLKTVPNSIRSENYTITFEVEEEKFPFFGKKYQLKFASDAVFENQCLVHFPTLMRLC

SEQ ID NO: 226143 - protein, 241 aa, Zea Mays
MYMLIVYKFFKIEVPMVPNLSKLISNRRLQLWPPRETDLESIHGPEVLELIREHLTSIIRWVHRNGPKINRSTLRIKRLQFVRIYSASIMYGYFLKSVSIRHRLELTLTRSEGVPPIQFLNAQLTNKQEQEGAIGGSSEASSSLRPSSVVNPHDLRGYIMGFDPKTLQLCAKLRSSEASNLIERHSWALFGGDMELSQENDEAVILDPSSLKRLLLEAIAFGSFLWDVEDYVDEIFKLSDS

SEQ ID NO: 226144 - protein, 375 aa, Zea Mays
MSHQQALAQVTAQAVHSQYNMINHTDYSIPFSSTTAPALITAQHANSSANVASAQEKPALPSHAGNSNIESNEVSQGLKTSAPTFDKPADDGYNWRKYGQKAVKGGEYPRSYYKCTHTSCPVKKKVERSAEGHITQIIYRGQHNHQRPPKRRSKDGGGPLNEADVLHENEDISTRSEPGSQEHSGKHEGSNDGILGPSVSRRGGGDEQLSGSSDSDEEQDDEQRAGDEDPGYANANKRHVPTPAQRIIVQTNSEVDLLDDGYRWRKYGQKVVKGNPYPRSYYRCTYQGCDVKKHIERSSQDPKAVITTYEGKHSHDVPAVRNGSHAAANANGSSSTSLPVPHRVHSSASSSRRAAELQSASSASSMLLKEENEIT

SEQ ID NO: 226145 - protein, 240 aa, Zea Mays
MAGPAPDRAALTVGPGMDMPIMHDSDRYELVRDIGSGNFGVARLMRDRRTTELVAVKYIERGEKIDENVQREIINHRSLKHPNIIRFKEVILTPTHLAIVMEYASGGELFERICKNVRFSEDEARYFFQQLISGVSYCHSMQVCHRDLKLENTLLDGSDAPRLKICDFGYSKSSVLHSQPKSTVGTPAYIAPEVLLKKEYDGKIADVWSCGVTLYVMAVGAYPFEDPEEPKNFRKTIQAS

SEQ ID NO: 226146 - protein, 69 aa, Zea Mays
MAVGAYPFEDPEEPKNFRKTIQRILNVQYAIPDYVNISPECRHLISRIFVGDPAMASPCSYNRALILIQ

SEQ ID NO: 226147 - protein, 356 aa, Zea Mays
MARRDHDDDDEEEVEEEAYDLDEEEDDEDEEDDYEEEARRGKASRGGGKGGGGRKRSREDNFIDDSAIEDEDEDDDDDGGGRPRKKGGGGVRGFFDEEAQVDEDEEEEDEGEGEDDFINDAGADLPDEDVVRGSRRHSIPMRDEEEDIDEIERQVRERYARSTHIEYGEEAAEVEQQALLPSVKDPKLWMVKCAIGHERETAICLMQKFIDRSDLQIKSVVALDHLKNYIYVEAEKEAHVKEACKGLRNIYASAKITLVPIKEMADVLSVESKSVDLSRDSWVRMKLGIYKGDLAKVVDVDNVRQRVDVKLIPRIDLQALASKLEGESVKKKAFVPPPRFFNIDEGDAYSCGTEAR

SEQ ID NO: 226148 - protein, 342 aa, Zea Mays
MPQMEGSTDQIAAGWFAKEPASERPVGLPRTGSSSRLNAQAPEFVPRGPPPPAPAVVLPPPPQVIRMFAAPPPPPRGGFFSAPQPRPFEYYAPIGERSGFAAKEQQAPELEAEMLPPAAVKTEPVVDGLDDEVVHKITKQVEYYFSDINLATTEHLMRFITKDSEGFVPISVIAGFKKVKTSVRNNVMLAAALRTSSKLVVSDDGKRVKRQQPFTESDLQELQSRIVVAENLPGDPSYQNLKKIFSAVGSLISIRTCYPQTPNGTGPATNRSSKLDMLFANKLHAFVEYETPEDAAKAILELNDEKNWRNGLRVRLLNTCTVKGAGKGKNGMNETDGNSEEA

SEQ ID NO: 226149 - protein, 238 aa, Zea Mays
MLAASARRLSAAASFSSSSMRSSQLAAVLNQQRWMHDRNKKAMELVAKGWSALQEVDRVIDYADLNDKRLIPLLRGAKENFELALEIDNGNTHARYWLGKMHFKYHVPGACKAVGAALLVEAANMGDPDAQYELGCRLRIENDYVQSDQQAFHYIEQAVDQLHPGALYLLGAVYLTGDCVKRDMASALWCFHRASEKLSHMDPCFLKVLKYLKLLQGSTQARVHQLGKCGKGPNSRIQ

SEQ ID NO: 226150 - protein, 93 aa, Zea Mays
MDYMLKGHAGAAIAYGSLLLKGAEIPEVITRFNSGKSPSTGKMRKRTQQQDPVKLAKEQFQIAAEAGCDLGLRWLKRLEAYENQEEKLKQVQQ

SEQ ID NO: 226151 - protein, 220 aa, Zea Mays
MASFDQSSQMYEHDSDSNIDMENVDAPSKKSQKGTKKSQKGGKQKVVSRRGGSFTKEEDIVICSAFLNVSKDPITGVNQNSGGYYKRMHEYFNKRKPEGSNRSQISIQHRWGAIQKAVNKFCALKSSVDRRNESGKSEQDRIDDAVFMYEKGEPFVFMHCWKLLRNEAKWNNRFLETISKPPSSQVPPEAAVDVLQGGHACTSCGLGLTLPIVVCVQVPG

SEQ ID NO: 226152 - protein, 185 aa, Zea Mays
MMQRFWDSAMSIGPIDDDDDSRSEGSTRVVSEATDIGRPAFFPASGLSNTFGFKIQDKQGRMHRFNCETSGLAELITSILQRVGDDIDRKHLPQILYEDEDRDKVVLSSDSDLIAAVDHARKIGWKSIRLHLDYAGVGRRKGGGGPSDLEYAGKDAAWASAYSAVAAGAALVAGLGVMAYLKRSG

SEQ ID NO: 226153 - protein, 525 aa, Zea Mays
MFSQVCDKNCAVHLCLCSCPRRQWAERSLTGERTVKRLRLSKALTIPDHTTVHEACRRMASRRVDAVLLTDSNALLCGILTDKDITTRVIARELKMEETPVSKVMTRNPVFVLADTLAVEALQKMVQGKFRHLPVVENGEVIAILDIAKCLYDAIARMERAAEKGKAIAAAVEGVEKHWGAAVPGPNNFIETLRERMFRPSLSTIISENPKVVTVAPSDMVLTASKKMLELKVSSAVVAIENKPGGILTSRDILMRVIAQNLPPESTTVEKVMTQSPECATVDTPILDALHTMHDGKFLHLPVLDRDGNVVTVVDVLHITHAAIATVGNSGAAGSEATSAMMQRFWDSAMSIGPIDDDDDSRSEGSTRVVSEATDIGRPAFFPASGLSNTFGFKIQDKQGRMHRFNCETSGLAELITSILQRVGDDIDRKHLPQILYEDEDRDKVVLSSDSDLIAAVDHARKIGWKSIRLHLDYAGVGRRKGGGGPSDLEYAGKDAAWASAYSAVAAGAALVAGLGVMAYLKRSG

SEQ ID NO: 226154 - protein, 429 aa, Zea Mays
MLWAEGRKEWMPLSSISELHSAVAAKDQSEQDAPDVDDDFEKFQKEVIEAETEVKALKGNDVDQQDDERPATPPDGEEEFTDDDGTIYKWDRTLRAWVPQNDASGSKEDYAVEEMTFAVEEEIFQAPDILGPALEEINNLPESKNKGSDKAEMRGDKKRKSYENPAEKKEANKPPDSWFDLKVNTHVYVTGLPDDVTVEEIVEVFSKCGIIKEDPETKKPRVKIYTDRETGRKKGDALVTYFKEPSVALAVQLLDGTPFRPGGKTHMSVSPAKFEQKGDVFVSKKTDKQKKRKIKKVEDKMLGWGGHDDKKLMIPATVILRHMFTPAELRADEELLPELEADVREECIKFGPVDNVKVCENHPQGVILVRFKDRKDGAKCIEKMNGRWFAGRQIHASEDDGSVNHALIRDYDAEVSRLDRFGQELEEST

SEQ ID NO: 226155 - protein, 337 aa, Zea Mays
MAAAPAAAGGLMQLQPPLCVSPRASASCAPSIWGALPQLRRRRALARAASSVAAGEAEAYTEPELVLLEALLGIQGRGRAVAPRQLQEVESAVQALETQGGIPDPTSSSLIEGSWRLIFTTRPGTASPIQRTFVGVDSFRIFQEVYLRTDDPRVVNVVKFSESVGDLKVEAEATIKDGKRILFRFDRAAFAFKFLPFKVPYPVPFRLLGDEANGWLDTTYLSHTGNIRISRGNKGTTFVLQKSADPRQILLSAISARTGVEEVINDFISSQNGTKADLSILVGEWQLLWCSQTEGESWSSVASAGLKDFQIIREDGKLKNSASPFPGLTLNATGNIW

SEQ ID NO: 226156 - protein, 87 aa, Zea Mays
MAAQEQEHEKQQAKTSTTSSLPSSSERSSSSAPNNLREGAEAAGAGVESDEEIRRVPELGGASASASASGGGGKGGDGGKKHHFAKS

SEQ ID NO: 226157 - protein, 213 aa, Zea Mays
MTWRPDLFSDSMAASGIETGTKLYISNLDYGVSNEDIKELFSEVGHLKRFAVHYDGYGRPNGTAEVVFTRRSDAIAALKRYNNVLLDGKAMKIEVIGNDLGLPMTPRINVVGASNGRATRTVVMTPEFSQRGRGSSSRPLSNPSNRFNNRGGFQAGRGRGQFQSWGRGRGQFQSRGRGRAQFQGRGRGRKPEKTADELDKDLESYHAEAMKTD

SEQ ID NO: 226158 - protein, 292 aa, Zea Mays
MELRLCLRLHARLPPATTPPPFQATAVLPASRRLRTGGSYGVALRRHTRRSSPAICASITDGEQGVAVKERSVSVILLSGGQGKRMGANMPKQYLPLLGLPIALYSLKTFCQLKEVKEVVVVCDPDYSDVFEGSIDNLQIPLKFARPGKERQDSVFNGLQEIDGDSELVCVHDSARPLVSSEDVLEDAAVHGAAVLGVPVKATIKEANTNSFVVKTLDRKTLWEMQTPQAMKPNLLRDGFELVKRDGLEVTDDVSIVEYLKHPVYITEGSYTNIKVTTPDDLLLAERLMNEE

SEQ ID NO: 226159 - protein, 413 aa, Zea Mays
MPFAAGKNKVAACAKHFVGDGGTHDGINENNTIIDRKGLMSIHMPAYLDALRKGVSTVMISYSSWNGLKMHANHNLITGFLKGEHKFQGFTISDWEGIDRITSPPGANYSYSVQASILAGIDMIMVPNNYQDFITILTGHVNSGLIPMSRIDDAVTRILRVKFTMGLFENPMPDPSLADQLGKQEHRDLAREAVRKSLVLLKNGKPGDAPLLPLPKKAAKILVAGSHADNLGYQCGGWTIEWQGDTGRITVGTTLLDAVKAAVDPSTAVVFAENPDAGFVRNGGFSYAIVAVGEHPYTETKGDSMNLTIPEPGPSTIQTVCGAVPCATVLISGRPVVIQPFLGTVHALVAAWLPGSEGQGITDVLFGDYGFTGTLPRTWFKSVDQLPMNYGDEHYDPLFPLGFGLTTQGKKGC

SEQ ID NO: 226160 - protein, 706 aa, Zea Mays
MTIELIVMYAIHAREYRQIVDNLLVLLIGGIPIAMPTVLSVTMAIGSHKLAQQGAITKRMTAIEEMAGMDVLCSDKTGTLTLNKLSVDKNLIEVFARGMEKDDVVLMAARASRLENQDAIDFAIVSMLPDPKEARAGIQEVHFLPFNPTDKRTALTYLDARGKMHRVSKGAPEQILNLASNKSEIERKVHHSIGNYAERGLRSLAVAYQEVPEGTKESSGGPWQFIGLLPLFDPPRHDSAETIRRALDLGVSVKMITGDQLAIAKETGRRLGMGTNMYPSSSLLGDKKGDIAVLPVDELIEQADGFAGVFPEHKYEIVQRLQARKHICGMTGDGVNDAPALKIADIGIAVADATDAARGASDIVLTEPGLSVIISAVLTSRAIFQRMKNYTIYAVSITIRIVLGFLLLACFWKFDFPPMLVLVIAILNDGTIMTISKDKVRPSPHPDSWKLAEIFATGVIIGAYLAVTTVLFFWVIYKTEFFVRVFHVRTMNRKKIEETGDQNLLADNMEMLASAVYLQVSTISQALIFVTRSRGWSFMERPGLLLMAAFVIAQLIASVLAAMVSWELAGIKGIGWRWTGVIWLYNLVVYLLLDPIKFAVRYGLSGKAWNLVIDHKVAFTNRKDFGKEAREAAWAHEQRTLHGLESAGTPGEKAASVELGQMAEDARRRAEIARLRELHTLKGKVESVVKLKGLDLEDINNQHYTV

SEQ ID NO: 226161 - protein, 56 aa, Zea Mays
MKSLYRITNSAFTAILKLLVEAFPKCNTLPKSYNEAKSLLKKLGLGYVSRLESKKR

SEQ ID NO: 226162 - protein, 56 aa, Zea Mays; identical to SEQ ID NO: 226161

SEQ ID NO: 226163 - protein, 1595 aa, Zea Mays
MLMDPPVMQMDCKLKNAMDKTPQIAYDRKLTVSHDDYGWAGSDVHLKDDTIVCSPVDLSDACQSGMDRVLDSASKNSSLNLGDLSQGTELREKNSDSSYSDVKLQLNLSAGNYNGLQTDDYSFNKQSFGKKDMHHPQEEIHSSPNTMSLPSPCRLNGDVTPCEAEKIAEDRGKVDGIVDAVSKEVKTDLVGCHARQEELQCTLQDLSEIACSIDLVRNKSSPQEEKKSVSPLNDMGHNVDNNSCNGDTNYKGQELNMGNVGDEDHAVALWVKWRGKWQTGIRCCRADCPLPTLRAKPTHDRKTYIVVFFPRTKTYSWVDMLLVLPIEECPLPLVNGTHRKWRKLVKDLNIPRRFNIQNLAILMINLIDELHIEAVVDNARKATTWKEFALEASCCRDYTDLGKMLLKFQNMILPDCISCEWVQNSIETWNQKCMNAHDAETIEMLCEELRQSILGNKLKELRDASVQPELVPEWKTWKQELLKQYFSLHPAGNVGNFEKTNCYDDPALDQQGSRKRPKLEVRRGEIQILHMGEADYRTPTEDPNQNKLPSNSVMHENIGALGATSQKNAVMFPGSSGTNENTISGSSNAALQNARLDLDSFKSSRQCSAYIEAKGRQCGRWANDGDIYCCVHQSMHFLDHSSREDKTLTIEAPLCSGMTNMGRKCKHRAQHGSTFCKKHRLQTNLDVMHPGNLLDPSEVLHMGEEPPNKWVEGISKSQALYSIDLETDKNVQAVVQVKLMPTVAIENSGEKGCAMEKTDMCAASTSMTNTDDTSLCIGIRSHDSIVECQDYAKRHTLYCEKHLPKFLKRARNGKSRLVSKDVFVNLLKGCSSRKDKICLHQACEFLYWFLRNNLSHQRTGLASEHMPQILAEVSKNPDFGEFLLKLISTEREKLANIWGFGTDRSKQIYSENKEGSVALQEEKTNLSSGPKCKICGHQFSDDQALGLHWTTVHKKEARWLFRGYSCAACMESFTNKKVLERHVQDVHGAQYLQYSILIRCMSCNSNFLNTDLLYPHIVSDHAQQFRLLDVPQRPSGQSAQQTEGMSGLPLYDSHNVEDENGSQKFVCRLCGLKFDLLPDLGRHHKVAHMVSGAVGHIPLGRGKYQLNRGRHYYSAFKKSLRPTSTLKKSSSSGIDKNLKFQISGLTSQIVESETSSLGKLQDFQCLDVAQTLFSKIQKTRPHPSNFDVLSVARSVCCKTSLLAALEVKYGPLPENIFVKAAKLCSDNGIQIDWHQEGFICPKGCKSRYNSNALLPMQLTAVDFLEAPVDSRNDDEMWGMEEYHYVLDSKHFGWKPKNESVVLCEDISFGREKVPIVCVIDVDAKDSLGMKPEELLPHGSSLPWEGFHYITNRVMDSSLIDSENSMPGCACSHPECSPENCGHVSLFDGVYNSLVDINGTPMHGRFAYDEDSKIILQEGYPIYECNSSCICDSSCQNKVLQKGLLVKLELFRSENKGWAIRAAEPILQGTFVCEYIGEVVKADKAMKNAESVSSKGGCSYLFSIASQIDRERVRTVGAIEYFIDATRSGNVSRYISHSTRLVLVESKDCQLAHIGLFANQDIAVGEELAYDYRQKLVAGDGCPCHCGTTNCRGRVY

SEQ ID NO: 226164 - protein, 68 aa, Zea Mays
MSKPPPHIQAPPPPPPANNSAAATATSAMGACATKPKTLEGQAPAEAAVSTPKVAPEATPISVELSRP

SEQ ID NO: 226165 - protein, 69 aa, Zea Mays
MSLVAYDASSDEEDAGEPAAAAAPHPAPIGPQPRPPSPTAVSPAPRPTPTLTPPPPAASQDAVSHRQPW

SEQ ID NO: 226166 - protein, 114 aa, Zea Mays
MAAVTSTASICPAAAGALSSLPSFITRKPTSGSRRLQQAAATTVCHCRSARVEEGLLGRRDALLLGIVFSAATPPLLAPAGALADEATAESQEGFTTYEDEANKFSIQVPQGYI

SEQ ID NO: 226167 - protein, 144 aa, Zea Mays
MALQLRRLLPHGYAQRHRAVIHALSLLPPPPAMISDGAVEDIRSLVKERYGQKYVSEDIRKYLKKVKNAQEAHEAIRPTSIRRPPSSLVGILDDDSLKLYTLIWKRTMACQMEASRTEMIQVDVGIPEGEMNFHSTASKLDFKG

SEQ ID NO: 226168 - protein, 379 aa, Zea Mays
MALQLRRLLPHGYAQRHRAVIHALSLLPPPPAMLQFEVFQRYSSSPWPFSPFRPCKMCGVAFRSNSTRKISSRNNFGVALQPKSSAFITPRLFGSYSSVCFRATASCGIALKANNIGNSRPFSTTYSKKIRFLVKNKISFSNLNMRRKDGSVAHSLLHRSEKCQSTLATCSTIVDEASTSTSNNSKSVTDAKTDTAKRKSSRGSKKEVDGDMKEKEVHTNKKRIFARTRKAATKTSDNISTNQENKKTDNCKLKRGADSFKEKKVNNRAKSKAEVSAASSVPEICMQSSIDGSVIEKKPLVPLYPPRAKSVVVVESATKAKVIQKYLGDMYEVLPSYGHVRDLAGRSKSVRPDDDFSMVWEVPAAAWTHLKSIKVALQR

SEQ ID NO: 226169 - protein, 599 aa, Zea Mays
MFRTFTRLRDAAAPLAASAVRRCSGVSGRIRAEANCPRCDAHMSVQFSLQQLPAPPPASAGAIDGAQHHNHDGAGVCPACRGAFLFRAQRIDPLRGAFLEIPAGVAAGDEDAESGGFADRIKRMLSERPPDEFPPLPQSPPMQMPHYPIRRKPRRRPREEGGGGGGGGGGGNGNGNGGDSSSGGDGTSASPKREWWGGASLGDDLPTPRELCRRLDEFVIGQAKAKKVLSVAVYNHYKRIYNANVQKEFAGNSGFPDAGHDDQNIVEIDKSNVLLMGPTGSGKTLLAKTLARIVNVPFVIADATSLTQAGYVGEDVESILQKLLVAESANVSRDVSGEGVQQALLKILEGTVVSIPEKGSRKNSRNDSIQIDTTDILFICGGAFVDLEKTISERRQDSSIGFGAPIRTNMRSSGASCPMVTSSLLESVESGDLVRYGLIPEFIGRLPILVSLAALNEGQLVQVLTEPKNSLSKQYRKMFNLNKVKLHFTDGALRLLAKKAIAKSTGARGLRAILETVLLEAMYEVPDEKTGNERVDAVVVDEEAIGSVDRPGCGAKILRGDGALDQYITRTNVMNLQETNDGLAGELEEAYMLSRIVSL

SEQ ID NO: 226170 - protein, 378 aa, Zea Mays
MGLFRQVVGTPNYMCPEILADIPYGYKSDIWSLGCCMFEILAHRPAFKATDMAALVNKINRSSISPMPPIYSSALKQIVKSMLRKNPEHRPTAGELLRHPHLQPYLSESSNCSPIYLPVKPTKGNLVDKQSKKPSSGRKRAVKANGSNGTLETAAEHAVEARDSSTNFSDVSTIGTQEALILQMPVDPDAGSKEEQNVDVVPFQHAAENLMATTDRQVDATIRLKAIRTSNAKEAAPVTVADQKFNEAPIPNEELTIGVVQEQRKDVKPRSYQAGKPEMCDTTVTEESSPISTLKLAHTESAPAEWDHLNIVQQRADALESLLELCAKLLEQERLDELAGVLRPFGEGAVSSRETAIWLTKSLMTPPPKFGESPTKLL

SEQ ID NO: 226171 - protein, 56 aa, Zea Mays
MMQRTSWMYNLSRLDLSYISEVHRFIDVATNHACRTKTKHIYCPCMDCKNDVVFDG

SEQ ID NO: 226172 - protein, 294 aa, Zea Mays
MVILYPGCVAPTVHRDFLPRWVLLNNSSRMYCHVFPDRTKPKRQYRHQWVPCFSKGSSFQDPLPSVKPSRLLPAEELKTYPNTVPEEIFNTIILDDSDAFYVLELSTSREFSSSLDKNSAILICLFDVDGDSLLQRVPAIYLGQPTHGFKTEQQIPFQSGSVDIVTFKGSKLKTIKEVWIGLESGSWRLDGLSLKVIHGPVGQPKEINGTPEQKFSGLQYTFENVNVFLGDDGASVAEARPTAITDLSGVGLSDLQQGMLSSRSKASSIQEVREDGLREWHWRVPVPVAAPKIG

SEQ ID NO: 226173 - protein, 183 aa, Zea Mays
MEGDATGADGGGGGGSGERSSFVIGLIENRAKEVGVAAFDLRSASLHLSQYIETSCSYHNTNTLLHFYDPMVVIVPPNKTAADGMVGVSELIDKHYPANKKGAVIVRSLSARDPSALGLDTYCKQYYLCLAAATATIKWLGLVSNCSNGYWSIKVIKWVKEESHLWCRAGASGLDSILSAPAH

SEQ ID NO: 226174 - protein, 157 aa, Zea Mays
MEGDATGADGGGGGGSGERSSFVIGLIENRAKEVGVAAFDLRSASLHLSQYIETSCSYHNTNTLLHFYDPMVVIVPPNKTAADGMVGVSELIDKHYPANKKVTMARGCFDDTKGAVIVRSLSARDPSALGLDTYCKQYYLCLAAATATIKWPGQAAH

SEQ ID NO: 226175 - protein, 151 aa, Zea Mays
MVVGIIDEAMKKPSCQKGFILDGFPRTVTQAQKLDEMLAKQGANVDKVLNFAIDDAILEERITGRWIHSASGRTYHSKFAPPKSPGVDDVTGEPLIQRRDDTAEILKSRLEAFHRQTEPVIEYYSKRGLVVNLPAEKPPKEVTAEVLKALS

SEQ ID NO: 226176 - protein, 476 aa, Zea Mays
MGQEEAVAANGTGTGVGRGRPHAVVMPYPLQGHVIPAVHLALRLAERGFAVTFINTESVHHQIGAGGDIFAGVRARGGGTTTEELDVRYELVSDGFPLGFDRSLNHDQFMEGVLHVLPAHVEDLLRRRVVVDPATTCLVVDTFFVWPATLARKLGVPYVSFWTEPALIFNLYYHMDLLTKHGHFKCKGYGHHLRRPPHHLQGVRRGPPRRLRPVQHRGGAGAVDHRRAARRQALLRRGPHLPGGLRAQRRGHVHVARVRRLLAVAGRAAARLRALHLLRKLRARDQAGAARDRGRRAGQRRPVPVGHAPGHRQLRRPAPAARGLRRGRGRRGPRPRRPVVLPGGGALPPRRRRLPHALRLELRPGERLGGGAHALLPAAHGPAHQPPPRRAGVGRRRLHRGPRRGARRRGQGADSRDHGRGTRPQAQGPGQEAEGHTRGCRGARWLVAAQLRRLRRRAQAKAQGRQLSWPQNTAAM

SEQ ID NO: 226177 - protein, 95 aa, Zea Mays
MTQSHVTGGFWLGLPNHFCRKYLPKRDETITLLDEDDNESYTLYLALKRGLSAGWRGFAIQHKLVDGDCLVFQLTERTKFKVIIIRASSYYESED

SEQ ID NO: 226178 - protein, 231 aa, Zea Mays
MAEATAYEEQRRRQVEANKRKLEELQLHYLSAAVREAAAAAKPSPVKKRKARVPLDAADSVMEPLRRSGRLANLPDKSVHREEVPTFWRKIRRTYGSVRKDLENRVYATDEARSYAICKAEEVEQELDSSFPVFIKPMTQSHVTGGFWLGLPNHFCRKYLPKRDETITLLDEDDNESYTLYLALKRGLSAGWRGFAIQHKLVDGDCLVFQLTERTKFKLCCAVPPVPALHL

SEQ ID NO: 226179 - protein, 128 aa, Zea Mays
MEEYLESMKSLRSYMNDLEDDAAKRSVEEQQQRTAIDAHDSDVALVMAQAKQASEEAERLATARAKVGMQMAEKQGRIATLDIECATLKQEWFSMKNKITRQEPHVAKSQSKQNFIEGTGFSENRKNT

SEQ ID NO: 226180 - protein, 150 aa, Zea Mays
MEEYLESMKSLRSYMNDLEDDAAKRSVEEQQQRTAIDAHDSDVALVMAQAKQASEEAERLATARAKVGMQMAEKQGRIATLDIECATLKQEWFSMKNKITRQEPHVAKSQSKQNFIEGEKHVIFNSEGSLDKFVSIYSPPSLPTTMLFSF

SEQ ID NO: 226181 - protein, 145 aa, Zea Mays
MGVAAPRVTEENLAALFINCGQVVDCRMCGDPNSVLRFAFIEFTDEEGARAALNLSGTVLGYYPVRVLPSKTAIAPVNPTFLPRSDDEREMCARTIYCTNIDKKVTQADLKLFFESICGEVFRLRLLGDYHHSTRIAFVEFVMVS

SEQ ID NO: 226182 - protein, 207 aa, Zea Mays
MAAAAQLHGSAAATVAYRGTRAYSVPSSCRWPQSGSPKLSISTSGVSMKPFGFAAKLSTKCANENARVEELDLRSDQMKELQVEEQVIPQKRSAKIHDFCLGIPFGGLLFSMGLLGYIFSRSTISLVLGIAPGLATLLLGTLSLKFWRSGRSSFLLILAQAAISAFLAWKYSHAYFLTPSLGLLRVTEHCNGLFLRLCATCGRKSPA

SEQ ID NO: 226183 - protein, 192 aa, Zea Mays
MEDGDESAAAAAALGLSPQLFVNEVHGIIADISAEAFEYCLQAAAAPGVVGAATAAEKATDLQRGLNAIHHVVKDRLDKRMTNWEKFCYRHCFDVPEGFVAADDANKESENLERELSSLERQATFKRRLDSSVSEIEKLFEEEMVQGNLKDLVKAIPVLHQKIIDANQRRTEIRSLVDQQAWNTKRSRDSKP

SEQ ID NO: 226184 - protein, 242 aa, Zea Mays
MCRAWQTLIRTNREQADAVDGKENFPMALYVVSGDEDGERGGAPVFCIDVAAQLCSNFNKGQCTWSPILLLIPLVLGLDKINPRYIPLLKETFKFPQSLGILGGKPGTSTYIAGVQEDRALYLDPHDVQMAVDIAPDNLEADTSSYHCSVVRDLALEQIDPSLAIGFYCRDKDDFDDFCSRASELAEKANGAPLFTVMQSVQPSKQMYKQDDGLCCCSGSSMANEDYDLDASGEAGEEWQIL

SEQ ID NO: 226185 - protein, 370 aa, Zea Mays
MHPVSPEEEESGGSDSDSGHAAFLEDFSSRIWITYRKGFDAIPGSKLTSDVNWGCMVRSSQMLVAQALIFHHLGRSWRKPSEKPYDPDYIRVLHLFGDSEACAFSIHNLLQAGRNYGLAAGSWVGPYAMCRAWQTLIRTNREQADAVDGKENFPMALYVVSGDEDGERGGAPVFCIDVAAQLCSNFNKGQCTWSPILLLIPLVLGLDKINPRYIPLLKETFKFPQSLGILGGKPGTSTYIAGVQEDRALYLDPHDVQMAVDIAPDNLEADTSSYHCSVVRDLALEQIDPSLAIGFYCRDKDDFDDFCSRASELAEKANGAPLFTVMQSVQPSKQMYKQDDGLCCCSGSSMANEDYDLDASGEAGEEWQIL

SEQ ID NO: 226186 - protein, 531 aa, Zea Mays
MAQMKKTSFSLQMAINRLQIVKNEKSQIEEKKELCEKDVQRLMKEKEYSKSIIMNLTKDMEAMNRLHEQQLEQIGRKAKEMEEQLTTRVKEVEYLLLQSNKKVEELEIASRLKSQLWDQKENIFQSYMDNQQLVIKDIRILSQSYENDMYALQMQWRNEISNLGSGLKCLVDAAENYHKVLTENQKLFNEVQELKGNIRVYCRVRPFLSGQDKKSTTIDYMGENGELLISNPFKQGKDGHRMFKFNKVFTPFASQAEVFSDIQPLIRSVLDGFNVCIFAYGQTGSGKTYTMSGPTTSKQDWGVNYRALNDLFDISLSRRNAFSYEVGVQMVEIYNEQVRDLLSNDIAQRRLGIWNTSQPNGLVVPDASLHSVKSTSDVLDLMEIGQANRAVGSTALNERSSRSHSILTVHVRGMDLKNGSTSRGCLHLIDLAGSERVEKSEVTGDRLKEAQYINKSLSALGDVIFALSQKSAHVPYRNSKLTQVLQSSLGNQIFIYYLDVKYINVYLPNFMYLLFSSRWTSKNSNVCSDKS

SEQ ID NO: 226187 - protein, 983 aa, Zea Mays
MNALLPEFSLPPDSSSEELRELLSDGVVLCRLVNTLIPGVLEGSWEGYAPSDQRLGNVKKFLSVVSDMGLPGFSLKDLDEGLMSSVVECLLVLRGSVDPRLGDDIPPDVTRTPLRKQWGVQEMDKPQVPAAALGKRSPAEDMRNGVADSKTHQKTSVFSGQKVREVFQLKRGSYSDLTAAKISEMMHSNSLDNAPTQSLISVVNGILDESIERKKGEIPHRVVYLLRKVVQEIEHRLCIQAEHIRSQNVTIKTREQKYCSKIKALEMLVNGTNEENQMAINRLQIVKNEKSQIEEKKELCEKDVQRLMKEKEYSKSIIMNLTKDMEAMNRLHEQQLEQIGRKAKEMEEQLTTRVKEVEYLLLQSNKKVEELEIASRLKSQLWDQKENIFQSYMDNQQLVIKDIRILSQSYENDMYALQMQWRNEISNLGSGLKCLVDAAENYHKVLTENQKLFNEVQELKGNIRVYCRVRPFLSGQDKKSTTIDYMGENGELLISNPFKQGKDGHRMFKFNKVFTPFASQAEVFSDIQPLIRSVLDGFNVCIFAYGQTGSGKTYTMSGPTTSKQDWGVNYRALNDLFDISLSRRNAFSYEVGVQMVEIYNEQVRDLLSNDIAQRRLGIWNTSQPNGLVVPDASLHSVKSTSDVLDLMEIGQANRAVGSTALNERSSRSHSILTVHVRGMDLKNGSTSRGCLHLIDLAGSERVEKSEVTGDRLKEAQYINKSLSALGDVIFALSQKSAHVPYRNSKLTQVLQSSLGGQAKTLMFVQINPDVESYSETISTLKFAERVSGVELGAARSNKEGKDIKELLEQVASLKDTILRKDMEIEQIQVIKDKVKSPNLLLDRNVPGLTKTTANQPSQLLSGERMLKSSDRVLSDRQSYGEVNVDPNHHVMDTAPVSIDEAGYENNASDDGLSGETENDNSAAEMTAERLHRFPSRISRFTLTKNGQPSMSRSNPKDAKTPSNTKAPSSRLTGGSSARSKRRQ

SEQ ID NO: 226188 - protein, 1007 aa, Zea Mays
MGSVDGRGVEGIHEANRRAQLIGWMNALLPEFSLPPDSSSEELRELLSDGVVLCRLVNTLIPGVLEGSWEGYAPSDQRLGNVKKFLSVVSDMGLPGFSLKDLDEGLMSSVVECLLVLRGSVDPRLGDDIPPDVTRTPLRKQWGVQEMDKPQVPAAALGKRSPAEDMRNGVADSKTHQKTSVFSGQKVREVFQLKRGSYSDLTAAKISEMMHSNSLDNAPTQSLISVVNGILDESIERKKGEIPHRVVYLLRKVVQEIEHRLCIQAEHIRSQNVTIKTREQKYCSKIKALEMLVNGTNEENQMAINRLQIVKNEKSQIEEKKELCEKDVQRLMKEKEYSKSIIMNLTKDMEAMNRLHEQQLEQIGRKAKEMEEQLTTRVKEVEYLLLQSNKKVEELEIASRLKSQLWDQKENIFQSYMDNQQLVIKDIRILSQSYENDMYALQMQWRNEISNLGSGLKCLVDAAENYHKVLTENQKLFNEVQELKGNIRVYCRVRPFLSGQDKKSTTIDYMGENGELLISNPFKQGKDGHRMFKFNKVFTPFASQAEVFSDIQPLIRSVLDGFNVCIFAYGQTGSGKTYTMSGPTTSKQDWGVNYRALNDLFDISLSRRNAFSYEVGVQMVEIYNEQVRDLLSNDIAQKTLGIWNTSQPNGLVVPDASLHSVKSTSDVLDLMEIGQANRAVGSTALNERSSRSHSILTVHVRGMDLKNGSTSRGCLHLIDLAGSERVEKSEVTGDRLKEAQYINKSLSALGDVIFALSQKSAHVPYRNSKLTQVLQSSLGGQAKTLMFVQINPDVESYSETISTLKFAERVSGVELGAARSNKEGKDIKELLEQVASLKDTILRKDMEIEQIQVIKDKVKSPNLLLDRNVPGLTKTTANQPSQLLSGERMLKSSDRVLSDRQSYGEVNVDPNHHVMDTAPVSIDEAGYENNASDDGLSGETENDNSAAEMTAERLHRFPSRISRFTLTKNGQPSMSRSNPKDAKTPSNTKAPSSRLTGGSSARSKRRQ

SEQ ID NO: 226189 - protein, 490 aa, Zea Mays
MSSSSASSSAAAHHQQHYRRQTGGSGLVPLAALIKEEARTERQSIAGGESRISARDDDAAGVGSSGVGGEAAEAAVESRLERPLLRYGCAAQCKKGEDFFLLRTDCLRPAISVSSSASPHPIFAVFAILDGHNGNAAAIYTRDNLLNHVLSAMPRGLSREEWLHMLPRALVAGFVKTDKEFQSKGQTSGTTATFVIIDGWTITVASVGDSRCILDAQGGAVSLLTVDHRLEENVEERERVTASGGEVGRLSVVGGAEIGPLRCWPGGLCLSRSIGDIDVGEFIVPVPYVKQVKLSNAGGRLIIASDGIWDALSSEAAAKSCRGLPAELAAKQVVKEALRTRGLKDDTTCIVVDIIPPGQTIRPLSPPKKTSKLKSFIFRKKAKDPSQKLTKQHSAVGIVEEIFEEGSAMLSESSNITCLKKGQLCSFIRSEWKILCFGTVNVQKGESYSTNSINYVKIYRLLKLGMGVFFSLFKLRTILFALKFTLFIVL

SEQ ID NO: 226190 - protein, 61 aa, Zea Mays
MPESDRWDSCLARPMSSFHLHCTRRGDAHSGVKFTYNKSSGNPHTVKPFLYKPATVPLYCS

SEQ ID NO: 226191 - protein, 962 aa, Zea Mays
MDHGRYAPQHGWENNSAPNGYGVINEPDFRSGGSYNARRSVDEGFPRDSYGRGAFYHDTHDRNMYASPPSAGGMWSQPRRNHDEDYATARDHRRHDTDYRNDGKHHEFDSYRGVDRLHDNYRATDNYYESGSHRDFGADRSKRIGSRERAEFHGEFEDRYRSSHQSREDSYERDHEYGRYGYDSDYERGKRDSSWRRRDSCDSERERSGLSREREESPYTRHSRSRSHGRDDRSRSRSRSRSPRPRSHGRNQRDGLYYDNRFDRRREYDWDDRGHGDSVAPSATVVVKGLSLKTNDDDLYKILAQWGPLRSVRVIRERNSGMSRGFAFIDFPTVEAARRMMEATGENGLEIDGRNVFFQYSSKPTGGMGGPSLGQENFTRPTYGHRTAAAPCDWICTICGCMNFARRTSCFQCNEPRTEDALPADATGSASHFGRRGSELGPTHVLVVRGLDENADEEMLRYEFAKHAPIKDIRLVRDKFTHVSRGFAFVHFHSVEDATKALEATNGITLEKNGQVLRVAYAKSTHGPASGGSQSNSLAAAAIEAASFAQQYDAIGWAPKEYNPDDKQNNNSESQKDGSTAQSGFVWDEKSGYYYDSASGFYYDGTTGLYYDSNSGVWYSYDQQTQQYVPCNDQSNTKAAGEAASENTKTSDSNSGKKVVISAPAATIKQSEKTSLPDAVQAAANAALAAEKREKEKAKEIKLASKNSLIANKKMSNVLAMWKQRNQEGQAARIVLDDKEPANSDDKFSHSRSGTGFSLKSKPNSDLENAMGNSLGQGMTSTQTLDSVVKPRPVSNSLGTTVMGVIRGSARGVIKSDTTFHALSDAGSTDSRTTITTRASGLMTSSEALITPAPFKTDVSALVSNTPSGVSGSGKRRFSEAPGQSQYRDRAAERRNLYGSSHGTDTVGLDSRIFLLPLECILDPTYSLGMMFSVLLVRFLLIFWKLPVVKLVTIRPERVQVR

SEQ ID NO: 226192 - protein, 1021 aa, Zea Mays
MDHGRYAPQHGWENNSAPNGYGVINEPDFRSGGSYNARRSVDEGFPRDSYGRGAFYHDTHDRNMYASPPSAGGMWSQPRRNHDEDYATARDHRRHDTDYRNDGKHHEFDSYRGVDRLHDNYRATDNYYESGSHRDFGADRSKRIGSRERAEFHGEFEDRYRSSHQSREDSYERDHEYGRYGYDSDYERGKRDSSWRRRDSCDSERERSGLSREREESPYTRHSRSRSHGRDDRSRSRSRSRSPRPRSHGRNQRDGLYYDNRFDRRREYDWDDRGHGDSVAPSATVVVKGLSLKTNDDDLYKILAQWGPLRSVRVIRERNSGMSRGFAFIDFPTVEAARRMMEATGENGLEIDGRNVFFQYSSKPTGGMGGPSLGQENFTRPTYGHRTAAAPCDWICTICGCMNFARRTSCFQCNEPRTEDALPADATGSASHFGRRGSELGPTHVLVVRGLDENADEEMLRYEFAKHAPIKDIRLVRDKFTHVSRGFAFVHFHSVEDATKALEATNGITLEKNGQVLRVAYAKSTHGPASGGSQSNSLAAAAIEAASFAQQYDAIGWAPKEYNPDDKQNNNSESQKDGSTAQSGFVWDEKSGYYYDSASGFYYDGTTGLYYDSNSGVWYSYDQQTQQYVPCNDQSNTKAAGEAASENTKTSDSNSGKKVVISAPAATIKQSEKTSLPDAVQAAANAALAAEKREKEKAKEIKLASKNSLIANKKMSNVLAMWKQRNQEGQAARIVLDDKEPANSDDKFSHSRSGTGFSLKSKPNSDLENAMGNSLGQGMTSTQTLDSVVKPRPVSNSLGTTVMGVIRGSARGVIKSDTTFHALSDAGSTDSRTTITTRASGLMTSSEALITPAPFKTDVSALVSNTPSGVSGSGKRRFSEAPGQSQYRDRAAERRNLYGSSHGTDTVGLDSRSMPFPPGVGERSSGEIGNSENYEVITADRAIDESNVGNRILRNMGWQEGLGLGKDASGIKEPVLAKSVDARAGLGSQQRKPDPSLEAQAGDSYKTIIQKKAMARFKEMS

SEQ ID NO: 226193 - protein, 826 aa, Zea Mays
MYASPPSAGGMWSQPRRNHDEDYATARDHRRHDTDYRNDGKHHEFDSYRGVDRLHDNYRATDNYYESGSHRDFGADRSKRIGSRERAEFHGEFEDRYRSSHQSREDSYERDHEYGRYGYDSDYERGKRDSSWRRRDSCDSERERSGLSREREESPYTRHSRSRSHGRDDRSRSRSRSRSPRPRSHGRNQRDGLYYDNRFDRRREYDWDDRGHGDSVAPSATVVVKGLSLKTNDDDLYKILAQWGPLRSVRVIRERNSGMSRGFAFIDFPTVEAARRMMEATGENGLEIDGRNVFFQYRTAAAPCDWICTICGCMNFARRTSCFQCNEPRTEDALPADATGSASHFGRRGSELGPTHVLVVRGLDENADEEMLRYEFAKHAPIKDIRLVRDKFTHVSRGFAFVHFHSVEDATKALEATNGITLEKNGQVLRVAYAKSTHGPASGGSQSNSLAAAAIEAASFAQQYDAIGWAPKEYNPDDKQNNNSESQKDGSTAQSGFVWDEKSGYYYDSASGFYYDGTTGLYYDSNSGVWYSYDQQTQQYVPCNDQSNTKAAGEAASENTKTSDSNSGKKVVISAPAATIKQSEKTSLPDAVQAAANAALAAEKREKEKAKEIKLASKNSLIANKKMSNVLAMWKQRNQEGQAARIVLDDKEPANSDDKFSHSRSGTGFSLKSKPNSDLENAMGNSLGQGMTSTQTLDSVVKPRPVSNSLGTTVMGVIRGSARGVIKSDTTFHALSDAGSTDSRTTITTRASGLMTSSEALITPAPFKTDVSALVSNTPSGVSGSGKRRFSEAPGQSQYRDRAAERRNLYGSSHGTDTVGLDSRFK

SEQ ID NO: 226194 - protein, 902 aa, Zea Mays
MGEQQSPNGYGVINEPDFRSGGSYNARRSVDEGFPRDSYGRGAFYHDTHDRNMYASPPSAGGMWSQPRRNHDEDYATARDHRRHDTDYRNDGKHHEFDSYRGVDRLHDNYRATDNYYESGSHRDFGADRSKRIGSRERAEFHGEFEDRYRSSHQSREDSYERDHEYGRYGYDSDYERGKRDSSWRRRDSCDSERERSGLSREREESPYTRHSRSRSHGRDDRSRSRSRSRSPRPRSHGRNQRDGLYYDNRFDRRREYDWDDRGHGDSVAPSATVVVKGLSLKTNDDDLYKILAQWGPLRSVRVIRERNSGMSRGFAFIDFPTVEAARRMMEATGENGLEIDGRNVFFQYSSKPTGGMGGPSLGQENFTRPTYGHRTAAAPCDWICTICGCMNFARRTSCFQCNEPRTEDALPADATGSASHFGRRGSELGPTHVLVVRGLDENADEEMLRYEFAKHAPIKDIRLVRDKFTHVSRGFAFVHFHSVEDATKALEATNGITLEKNGQVLRVAYAKSTHGPASGGSQSNSLAAAAIEAASFAQQYDAIGWAPKEYNPDDKQNNNSESQKDGSTAQSGFVWDEKSGYYYDSASGFYYDGTTGLYYDSNSGVWYSYDQQTQQYVPCNDQSNTKAAGEAASENTKTSDSNSGKKVVISAPAATIKQSEKTSLPDAVQAAANAALAAEKREKEKAKEIKLASKNSLIANKKMSNVLAMWKQRNQEGQAARIVLDDKEPANSDDKFSHSRSGTGFSLKSKPNSDLENAMGNSLGQGMTSTQTLDSVVKPRPVSNSLGTTVMGVIRGSARGVIKSDTTFHALSDAGSTDSRTTITTRASGLMTSSEALITPAPFKTDVSALVSNTPSGVSGSGKRRFSEAPGQSQYRDRAAERRNLYGSSHGTDTVGLDSMR

SEQ ID NO: 226195 - protein, 874 aa, Zea Mays
MDHGRYAPQHGWENNSAPNGYGVINEPDFRSGGSYNARRSVDEGFPRDSYGRGAFYHDTHDRNMYASPPSAGGMWSQPRRNHDEDYATARDHRSHRDFGADRSKRIGSRERAEFHGEFEDRYRSSHQSREDSYERDHEYGRYGYDSDYERGKRDSSWRRRDSCDSERERSGLSREREESPYTRHSRSRSHGRDDRSRSRSRSRSPRPRSHGRNQRDGLYYDNRFDRRREYDWDDRGHGDSVAPSATVVVKGLSLKTNDDDLYKILAQWGPLRSVRVIRERNSGMSRGFAFIDFPTVEAARRMMEATGENGLEIDGRNVFFQYSKPTGGMGGPSLGQENFTRPTYGHRTAAAPCDWICTICGCMNFARRTSCFQCNEPRTEDALPADATGSASHFGRRGSELGPTHVLVVRGLDENADEEMLRYEFAKHAPIKDIRLVRDKFTHVSRGFAFVHFHSVEDATKALEATNGITLEKNGQVLRVAYAKSTHGPASGGSQSNSLAAAAIEAASFAQQYDAIGWAPKEYNPDDKQNNNSESQKDGSTAQSGFVWDEKSGYYYDSASGFYYDGTTGLYYDSNSGVWYSYDQQTQQYVPCNDQSNTKAAGEAASENTKTSDSNSGKKVVISAPAATIKQSEKTSLPDAVQAAANAALAAEKREKEKAKEIKLASKNSLIANKKMSNVLAMWKQRNQEGQAARIVLDDKEPANSDDKFSHSRSGTGFSLKSKPNSDLENAMGNSLGQGMTSTQTLDSVVKPRPVSNSLGTTVMGVIRGSARGVIKSDTTFHALSDAGSTDSRTTITTRASGLMTSSEALITPAPFKTDVSALVSNTPSGVSGSGKRRFSEAPGQSQYRDRAAERRNLYGSSHGTDTVGLDSMR

SEQ ID NO: 226196 - protein, 544 aa, Zea Mays
MALPCFLGSSATSASIWKCGCSSSDTESRLHKIELQHRFGDPRQVQELHRFCSCWLGRSVSLKMDVSRAYFVAYVAGQRSCLLKRSGRTFSSAICYYGGPWGTSSAPVTRPAAAAGDGEDPGVAAWRARDLDEAISSLFLFPTGNATEEELRRGVAACDMMVASAATFPYVERRMSAGMWDSNGVANDPSLRGLQARWPWLSAAVQQSYQGAFAAPVPVQRSNGKWMRVDNVRSAVPLVSFLEHGSCNRTRGAPALLIRSVVQEPDEDMQPGGGARATTAACGLPAEPTVRLVGPEGRCVDVPYGYYYNGNQVQLWSCKSTSAVNQLWTLKRDGTIRSNGKCLTSSGDAAGARAVVDDCPRFPTGRVVWEVRVDGTVALKWSRGLVLAVTSSTLFAGLTVRQDDRGTGQSWTPTNVTAPLDAAIVGFRDLCLQADYAGSVSVAACRDGVQWSLYPDGSVRPPAWLLLQWQCLAADASGGVTVKLCDGAGSSCERWVFRNDGTIFNTGTGMVLDARPSAGANATASQVIVSPATGSPTQQWTLML

SEQ ID NO: 226197 - protein, 1346 aa, Zea Mays
MPDATGLEMGLKGSKGAPVPGMEGGVAKAPASLEENKSSADEDLGRGPALTGKKRRDCRGSADEDRNVTKRVLRSDAMKLRAEAEAACVVAVEVSKTDSLERKRCEAIVEAEPCNSRLLMEVTCNGEEANELVNLDSSDVSEESARCSENNMGMPSVPATDSSQDNGLGTQSSLAESDIKTMKSDEKMSTATLSECNDSRAGMNSLSVDEAQDDKVRHGPCQGEVIDSAMANDAGTSTNLIKISPTSGSESVKQENNVVGTEEVILHSSDTKVEKHSHIDDVCTETEISLTDNGICAVDNHTDLTGCTKQEERGSPMNEANDVSSHDIVFTRRGRKSCEAKQRTCEEEARFEKRITRSATVRQREVSASSHKTSTNEAALEGRGRKGDIVAHYTRKVSSAVSPKGHHAELGDCNTSMPKQTVKETVVDRRDSGVPENDNHANVTENKESENGKEINLKTQPPVGIVKKTSGGGVSAVDQNVSGSAITERNDTEHTDSDGVKSENKTPVQKPLLSVGAKIVASKKRILEAELDKSTGRSPIALPSMKKTRNMSSGPEINQPDKSTGDKLIENNCDSGNKRVLRERQHRNQTNLSTRYSNHSNQNDMEQTQDQSDDDEISSDTSYRRTRSRRRCGAARLAVPKQEDSSDSEDFIAVKKNRRKRKKSVHKQRAGSKLKHTSGPSKAGRLGRPPLIKSESSSLSLQPGKGERKVPEGTGTLREEKQKISDQIKAMLLDAGWTIDLRPRNGRNYMDSVYIPPSGKGSYWSVTKAYYAFRAGMESEQQESPKDQSLSTKSVGSPDKRQVSSSSGYTLTEDILSKLKRVVVNKRTTKLEIQRLRQKRFKKEKKKKNVSNSRSLHLGNERKKRGGCALLARGSNKESGSSTDGFVPYEWKRTIFSWLIDLDVLSVNTKLKCMDGSHSKVLLEGFATRDGINCSCCNEVYSVLEFVTHAGSEVNKPYRNILVDGLDIDLLHCLINAWNMQSDVERQDFFPVSIEGDDPNDDTCGICGDGGNLICCDGCPSTFHMSCLGLEVLPSDYWCCANCSCKFCHEHSSDGAEDTADVDYSLHTCSQCEEQYHEACSPETDSITNLSSQTGNLFCQQSCRLLFEELQNLLAVKKDLEPEYSCRVVQRIHEDVPEEVLALDKRVECNSRIAVALSLMDECFLPIIDQRTGINLIRNVVYSCGSNFARLDFRGFYIFILERGDEIIAAASVRIHGTKLAEMPFIGTRNMYRRQGMCRRLVDGIEMILSSLNVEKLIIPAITELVDTWTSKFGFSPLEDSEKQEVKSISMLVFPGTGLLQKPLLKALPNEEQCSQGGLGVKEHEDSSKDADGTCNGDVSQECPHS

SEQ ID NO: 226198 - protein, 463 aa, Zea Mays
MAPVSLPPGFRFHPTDEELIICYLKRKINGRQIELEIIPEVDLYKCEPWDLPEKSFLPSKDLEWYFFSPRDRKYPNGSRTNRATKSGYWKATGKDRKVNSHRRAVGMKKTLVYYRGRAPHGSRTDWVMHEYRLDERECETDTGLQDAYALCRVFKKTAPGPKIIEHYGAVHHPIEQTQWMGSSVERSPTLDLSSDVRGDDFDSSSFSFPTEAPMDSSMHGGLFGMQMSAPHEDAKWMQFLSEDAFNATNPFFTNPASSSFSCLPSKVDVALECARLQHRLSLPPLEVEDFPHDVSLDTKASVLRSSNPNNEVDILQEFLSVASASQELINGTSSSYAAEMWAGAGTSSTSDTHYVNELSSLFEFGVKAKEEADNFYHMDCIGTSSGFSPKPVRVDEPVRLVEIADMEEFKEEKRRVENLRGVRLHNNDDLGEIPTDCCITQYPISDTADISDCRRSRSPDQSH

SEQ ID NO: 226199 - protein, 463 aa, Zea Mays; identical to SEQ ID NO: 226198

SEQ ID NO: 226200 - protein, 290 aa, Zea Mays
MGLHMEAGQEMSYLISPNDSVDLSIKYDSKWSDQDHLKFRVNAVRGLVTLLNGETESAAQLFDGWCRDFSRGENQTENAAVSYGEYLHCVGDFQMAAQVYEKILEAFCMDDMSGNLLAAGNMVPEEASLGATCSYGQLLSHSGKFAEAEDYLTRALQKAEEQFGANHPKVGIILTCVARMYKLKAKSEGSTSIMVQEGLYRKALEVLKAPAINSEGTSKQVDWRDIISLARGEYAELLLIQSNRKAEGERMKQWAEDAWRNRRLTLAQALEFSEPSKPTVVVDTRIGRVV

SEQ ID NO: 226201 - protein, 50 aa, Zea Mays
MYFPDNLQVTFSPFFTLVGSFLSEVWHLPVHSTDKQCLSMNMRGREPSGG

SEQ ID NO: 226202 - protein, 382 aa, Zea Mays
MPPWPPCLQPTLTTARRATVFSRTRCLSSTPASPTYEQGQHEEEPSLVVVGGGAAGVYASIRAKTLAPHLNVAVVEKGRFLSKVKISGGGRCNVTNGHHLEPMGLARNYPRGNKELRGSFFTAHGPQDTMRWFTDHGVKLKTEDDGRVFPVTDNSASVVDCLLNEARRLGVSLQAGKTVSSASVAQDGKFVLKVEKRTADLVDYINANYILVATGSSQHGYSIAAQLGHSIIAPVPSLFTFKIADKRLADLAGVTFPIVKAKLKLDGVQKSVPELTQVNMPFLFSNWRALREVVNWLYTSLATSDLSLQTGPMLVTHWGLSGPVVLRLSAWGARELHQCNYQGNLMVDFVPDIHIEDVKRVLFHYKDQHAVHFFLCSFSFTH

SEQ ID NO: 226203 - protein, 121 aa, Zea Mays
MQAMRPAAEGEAQEQAVRAEADEVKREVAKAHEEEEAVPEEKDVAVVGEEAEAEAETETEGEAEAEVEVEAEVEVEAEAGASSAKKNRIQVSTNKKPLYFYVNLAKNYDEVELSALGMAIG

SEQ ID NO: 226204 - protein, 140 aa, Zea Mays
MVRSHVSSCFWLGLPISFCKNNLPSKEFRMVLEDEEGLEFDAVYIGNRTGLSGGWRGFAMHHNLEEGDSLVFELAEHDKFKIYIIKAIDDDVKEAEPDDKNDNGVTKEEPDQEESPVAEPPKGAKRRKLRGRRGINTNPS

SEQ ID NO: 226205 - protein, 558 aa, Zea Mays
MVKKPNGVAKATATSADAAAQPSKENPSTPGLVKASKFKKRKVKANRAKQAVAAAAIDEVAPVGAGTGDGDASASAALPQPSDVAEALLVVQTPKSTTFAEASPVAQTQKPATDAEGLVPAPIPTTAVASASSPKPKPAQANADAAAAISASKGNGVGADNSRGDGEMKNKKEREERGDRKVAGFIFMCNAKTKKECYQSRLFGMPSGKIEMVKKIRPGVKLFLYDFDLKLLYGVYKAASHGGLNLVHEAFNGKFPAQVKFKIDKDCRPLPESSLKQAIKENYNAKSKFDPELTTKQVQRLLLLFKPVSAPQSVSNNHLGERRHYEKRRKPRHFEERRPIEAARRPRFDEERRPAVRHVPFEDPYRAPRYAPVPVDSQHGHSLASDHHRYYQPALTPEPRQLPLVLEPRYVPPALDHHHVPELRHAPPAYYRTLAPSGDSYYRSVENLVPERYADRTMADLTTRDPIIRDHTALPGEALARADRLDDLYRSDRVEELYRSDRLVNRAVDRPHPAYFTAAYETNPAYAETSIRPVSARVNGPSAAVSSLYSFSGGPVYR

SEQ ID NO: 226206 - protein, 571 aa, Zea Mays
MVKKPNGVAKATATSADAAAQPSKENPSTPGLVKASKFKKRKVKANRAKQAVAAAAIDEVAPVGAGTGDGDASASAALPQPSDVAEALLVVQTPKSTTFAEASPVAQTQKPATDAEGLVPAPIPTTAVASASSPKPKPAQANADAAAAISASKGNGVGADNSRGDGEMKNKKERAMSDKGKEAVVKKEERGDRKVAGFIFMCNAKTKKECYQSRLFGMPSGKIEMVKKIRPGVKLFLYDFDLKLLYGVYKAASHGGLNLVHEAFNGKFPAQVKFKIDKDCRPLPESSLKQAIKENYNAKSKFDPELTTKQVQRLLLLFKPVSAPQSVSNNHLGERRHYEKRRKPRHFEERRPIEAARRPRFDEERRPAVRHVPFEDPYRAPRYAPVPVDSQHGHSLASDHHRYYQPALTPEPRQLPLVLEPRYVPPALDHHHVPELRHAPPAYYRTLAPSGDSYYRSVENLVPERYADRTMADLTTRDPIIRDHTALPGEALARADRLDDLYRSDRVEELYRSDRLVNRAVDRPHPAYFTAAYETNPAYAETSIRPVSARVNGPSAAVSSLYSFSGGPVYR

SEQ ID NO: 226207 - protein, 345 aa, Zea Mays
MELFERARTVRLRSHHDKYLYADEDEVHVIQDRNAASPNARWVVEPVPHSPGVLRLRGRYGRYLSASNEPFLLGGTGRKVLQTLPHRLDSSVEWVPVRDDAGSNAHARAVRLRTRYGNFLRANAGLPPWRNSVTHDVPHRHTGWVVWDVEIFQALPPPTGPDSSSSSAAAETDADAFASSPAPSSSYNNKAPHSSAPLPTSALRPPPPPAHHREENLVPFKGQPAPPPPGYIAPPAPGFYRLESTDSFSVPLHKVEGRAVHYHIGDSDGEVRPDEEPHYLTFNGTSLEELLERLKEETGLHDVIMCSRSPINGKLLPLRLQLPPNNAAVHIVLVQESSNVAKTFA

SEQ ID NO: 226208 - protein, 749 aa, Zea Mays
MGQRIDINWTEVFGKSSSPDREADVCFASPSSASAAPRTRARALGAAKVLPGDERRRGSPDRHQRKRLGKLRIDDDWSVGGQRHTAVHGDDGARRPRTRGAAKAADGRVQDAHSVSKDVYDFKDEQAERVGNRFCSRLTPIQENKYCQLPLNNLKRQGCAEKRKPISVDKMYSESDRPSSTSSSAKRTHAIDPEVSDHEKCHKTESSHPSRFSKRRKEQLQNSSSVYPRKVQDVVLLDDEDMQPEEEVNCDMSDGQNGPKIYYPSRDNRESVELSRSDIKCLDPGVYLSSPVINFYIQYIKRNRLSSEDFRDKFYIFNTYFYGKLEEALCRQDEFSKLRRWWKGVNILNKAYIILPIHGMAHWSLVIICIPAKESISGPIILHLDSLAMHPSTKILNTVERYLEKEWCQLSSWEDFKNNIHKQSVEVPRQNNEYDCGIFMLYYIERFIKEAPERFTIDKLDMFNRSWFKPEEASGLRRRIRELLLEEFESAKLDDALPGADASERDDSINDGELKPDASSDSSEMVVEVVGGLGGTDKSNEGIKVVASEEASGESGDAGKSTEGTVAASEEKSIEGINVAEPEDACESIGGIYVAESDEASGEFGEIGKTNKGTKVAVSEGASVSGYTDKNMEDISDSEVAVLDKAPTSSYRRGEKTTACVLSEAASLSDSVKDEQGMVKPDSGSSKAEREGDLIVIASPERSEGNDEIIGSMPITDVVCDSCDSDTETKVRIVKIHRRKFVPSCGCSN

SEQ ID NO: 226209 - protein, 569 aa, Zea Mays
MYSESDRPSSTSSSAKRTHAIDPEVSDHEKCHKTESSHPSRFSKRRKEQLQNSSSVYPRKVQDVVLLDDEDMQPEEEVNCDMSDGQNGPKIYYPSRSDIKCLDPGVYLSSPVINFYIQYIKRNRLSSEDFRDKFYIFNTYFYGKLEEALCRQDEFSKLRRWWKGVNILNKAYIILPIHGMAHWSLVIICIPAKESISGPIILHLDSLAMHPSTKILNTVERYLEKEWCQLSSWEDFKNNIHKQSVEVPRQNNEYDCGIFMLYYIERFIKEAPERFTIDKLDMFNRSWFKPEEASGLRRRIRELLLEEFESAKLDDALPGADASERDDSINDGELKPDASSDSSEMVVEVVGGLGGTDKSNEGIKVVASEEASGESGDAGKSTEGTVAASEEKSIEGINVAEPEDACESIGGIYVAESDEASGEFGEIGKTNKGTKVAVSEGASVSGYTDKNMEDISDSEVAVLDKAPTSSYRRGEKTTACVLSEAASLSDSVKDEQGMVKPDSGSSKAEREGDLIVIASPERSEGNDEIIGSMPITDVVCDSCDSDTETKVRIVKIHRRKFVPSCGCSN

SEQ ID NO: 226210 - protein, 145 aa, Zea Mays
MGDVFSVVVLMLQDETAVRLADASIQSPEYRSINVFVDFYSEPEYKFRVDRENFFPRPKVDGAVISFKLKNAEEYPPVSSPKSFFSMVNSAFMGKRKMLRKSLQHICSSSEIEAALDNIGLPVTARPSDLILDDFVRLHNHLAKV

SEQ ID NO: 226211 - protein, 213 aa, Zea Mays
MSKEDVLKVQTLMLRVNIHCDGCEKKVKKTLHKIDGVYQSSIDAEQGKVTVSGLLDPDTIIRKLNKAGKPAQLWGSKPGIPQNAYHGGGKAQKGGAGGGGHKGPGGGGGGGGGVGNPKMVMPQPTPQQLQQLQQQLQMKGLKLPPHLLGGNMPAFPAAAPMKDPESVKFALPEDDFRRLRPRSSTMTSTTASTTTRTTTTTTAWTTTSTATPR

SEQ ID NO: 226212 - protein, 389 aa, Zea Mays
MALLLLLVLLRSAASAGAGAEPHRSPATALFVLGDSTVGCAAATASSILSLNLTTTTTTLPSSLSGEPCLFFHEARLRVPDLLAAKMGLPSPPPISALNGTASAAARGVNFGGGGGQLLFYGGGGGVRGPASVFLTGAVGQQVRLASETLQLLRLEAAAPGEPSSSPAAVFVLSFGADAYARLLARGPAEAAAAAPKHGRRGLARLLADRVARAVSELYEAGARRVAVMGVPPLGCAPRVVWERSSPVRDGGAGCVEEANELIQGYNGRLAARLDELRLALAGADVVFCDVYKGMMEIISNPTTYGFEETREACCGLGPMRATVGCVSKEMACGAPERHVWWDIYSPTEAADALVTNWSWSSDGSGATSICGPISLQQLAAVSPSPPGA

SEQ ID NO: 226213 - protein, 495 aa, Zea Mays
MWDLNDSPAAEAAPPSPSADDSGASSSSAAALVEIPDDADDDSAAAAAEAVVTRQFFPAPAAVGAAPGPGSSSARAGWLRLAAAAPPPAAGGSNGVAQTGGPAAAAAAAGKKSRRGPRSRSSQYRGVTFYRRTGRWESHIWDCGKQVYLGGFDTAHAAARAYDRAAIKFRGVEADINFSLEDYQDDMKQQMGHLSKEEFVHVLRRQSTGFPRGSSKYRGVTLHKCGRWEARMGQFLGKKYVYLGLFDTEEEAARAYDRAAIKCNGKDAVTNFDPSIYAEELEPAASTGGGGDDHNHNLDLSLGSSAGNKRGSLDDGGGGGGGGDDETSDQRVPMAFDVDWQTAAPRSTKAKLDASSKQPQTQMLPPPPPAVLRVAHQLPLPFGPRHPQSQFLSNGGDPGTSGGLSLAIGGAGGGHWPPQLQHLQQQRLHGAWANGGGTSWPPPPHPHPHPHPPPPSTAATAAAASSRFPPYVVTTTQGPAGWAQKNGFHSLARPT

SEQ ID NO: 226214 - protein, 656 aa, Zea Mays
MSSSRFDELPDEFDPTGRFPGSFDDGDPQTTNLYVGNLSPKIMWPRTEEERRRQRNCGFVAFMNRTDGQAAKDEMQGVIVYDYELKIGWGKSVALPSQALPAPPPGHMAIRNKEGGTATVILSGPGGPAVASIKPQTSELVLTPNVPDIVVAPPDDGHLRHVIDTMALHVLDGGCAFEQAVMERGRGNPLFDFLFNLKSKEHTYYVWRLYSFAQGDTLQRWRTEPYIMITGSGRWVPPPLSSNRSPEREKESTFAAGRSRRVEVERTLTDSQRDEFEDMLRALTLERSQIKDAMGFALDNADAAGEIVEVLTESLTLKETSIPTKVARLMLVSDILHNSSAPVKNASAFRTKFEASLPDVMESFNDLYRSITGRITAEALKERVMKVLQVWADWFLFSDAFLNGLRATFLRSGNSGVVPFHSLCGDAPEIEKKGSSEDGNDGFKLNEDGALATGKAAATKELLGLPLAELERRCRHNGLSLCGGKEMMVARLLNLEEAEKERIYEKDVDVKYVQGEQHVVGREDSGVNAHSTSRFGEGSNGDELDVSRNSMRAGKGRSGGSASAELESFPSKKPKYDPVLPASKWSREDDISDDEDRKGGRGLGLSYSSGSDIADGLGKVDTTEASTDHTSHHHDTIVDEEHRCLSVFNIFLPLPC

SEQ ID NO: 226215 - protein, 232 aa, Zea Mays
MASKAIKRRPISAETDTTGEKQMDTALSDPVTEPLLGNTPQEEKSKTYEPITRSGFWDGTAQECLRWTHLLAAFVAQSARNIVNVLSEFGYLLARLFGCSSASKSSQNGQTLPVNLSPLQEERLRLLRQRIDVPYDCSSVKHQDALKELWKLAYPNRQLPPLKSDLWKEMGWQNSDPSTDFRAAGFMSLENLIYFARNYPVCSIHPGFLGDSIVFNAVQLILHAGFLSQATA

SEQ ID NO: 226216 - protein, 693 aa, Zea Mays
MLVIRNEALLLLTYLTRDAEEIQKIVVFEGVFEKIFSIIREEGYSDGGVVVQMLLKETMGFDPLISILKIRRGSAFNFTQQKTVNLLGALNTVELLLMGGPSGEAGKDANKNANQTALAQALRCIGNLVLRNPQNLDSLARKQVGEEPHVQPALNAIFSIILRTSVAQEFVAADYVFKCFCERNPNGQALLASTIVPHPNQGNMHEPAIDMPFGSVLLQALVSSDVNGDMEACCRASSVLSHIVKDNMQSKDRVLQIQLETLTPSLGRTEPVLHRIVTCLSIAASTEGENNQNNQPEEPYIQPVILRLLIIWLVDCSNAVNCLLESAVHLNYIIELASSKRYTACVRGLAAVVLGACILYNASHEKGRDAFAVADAISQKIGLTTYFLRFDELRRSLAHPLPEQHHRKELSRSSANSMSDFQEIEEDETNKDDQHPVLSEIFDSQFVNFLSKLEADIRENIMDIFSRTKTATALLPTELEQKNGEVDGEYIKRLKSFVEKQCNEMQDLLARNAMLAEELVRTGGGTTTDTSQRPNNGRERVQIEALRQELEGARRQIEALETDKSQIEAEANNQRNLAVKLESDLKSLSEAYNSIEQANYRLDAEVKTLRQGGSVPYPDVEAIKAQAKEEAEKDSEAELNDLLVCLGQEQTKVEKLSTRLAELGEDVDALLQGIGDDTAIPDDDDDDDEDSEE

SEQ ID NO: 226217 - protein, 299 aa, Zea Mays
MFDLKSSTWLPLNYKGTGPSPRSNHIATLYDDRVLLIFGGHSKSKTLNDLYSLDFDTMVWSRVKTHGPHPSPRAGCSGTLCGTKWYIAGGASKKKRHAETWVFDVLQCKWSVCVVPPSSSITTKKGFSMVPFYHKDKIALIAFGGNKKEPCNKVEVLVVLQNEHSFSWRSAPEVDTMVYEYSPSNKELADHLHKCAPLYSNSSIARHSLTSVIEHPPRREPLSESLLKQSSLGTSLHTQLDHAEECSLGQKLQKPIDDDRYDDVDDSSSCQDSTIVSYSQKGPTAKGQGLVFRMARKTW

SEQ ID NO: 226218 - protein, 52 aa, Zea Mays
MAAAPVGAQNRCVFVGNIPYDATEEQLVQICEEVGPVVSFSKSRAALVSDMS

SEQ ID NO: 226219 - protein, 360 aa, Zea Mays
MKLKAAETSSNSSHSKRNAIARRSVDSKDRSERPEIRSSRLATGSTAEPLKQAELKAVRNEIKPDPMSTMRAPQVPSMLPFNNLAFGATFGGPASLKPMTMAPMPMAMPMSPAPLTKKPTPAAATPLCGKSDTDNLKMAKQVLNEDISKLQSQVNKLKQKCDAQEEQLQKAERRAEHSASTAAEESSRRNGVLEFIRFLDNELKSIADRVPSDAADGLKALQNHSERFLTEQGVRPLEATGMHRKCASIGNLVMSQDGSAGNASSSAASLASESPCHRIMENSSRANGDLAPKLGGTHGEVQLIEQFEPGVYVTLIQLRDGTKVFKRVRFSKRRFAEQQAEEWWRENQERVFRKYNHPAN

SEQ ID NO: 226220 - protein, 358 aa, Zea Mays
MLAASTKVGSRLASPHASLSAGAAAAALASSPVLGSGMLPGAGFGETGSHHAADAPPALPCSSSGDSREYYQWKRLVNQRQSTLDGGKVPAALGHHVFGAGCSSRNQHIYRYFSSSHQGSIWAGSKVLHDLPGYVKIVEVGPRDGLQNEKDIVPTPVKVELIRRLATSGLPVVEATSFVSPKWVPQLADAKDVMEAVRTMGGVRFPVLTPNLKGFEAAIAAGAKEIAIFASASEGFSKSNINCTIKESIARYNDVALAAKEKEIPVRGYVSCVVGCPVDGPVPPSNVAYVAKELYDMGCYEVSLGDTIGVGTPGTVVPMLEAAISVVPVEKLAVHFHDTYGQSLSNILISLQTNKPLW

SEQ ID NO: 226221 - protein, 89 aa, Zea Mays
MALLKSNDTRALFLMAIVVMAMAIVLTPCPVHGRNDERCTHMPGCTISRCLSQCKQWGYANPVINCWNTPPNTVLDTCCCFSNAARKLA

SEQ ID NO: 226222 - protein, 362 aa, Zea Mays
MRIYSRREQPKSSQNISIYLQRQINTGCCLLLLVKALAAADPPAAPRESKMPVKVFGSPTSAEVARVLACLFEKDVEFQLIRVDSFRGTKRLPQYLKLQPHGEALTFEDGNVTLVESRKILRHIADKYKNQGYRDLFGPGALERASIEQWLQTEAQSFDVPSADMVYSLAYLPPDKYKNQGYRDLFGPSALERASIEQWLQTEAQSFDVPSADMVYSLAYLPPDMQLDGRGGGGLPEATGTTAEGGGDAAAVREEPQAAGQAAGHLRAAPWRGGLPGRRQVHARRPVPPAQRRPPRRRPAVRTPHGVAQERQQVVGHRIPPRLLGQGQGVAAPAVRGGALLMSIDRKLRRWPLLKPTCSVSA

SEQ ID NO: 226223 - protein, 241 aa, Zea Mays
MYGGGGGGGHYDGGSGGAGNANALFGGGGFMPSQSTVVPENSGLSKGRSAQTLLPLTVKQTMDAAQTSGDRSNFAINGVEVSTIRLVGRMLGKVERVTDVVFTLDDGTGKIDVNRWENEASDAKEMADANNENYVIVIGGLKGFQGKRHVVAYAVRRVTNFNEITCHFLHCIQVHMELTGLKVDGNYISNLVLSVFHDPSVMDQEHGLHIKDVIDRLKLPDDVVRTRLAACFPAHRFFKFL

SEQ ID NO: 226224 - protein, 157 aa, Zea Mays
MLVISWHMKAATMCEFTRQEFIGGLQSIGVDSIEKFRGKLPSLRAELKDDNKFRDIYNFAFTWAREKGQKSLSLETAIGMWQLLFAERNWPLLDHWCQFLQVRHNKAISRDTWSQLLEFVKTTDPQLSNYDDEGAWPYLIDEFVEYLTENGLVQRKR

SEQ ID NO: 226225 - protein, 450 aa, Zea Mays
MDDPGASADPAARHHLSPQQLGGQPPVPRSPTPLDLASAAAASGYRRLSPSLRPPAHPQARLSSPYGQIPSPGAGAHHARSLSQPLFFSLDSLPPPPYADLGAAPAVPPSPPPSTSDPPPLGLPPRRAGHRRSQSDIPFGFAQLSPPLPPPAPVKREVTAAADGCRSDGGGGDDAALYDLVNAYMDLDGLDPLNSSEDRHDDRDSRASGTRAGSAAESSENEAESQSTSADRKDGGKSRHCRSLSIDSFMGKLSFAAGEESPKLPLPSPGGSLTRSGSGSLEGGAVALFNMEFTNGEFTDSEKKKIMANERLAEIALTDPKRVKRILANRQSAARSKERKMRYIQELEHKVQVLQTEATTLSAQLTMLQRDSAGLATQNNELKIRLQAMEQQAQLRDALNEALTAEVQRLKLATGEVTDGRMPKGLQQQMNSQMLQIQQLQVQQQPQKSA

SEQ ID NO: 226226 - protein, 419 aa, Zea Mays
MGSRFASHQLSNGLYVSGRPEQPKEKAPTICSTAMPYTGGDIKKSGELGKMFDLHVEKSRKSGPLGNAPSRNTSFGGTASNSGPVSNAGGRSNYSGSLSSSVPGAGGSARAKSNSGPLNKHGEPTKRSSGPQSGGVTPMARQNSGPLPPVLPTTGLITSGPISSGPLNSSGAPRKVSGPLDSAASMKMRATSFAHNQAVTNLNTEDGYSIQGSFPKPILWAVILLFVMGFIAGGFILGAVHNAILLIVVVVIFGFVAALLIWNACWGSRGGIGFVSRYPDADLRTAKDGQYVKVTGVVTCGNFPLESSFQRVPRCVYTSTGLYEYRGWDSKAANTEHRRFTWGLRSMERHAVDFYISDFQSGLRALVKTGYGARVTPYVDESVIIDIDPDNKDMSPEFLRWLRERNLSSDDRTMRLKEG

SEQ ID NO: 226227 - protein, 885 aa, Zea Mays
MPTWWGKSSSKDVKKTTKENLIDTFHRLISPNEQKGSTKSKRNCRRGNNTAAEKVCKSTTVSRPTSPSKEVSRCQSFSADRLHAQPLPIPGVRPRVTRAVADVNVSKPILEKRGKPPLLLPLPKPNPLHRGPGSSDIPSEIVVASVSSNCSADSEDRADSQLQSPVGNDTNNVKKVSSKNKSSNVCKDHSGAITTKTTKEILKPAANAFLSNHTQSAPPRGISADNNQLNLQNPQPVVFESAPNSLMSSPSRSPRPICPDHILTSAFWAVKPHADVTFLGSGQCSSPGSGQTSGHNSVGGDMLSQLFLQPTRGSPECSPVPSPRMTSPGPSSRVHSGSVSPLHPRSGGLAPESPTSRHDGGKKKQTHKLPLPPLSIAHSPFFPNNSTPSSPISVPRSPGRTENPSSPASRWKKGKLIGRGTSGHVYVGFNSGEMCAMKEVTLFLDDPKSKESAKQLGQEISLLSRLRHPNIVQYYGSEMVEDKLYIYLEYVSGGSIHKLLQEYGQLGEPAIRSYTLQILSGLAYLHAKNTVHRDIKGANILVNPSGRVKLADFGMAKHINGQHCPFSFKGSPYWMAPEVIKNSNGCNLVVDIWSLGCTVLEMATSKPPWSQYEGIAAVFKIGNSKELPPIPDYLSEHCRDFIRKCLQRDPSQRPTAVELLQHPFIQNGISLEKSVTPNHLEHLAAISCRTKPKVAVQTRNASLGFEGQTIYQRRGVKLSSKHSDIHIRSNTSCPVSPCRSPLLKARSPQHTSGKMSPSPISSPRTTSGTSTPLSGGNGAIPFNHLRYATYSSEGFGTTSRGLDDHFSNCHKDLNLGHFAEAHQVSQGPRERVVSEADILSPQFRKKLGNVFDLRERLSPSEHFTRRALVDHVELNPSNPGLKRGK

SEQ ID NO: 226228 - protein, 78 aa, Zea Mays
MALDVAKGMNCLHTSMPTIVHRDLKSPNLLVDNNWNVKVCDFGLSRLKHSTFLSSKSTAGTPEWMAPEVLRNEQSNEK

SEQ ID NO: 226229 - protein, 582 aa, Zea Mays
MYAMVRLGPFIQAEWNHGGLPYWLREIPDIVFRTNNEPYKMHMETFVKIIIKRLKDANLFASQGGPIILAQIENEYQHMEAAFKDEGTKYINWAAKMAISTNIGIPWIMCKQTKAPSDVIPTCNGRNCGDTWPGPTNKSMPLLWTENWTAQYRVFGDPPSQRSAEDIAFAVARFFSVGGTLANYYMYHGGTNFGRTSAAFVMPKYYDEAPLDEFGLYKEPKWGHLRDLHQALKLCKKALLWGTPSTEKLGKQLEARVFEMPEQKVCVAFLSNHNTKDDATMTFRGRPYFVPRHSISVLADCETVVFGTQHVNAQHNQRTFHFADQTAQNNVWEMFDGENVPKYKQAKIRLRKAGDLYNLTKDKTDYVWYTSSFKLEADDMPIRSDIKTVLEVNSHGHASVAFVNNKFVGCGHGTKMNKAFTLEKPMDLKKGVNHVAVLASSMGMTDSGAYMEHRLAGVDRVQITGLNAGTLDLTNNGWGHIVGLVGERKQIYTDKGMGSVTWKPAMNDRPLTWYKRHFDMPSGEDPVVLDMSTMGKGMMFVNGQGIGRYWISYKHALGRPSQQLRTTCWCCSRRSSGGRTRS

SEQ ID NO: 226230 - protein, 414 aa, Zea Mays
MYAMVRLGPFIQAEWNHGGLPYWLREIPDIVFRTNNEPYKMHMETFVKIIIKRLKDANLFASQGGPIILAQIENEYQHMEAAFKDEGTKYINWAAKMAISTNIGIPWIMCKQTKAPSDVIPTCNGRNCGDTWPGPTNKSMPLLWTENWTAQYRVFGDPPSQRSAEDIAFAVARFFSVGGTLANYYMYHGGTNFGRTSAAFVMPKYYDEAPLDEFGLYKEPKWGHLRDLHQALKLCKKALLWGTPSTEKLGKQLEARVFEMPEQKVCVAFLSNHNTKDDATMTFRGRPYFVPRHSISVLADCETVVFGTQHVNAQHNQRTFHFADQTAQNNVWEMFDGENVPKYKQAKIRLRKAGDLYNLTKDKTDYVWYTSSFKLEADDMPIRSDIKTVLEVNSHGHASVAFVNNKFDVGTGPR

SEQ ID NO: 226231 - protein, 456 aa, Zea Mays
MLWIENEYQHMEAAFKDEGTKYINWAAKMAISTNIGIPWIMCKQTKAPSDVIPTCNGRNCGDTWPGPTNKSMPLLWTENWTAQYRVFGDPPSQRSAEDIAFAVARFFSVGGTLANYYMYHGGTNFGRTSAAFVMPKYYDEAPLDEFGLYKEPKWGHLRDLHQALKLCKKALLWGTPSTEKLGKQLEARVFEMPEQKVCVAFLSNHNTKDDATMTFRGRPYFVPRHSISVLADCETVVFGTQHVNAQHNQRTFHFADQTAQNNVWEMFDGENVPKYKQAKIRLRKAGDLYNLTKDKTDYVWYTSSFKLEADDMPIRSDIKTVLEVNSHGHASVAFVNNKFVGCGHGTKMNKAFTLEKPMDLKKGVNHVAVLASSMGMTDSGAYMEHRLAGVDRVQITGLNAGTLDLTNNGWGHIVGLVGERKQIYTDKGMGSVTWKPAMNDRPLTWYKLVCVRARAI

SEQ ID NO: 226232 - protein, 648 aa, Zea Mays
MHVDMSHRVRLAAAALVAVAALALALAPGAAAKWQRTRNGTVVSYDRRSLMFDGHREIFLSGSIHYPRSPPDMWPELIAKAKEGGLNTIETYVFWNIHEPEKGEFNFEGQNDVVRFFQLIQEHDMYAMVRLGPFIQAEWNHGGLPYWLREIPDIVFRTNNEPYKMHMETFVKIIIKRLKDANLFASQGGPIILAQIENEYQHMEAAFKDEGTKYINWAAKMAISTNIGIPWIMCKQTKAPSDVIPTCNGRNCGDTWPGPTNKSMPLLWTENWTAQYRVFGDPPSQRSAEDIAFAVARFFSVGGTLANYYMYHGGTNFGRTSAAFVMPKYYDEAPLDEFGLYKEPKWGHLRDLHQALKLCKKALLWGTPSTEKLGKQLEARVFEMPEQKVCVAFLSNHNTKDDATMTFRGRPYFVPRHSISVLADCETVVFGTQHVNAQHNQRTFHFADQTAQNNVWEMFDGENVPKYKQAKIRLRKAGDLYNLTKDKTDYVWYTSSFKLEADDMPIRSDIKTVLEVNSHGHASVAFVNNKFVGCGHGTKMNKAFTLEKPMDLKKGVNHVAVLASSMGMTDSGAYMEHRLAGVDRVQITGLNAGTLDLTNNGWGHIVGLVGERKQIYTDKGMGSVTWKPAMNDRPLTWYKLVCVRARAI

SEQ ID NO: 226233 - protein, 472 aa, Zea Mays
MPFLSTPSFDLSAGAEPTLGPRSAAPPPPPTAAAHHQPPVSEAAARRLREAEERLREAIEELHRHQGGGVKGDGDEQREGERGCGHDGESCAAHAAGNLCQSFLLSYGVRVGIGILLRAFKLVRRRSYGSLLDLKCAYNSAKSKNKFHFWGSHWRHGDALLFSLACAQVMYAFVMRPESLPKSYQEFILKTGPVAEPVYKVVKECCRGGPVDLTALSAHLSNKRNPDLINLTTNPSIIPCSVIHPDRASCLAQNVNVVSSTFKKTFPLYFSLTFVPFVVLRLQKFLESPTTTCWRALVGAVRSTTFLSAFVTVFQAAICLHRKVANKDHKLVYWFAGLMSGLSILLEKKARRAELALYVLPRAGDSLWYILINRHLLPNIKNAEVALFCMCMGGIMYFLEYEPDTMAPFLRGLIRRFLASKISNPSPPPPNRNASYSYLQTLNALDQSRTQPGVDNGLTTSEKYNLESIPGL

SEQ ID NO: 226234 - protein, 88 aa, Zea Mays
MGYPRVADFGLAKYQAAEVTPVSTRVIGTFGYLAPEYAATGKISDRSDVFSFGVMLLELITGRKPIMASSEFQSVALVSWRQFLCSST

SEQ ID NO: 226235 - protein, 64 aa, Zea Mays
MVRLGARWCGGSPTGSGTATPPNRTRPASSRHLVGNLCSSTPRSARADRSAQSPGRRSKDGYDA

SEQ ID NO: 226236 - protein, 302 aa, Zea Mays
MARTARYPNRPRIAVAAVPPAAAEALSLFLSSFAPLPRPTMELCLAARAGTTAAACRRRAPTTTGVPKKKRHGGGTVRVRCAATAPMGEKTEYRDGPLERAFMGLFARKMEKYAAKKPAAQAKEERAVWEWDYESFVDVSRRVMLGRTRAQQQQAVREVLLSMLPPGAPAQFRRLFPPTRWACEFNAALTVPFFRWLVGPSEVVEVEVGGVRQRSGVRIEKCRYLESSGCVGMCVNMCKVPTQDFFTNEFGLPLTMNPNMSCEMIYGQVPPPLEEDPASKQACYPSLCSMSTPSAPACPKLQ

SEQ ID NO: 226237 - protein, 531 aa, Zea Mays
MLLPILCSSYGTRHLPLLQCFHPISFWRCCSCEEAKLSGSYACAENAYCYNSSNGIGYRCNCSSGFEGNPYLQGPNGCTDINECITRNPCTNRCSNTIGGFQCTCPAGMSGDGLKEGSGCNGVSTLVIAIVAGLALLVLLLILGFWTHWLVKKRKLAKTRQRYFMQNGGLMLKQQMFSEEAPLHIFTSSELDKATSNFSDDNIVGRGGFGTVYRGILSNQVVVAIKKAQRVDQTQTEQFINEMIILSQANHKNVVQLLGCCLETEVPLLVYEFITNGALFHHLHNTSVPMSWESRLSIAVETASALAYLHLAAKMPIIHRDVKSSNILLDDNFTAKVSDFGASRPIPHNQTHVTTLVQGTLGYMDPEYFQTSQLTEKSDVYSFGVVLIELLTRKKPIMDDIAEDIRSLALQFSMLFHGNKLLEIVDPVVAEEAGVRHVETVSKLALRCLRLKGEERPRMIDVAIELEALRRLMKQHFILKNESLLQESCCNEEMSIDAPSSLFLGVDGISDDEGMEIIPLTCPSKILTSYP

SEQ ID NO: 226238 - protein, 383 aa, Zea Mays
MAAALAAMVVLALRTVAGAASTPAAAAATTSRSPVIYIFGDSMSDVGNNNYLLLSLAKCNYPWYGIDYKNGYPTGRFTNGRTIGDIMAAKFGSPPPVPFLSLYMTDDEVLGGVNFASGGAGLLNETGIYFVQYLSFDSQISSFEQIKNAMIAKIGKKAAEETINGAIFQIGLGSNDYVNNFLRPFMADGIVYTHDEFIGLLMDTIDRQLTRLYKLGARHIWFSGLAPLGCIPSQRVLSDGGGECLDDVNTYAIQFNAAAKDLLEGLNAKLPGARMYLSDCYSIVMELIDHPEKHGFKTSHTSCCDVDTTVGGLCLPTAQLCADRRDFVFWDAYHTSDAANQVIADRLFADMVGSGAVVPRNGTSPPRVVSAPAPAHASPARMP

SEQ ID NO: 226239 - protein, 259 aa, Zea Mays
MAVPMSAIESAWQLLIANFTEFQLATVITFLLHETVFFLSGLPSLLFERFGLFAKYKIQKRSNTSAYQNRCVLRLILYHVSVNLPVMILSYPAFKFMGLRSSLPLPHWTVVVSQVLFYFVLEDFIFYWGHRALHTKWLYKHVHSVHHEYATPFGLTSEYAHPAEILFLGFATVVGPALTGPHLFTLWLWMVLRVLETVEAHSGYHFPWSPSNFLPLYARTSMTTITECCTQSQGTMPRHLFTWTGCSGRTMVIARQRDH

SEQ ID NO: 226240 - protein, 343 aa, Zea Mays
MPSFLQSAKIKIGINGFGRIGRLVARVALQSDDVELVAVNDPFISTDYMTYMFKYDTVHGQWKHHEVKVKDSKTLLFGEKEVAVFGCRNPEEIPWGSVGAEYVVESTGVFTDQEKAAAHLKGGAKKVVISAPSKDAPMFVVGVNEKEYKSDINIVSNASCTTNCLAPLAKVINDKFGIVEGLMTTVHAITATQKTVDGPSSKDWRGGRAASFNIIPSSTGAAKAVGKVLPVLNGKLTGMSFRVPTVDVSVVDLTVRLEKSATYDEIKAAVKAEAEGSLKGILGYVEEDLVSTDFQGDSRSSIFDAKAGIALNGNFVKLVSWYDNEWGYSTRVVDLIRHMNSTN

SEQ ID NO: 226241 - protein, 362 aa, Zea Mays
MIRVSPLLLARPLRVHCPTPSRLSRPPLHHPNPHPRSGEGGLGCVQAKGTRRRCRASLSVPIAAQMDPSSEPLYAQVEPYDSGFLKVSDVHTIYYEQSGNPQGHAAVFLHGGPGAGTSPGNRRFFDPQFYRIVLFDQRGAGRSTPHACLEQNTTWDLVADIEKLREHLGIPEWQVFGGSWGSTLALAYSQEHPDKVTGLVLRGIFLLRKKEFDWFYEGGAAAIFPDAWEPFRDFIPEDERNCFVDAYNKRLTSSDPIVQVEAAKRWTMWEMMTAQLIQNNDNIKRGEDDEFSLAFARIENHYFVNKGFLPSDSFLLDNVDKIRHIKGFIVQVVADAGHSANEVGIAAELRSATDKLRDLLRK

SEQ ID NO: 226242 - protein, 267 aa, Zea Mays
MLAGLSEPIVVAKVNADKYRKLGSKYGVDGFPTLMLFIHGVPIEYTGSRKADQLVRNLKKFVAPDVSILESDSAIKNFVENAGTSFPMFLGFGVNDSLIAEYGRKYKKRAWFAVAKDFSEDVMVAYEFDKVPALVAIHPKYKEQSLFYGPFEENFLEDFVRQSLLPLVVPINTETIKMLNDDQRKVVLTILEDDSDENSTQLVKILRSAASANRDLVFGYVGIKQWDEFVETFDVSKSSQLPKLLVWDRNEEYELVSTVSSVINSIF

SEQ ID NO: 226243 - protein, 638 aa, Zea Mays
MVRDDRRHWRQRALPAPQALAVSWAVRRTRRKPTEGLFGFRRIMEAEFMGMFLPVFGSMLRRVVSEEVEKAMFRQFSAQPAPRRLLVDRNQHPRYQLMFLNGLRPVYTMTKLEPDDGKALKVAVVERLENGRTDIVRYGPLSSARVEVVALHGNFNAKDEESWSPEEFQKHIVSGREKSAQLLTGNLALKLSGGEAVLENATFTDNSSFTSTKMFRLGLRLVGSSGERVLEGVTKPFRVKERRVEGFEKHYPPMLDDEVWRLKKIGKIGAYHQALSDNGIDSVQEFLRAYMKDEQKLIKIFNKMPQSTWKSIVEHAMTCRVGDSLYLYEAQDKDAGLFFDELYQLVGAKFGDCYKPIDQLNEIEKNLVEALKHGAYQNIDGLQPNYKMVNNYPVLSSFPAAQGTSLFSALHPNQQALSYGDSSTGVGFGTRPSRETFNTSLGSSNEPQTSNYMELRHEQTINRVLPYDPSNGTLLPRPRITQLQIPNSERTFFGPPAVIPNNILVGHGVALSEGSHSGFPVHSLSSTDVVMSLMQSPFQLPTNSDHSEQQCNGQTSTQLQQFVTGCQPSRTNSFDLNSCDELIQNFISQISNSGGASTPLSPRKWVKIRAALKLASVGRLSRRGPHCNPPRPRLVPIP

SEQ ID NO: 226244 - protein, 184 aa, Zea Mays
MAATGQEGDDVDHYEAQRMAADIERELAAFRAAKQASAFGATSTSAHGDKKGGTPQDGVKTDKGKILKVSWDGSADSYSAAKLEEIFQKFGKVEDIVIKTRKSRSKGSAIVVMGSKEAALLAIQNHFSLFPLNVAPVQESGGLSTRPTETYESRTNNTDGTGFNDLEASVFRKLREAQKRKHFG

SEQ ID NO: 226245 - protein, 295 aa, Zea Mays
MPAHYLLPVHNDEFSARLSMNSVIRLRSSAVKALSKGTSPNSAKVGKLVGGIMSAQTDDKDALDHCASADALQTVSEAELSNDQAHGRNPVHTIKGGLFLFGQAISCLINTPKHRVNSTAAINYELGRSRITTVSDGRKSVVASCGFMDVSHRGEGNPHINSHFLEDGLFECGGGHISPHSNDGPGLTSASDGCIITISSSEGQSPEVYLPGLVVHVVPVKKGASPLQNTIVTRQKNKSYKALIARRRDFMDLVVTHHMFLDHLPWRCHYAMQKVIETRKRDQLASDLSTAEEAV

SEQ ID NO: 226246 - protein, 55 aa, Zea Mays
MGSPLGGWPSYNPHNFSQLVPADPSAQPSNVTPATYVATHRTDPPPNQDYCGLNR

SEQ ID NO: 226247 - protein, 126 aa, Zea Mays
MTVNGKVTLKDKYSVTVVYDNQFFALRKKCCPSELAYITSLSRCKKWNAQGGKSKAYFVKTTDDRFIIKQINKTEFESFIKFAPDYFKHVYHSLDTGSQTCLAKILGIYQVKQIKHGKEIKIMLRT

SEQ ID NO: 226248 - protein, 357 aa, Zea Mays
MEDVDDNEPTRKKDHRRVPSTIAIEEVKAAALKGEAPPGLPLKGVAQSTQNLDPKATDGGDPKPTDALAGELWAVKRERIRRSSVHGKSPGWDLRSIIVKSGDDCRQEHLAVQLVAHFYDIYQEAGLPLWLRPYEVIVTSAYTALIETIPDTASIHSVKSRFPNISSLRDYYVAKYEENSPNFKLAQRNFVESMAGYSILCYLLQVKDRHNGNLLIDEEGHIIHIDFGFILSNSPGGVNFESAPFKLTRELLEVMDSDAEGTPSEFFDYFKVLCIQGFLTCRKHAERIILLVEMLQDSGFPCFKGGPRTIQNLRKRFHLSLTEEQCVSLVLSLISSSMDAWRTRQYDYYQRVLNGIL

SEQ ID NO: 226249 - protein, 1149 aa, Zea Mays
MVRLLGLRSLSFGPEDSPREIPSTADVAPPVGSSGWLVRFFDSAFFCEWIAVSYLYKHDHAGVRDYLCNRMYTLPLPGLEAYLFQVCYMLVHKPSPSLDRFVIDTCAKSLRIALKVHWLLAAELELEDADDLDGIDKVQEQCQVAATVQGEWPPLVRPSPPSPAASPRGNPMLSRIRSSKQRLLSLASSPSLGLSPPAGGGVNVAEDAMGTGGKQPATPSSEDNKLLKRLSIGPKMRDALLFRRSGEKDEEQDRDGFFKRLLRDSRDKEEEDGDREGFFKRLLSREKDNEEEESDRDGFFRRLLRDSKEEDMELTPSSDGLLKRLFRDKEDRQGEDDEKEGFFRRMFKDKNEERRDSSHARHGNEERLGKSVEDDDREGFFRKIFKDKNEERKDEGHQKPDEREKVGANIEDDKRDGFFRQLFKEKNDEKKEGSTPSKKEEDDKGHKNADDDNFFRRLFKDKNEEKKGIVHDRNEDDKCEEGDKENFFRKLFKDKHEERRTEGPDKNDDYGKGSSGIEEEDNPEFLSFRRLFRVHPEDSKSGHIESSQSNNLSEGSPGSESFFKRLFRDRDRSLEDSEIFGSKMAKEKHPGTTGINEKQSGKPPLPINAVAELRKGVCFPMGKGIYRVVHIPEDESVLLNSREKAPYLICVEVLKAEAPSHSKGSSDGHKLSKGGIPLANGDVQLPKPPPWAYPLWSRHETQNYETDRMLKSTSQVIDQAMAQLWETKVKFVNVSFSIEKLGRSRSIVLSETGRRLRHDATDSHDPPGDSQTVADQPIEWVKVTLSAVPGVNMEDVDDNEPTRKKDHRRVPSTIAIEEVKAAALKGEAPPGLPLKGVAQSTQNLDPKATDGGDPKPTDALAGELWAVKRERIRRSSVHGKSPGWDLRSIIVKSGDDCRQEHLAVQLVAHFYDIYQEAGLPLWLRPYEVIVTSAYTALIETIPDTASIHSVKSRFPNISSLRDYYVAKYEENSPNFKLAQRNFVESMAGYSILCYLLQVKDRHNGNLLIDEEGHIIHIDFGFILSNSPGGVNFESAPFKLTRELLEVMDSDAEGTPSEFFDYFKVLCIQGFLTCRKHAERIILLVEMLQDSGFPCFKGGPRTIQNLRKRFHLSLTEEQCVSLVLSLISSSMDAWRTRQYDYYQRVLNGIL

SEQ ID NO: 226250 - protein, 172 aa, Zea Mays
MELMLARLPCVVAYQAHFITECFIHLRKKINFISLPNILLNSLVVPEILFGACTAKNLAAKLSEVISNDQIRQMQIESAGQVFRVLYEPIKKRDTLLREEIDYSGLSSNFLSPSMIAALTVLYMDKHQNTACRNLVVESEAKKSLVLPTWSGFHACCSCTTGVTRQQATGYV

SEQ ID NO: 226251 - protein, 964 aa, Zea Mays
MVHSAYDAVELVADVPGHIEAVASHAGKLLVAVSDTEGFLWGSDCSLRIYSAPSPSDGGGEIRWDGPYALERQEPRFWRRPPLAMEVSASRDLLISLSEWIALHRLPGLETVAVVSSKTKGANVFAWDERRGFLAVGRQKRLTVFRLDSGREFVEVKEFGVPDILKSMAWCGDNICLGIRREYMIINSMTGALTEVFSSGRIAPPLVVPLLTGELILGKDNIGVFVDQNGKLIQDGRIIWSDTPASVVIHKPYAVARLPRHVEIRSLRPPNALVQTVVLRDVQKLVQTDHCILAALSNSVHGLLPVPIGAQIVQLTASGEFEEALALCKLLPPEDSNLRAAKESSIHIRYGHFLFDNGSYEEAMEQFSDSHVDITYVLSLYPSIVLPQTNIIGDHDKLLDMPELARESSDVTDEMESYSLQLQEPDDKSPLEVKKMSHNALAALVKYLQKKRSGIIERATAEVTEEVVSGAVHHSLKLSEPYKSKKLSKKRAQTHTSSIAREMATVLDTCLLQALILTGQSSGAIELLKGLNYCDLKICEEFLKERREYMVLLELYKSNEMHRDALQLLNQLVEESKSEMENTYFNKKFNSQMILEYLRPLCRSDPMLVLESSLYVLERNPSETIELFLSENVPADLVNSYLKQHAPNLQSTYLELMLSMNDTGINPNLQNELVQLYLSEVLDWYKILKEEGNWTEKTYSPTRKKLISTLESNSGYNTDALLKRLPQDALFEERAILYGKINQHLRALSLYVHKLQMPERAVAYCDRVYEEREQQPSKSNIYFNLLQIHLNPRKAEKEFEQKIIPVASQYSGIQKASATKPKGGRVGKKVVEIEGADDIRFSPSGTDSGRSDGDGDDVNDRGPIMLNEALELLSQRWDRINGAQALRLLPRDTKLQDLVSFLEPLLRNSSEHRRNYLVIKNLILRANLQVKEDLYNRCQAVVKIDGDKSQQIKAVRGANSVKRR

SEQ ID NO: 226252 - protein, 379 aa, Zea Mays
MDGLVKCEKWIRDDEGRSEESKTSWWLNRLIGRTKTVSVDWSYPFVEDRLFVLTLTAGFEGYHVNVDGRHVTSFPYRTGFVLEDATGLSLDGDLDVQSVFAGTLPTTHPSFSPQKHLEMLPSWQAPPLPDEPVEIFIGILSAGNHFAERMAVRKTWMSAAQKLPNVVARFFVALHGRNEINAELKKEAEFFGDIVIVPFMDSYDLVVLKTIAICEYGVHVVYARYIMKCDDDTFVRLDSVIAEVKKIQNGESLYIGNMNYRHKPLRDGKWAVTYEEWPEEDYPIYANGPGYVISSDIADSILSEFLNLKLRLFKMEDVSMGMWVERFNSTRLVKYVHSVKFCQFGCIDDYYTAHYQSPRQMLCLWDKLQAGKAQCCNMR

SEQ ID NO: 226253 - protein, 339 aa, Zea Mays
MAEHLISTADHDRLPDSYVRPETQRPRLREVVPDAEIPVVDLADPDREAVVARVAEACRTHGFFQLLNHGVPEQLTAAMMSVAYEFFRLPAEEKAKLYSDDPAKKMRLSTSFNVRKETVHNWRDYLRLHCHPLEQYVPDWPDNPPSFRRTVSAYCSAVRELGFRLYVAISEGLGLDGAYIKEALGEQEQHMAVNFYPRCPAPELTYGLPAHTDPNALTILLMDQQVAGLQVLKDGRWIAVNPRPGALVVNIGDQLQALSNGRYRSVWHRAVVNADRPRMSVASFLCPCNDARIGPAARLLTDGTPAVYRDYTYAEYYAKFWSRNLDQEHCLELFRTPTS

SEQ ID NO: 226254 - protein, 51 aa, Zea Mays
MPHRIFYDMAIFIIKYVKLVSLSYNYANIFLMYCKARETTVESNFVSSPSI

SEQ ID NO: 226255 - protein, 228 aa, Zea Mays
MQNLSVAYRLRGTARGLEYLHEHCNPKIIHRDVKAANVLLDEDFEPVVGDFGLAKLVDVQKTSVTTQVRGTMGHIAPEYLSTGKSSERTDVFGYGIMLLELVTGQRAIDFSRLEDEDDVLLLDHVKKLQREGELDSIVDSNLNQNYDGEDIEMIIQIALLCTQASPEDRPSMSEVVRMLEGEGLAERWEEWQHVEVTRRQEYERMQRRFDWGEDSFYNQEAIELSAGR

SEQ ID NO: 226256 - protein, 544 aa, Zea Mays
MGGCFSVHGDVRGGMEGVGGGARTQGGAASSSAQQGGPNDAVDYFFQTRGLRGLYTPIELSFSASKLRNTDSFSKSDPMLVVYTNIKGKLEEIGRTEVILNSLEPSWITKVTMSYQFEIVQPLIFRIYDVDTKYHNTPVKTLNLTQQDFLGVACCNLSEIVTKFNRSLTLNLQSDCGHGLHGTMTVHAEESDSSRMAVEMTLRCVNLENKDVFSKSDPFLRISKLVETAGPIPICKTEVVPDNLNPVWRPITLTSQQYGSKDNPLLVECFDFNSSGDHELIGAFQTTITQLENLYTSKSAAIFYNHKGQRKMKEQLFVDKFQETVQHTFLDYISSGFELNFMVAIDFTASNGDPRVPQSLHYIDPSGRPNSYQQVVGVEGIMSAYTSSLYSVSLAGPTMFGPVINKAADIASQSLQYSNNKYFVLLIITDGVLTDIQETKDCIVRASDLPLSILIVGVGNADFKQMEILDADNGKRLESSTGRIATRDIVQFVPMREVQGGEISVVQSLLEELPGQFLQYMRTRGIKPQRAPGLASAPVYPPQQ

SEQ ID NO: 226257 - protein, 362 aa, Zea Mays
MPPSPIGCTSRAATASSSRQAKEDDGASRNVSGFEPSIWGDFFLTYSSPLATSSLHKAWMVHRAEQLKEEVAAKLVAASSACSLHRRIHLIHVLERLCLDHLFEDEISDMLARMNDVDVSGCDLQTVAMWFYLLRKHGYSVSSDVFAEFRDEQGGGFTANSARDLLSLHCAACLATRGETILDEAISFTAKSLKSTAPYTGAASLACEIKRALEIPLPRRVRIYEAKSRIAEYGREAEADELVMELAKLNYNLVQLQYQQELKIITRWWNGLELQSRLSFARDRVVECYFWIVGVYFEPSYSRARIILTKVIAIVSLLDDTYDVYGTPQECELFTECIESCWRSSREHEVHFWKNFGYLPKH

SEQ ID NO: 226258 - protein, 446 aa, Zea Mays
MVVHKDRKMVAAASTTQAHWQMTGSSYACTCTAFRSISTKLAARSSAGRRSRGRRSAVDPSAGGPPLPPPPVVIAGAVASPGKRMPPSPIGCTSRAATASSSRQAKEDDGASRNVSGFEPSIWGDFFLTYSSPLATSSLHKAWMVHRAEQLKEEVAAKLVAASSACSLHRRIHLIHVLERLCLDHLFEDEISDMLARMNDVDVSGCDLQTVAMWFYLLRKHGYSVSSDVFAEFRDEQGGGFTANSARDLLSLHCAACLATRGETILDEAISFTAKSLKSTAPYTGAASLACEIKRALEIPLPRRVRIYEAKSRIAEYGREAEADELVMELAKLNYNLVQLQYQQELKIITRWWNGLELQSRLSFARDRVVECYFWIVGVYFEPSYSRARIILTKVIAIVSLLDDTYDVYGTPQECELFTECIESCWRSSREHEVHFWKNFGYLPKH

SEQ ID NO: 226259 - protein, 64 aa, Zea Mays
MNQKAACRRVGNKVRMADAHPQQRAAARWRSQSSCDEEDLLASHEFDCPVLHLYDMLHPPLGQN

SEQ ID NO: 226260 - protein, 143 aa, Zea Mays
MAEKGCLKRLQKEYHALCKEPPPQIVARPLPNDILEWHYVLEGSKGTPFEGGYYYGKLKFPPDYPFKPPSISMTTPSGRFAPHKRICLSMSDFHPESWNPMWSVASILTGLLSFMMDDALTTGSIKTSDAEKRRLAKASLAYN

SEQ ID NO: 226261 - protein, 79 aa, Zea Mays
MRLPQHTERAGSPKTCSIFQAWLPRHLRCPGPVSQLLVLCAVPGCPRRRCHGHLIGSGYRRCPHRGRRNPRQATQLLSY

SEQ ID NO: 226262 - protein, 80 aa, Zea Mays
MILKAGIKTGYERGVRQPSGIILRRSSHAGRENPRTPAPPIHSGTVAHVRSDRDGTAGPGPGLRPVLWRGTAGEIFVTTP

SEQ ID NO: 226263 - protein, 329 aa, Zea Mays
MACILIGNLGASVTEVVSDAVVTEFSRTQKAGVLQSYAFVALAAGSLLGNLSGGYILLKTQEPKIMFTAFSVLLGFQLALSLSTKETLPSSRGNSRNRLVKSSLAANFRKQFSNLMTAIREERILYPLAWIMTSFAVVPVLSGTMFCFQTQYLNLDPSVIGLSKVVGQVMVLSLTVLYNRYLKRIPLRCLTTGLQILYALAVLSDLILVKQVNLVLGIPNEIHVLCFSALAEALAQFKVLPFSVLLSSLCPPGCEGSLFAFFTSGLVLSAILSGVFGVGLSTLIGVSSVDYSSLPLGILLQSLAALLPLGWISFVPEKWTADDTVVIKR

SEQ ID NO: 226264 - protein, 299 aa, Zea Mays
MHSHWKSRSICHRSRSLLGNLSGGYILLKTQEPKIMFTAFSVLLGFQLALSLSTKETLPSSRGNSRNRLVKSSLAANFRKQFSNLMTAIREERILYPLAWIMTSFAVVPVLSGTMFCFQTQYLNLDPSVIGLSKVVGQVMVLSLTVLYNRYLKRIPLRCLTTGLQILYALAVLSDLILVKQVNLVLGIPNEIHVLCFSALAEALAQFKVLPFSVLLSSLCPPGCEGSLFAFFTSGLVLSAILSGVFGVGLSTLIGVSSVDYSSLPLGILLQSLAALLPLGWISFVPEKWTADDTVVIKR

SEQ ID NO: 226265 - protein, 67 aa, Zea Mays
MAWKNERTKVLRRRGQNLQLGRSGSFGSTCCVQYANSNDGPAVWSKWDDLLGKLHSKRLSLKQCDSS

SEQ ID NO: 226266 - protein, 79 aa, Zea Mays
MLSTNMRTAQKCIQELKTCTEIITAVQGTGPCEGTFTQKRLDPANHTRWSRCCASKISMGKKPNQTLANCITTTMKHLI

SEQ ID NO: 226267 - protein, 454 aa, Zea Mays
MDINCGSFLVRHTKSAIEKGKIQEEDIDRALFNLFSVQLRLGIFDKPSNNQWFSQLGPNSVCTKEHRELAAEAVRQGAVLLKNDHNFLPLKRSEVRHVAIIGPSANDAYAMGGDYTGVPCNPTTFLKGIQAYATQTSFAPGCKDASCNSTDLFGEAVEAAKRADIVVVIAGLNLTEEREDFDRVSLLLPGKQMGLIHAIASVAKKPLVLVLLGGGPVDVSFAKQDPRIASILWLGYPGEVGGQVLPEILFGEYNPGGKLPITWYPESFTAIPMTDMNMRADPSRGYPGRTYRFYTGDVVYGFGYGLSYSKYSYSISSAPKKITVSRSSDLGIISRKPAYTRRDGLGSVKTEDIASCEALVFSVHVAVSNHGSMDGSHAVLLFARSKSSVPGFPIKQLVGFESVHTAAGSASNVEITVDPCKQMSAANPEGKRVLLLGAHVLTVGDEEFELSIEL

SEQ ID NO: 226268 - protein, 410 aa, Zea Mays
MRRVVRWLRQLLAGRKDERGGGLEVSHVGSGWSDGPEKEKRRWSFAKQRKSGGGGARSSGPDAVAPAAAVERSQLVGRPGEDARAREHRAAIAIQKTFRGYLARRALRALRSLVKIQALVRGYLVRKQATMTLHRLQTLMRLQADSIAVKNASYRRSMEQEERVYARDVQVKPLATAPVHRRMLSDSSDSIYERSPRIVEMDTCHLRSRSSRITSRYNKYKYNPDGLPEYHHRHAAPTPSCSPLPGGNGKHQPARVSFRQSARDRERDPRGSKTAQSTPRLASPHDSSSPAKSVEHSQLASTPRRRPATQRDRDRDALVSPRHMAGTASSAARTRCHSAPRQRKATDSEQAPSPRTGACCQEGASRRSCSHAHARGFCFQCSESTRTDGLSGISVSDEVGARDYYLDSFW

SEQ ID NO: 226269 - protein, 284 aa, Zea Mays
MTLHRLQTLMRLQADSIAVKNASYRRSMEQEVTHMERVYARDVQVKPLATAPVHRRMLSDSSDSIYERSPRIVEMDTCHLRSRSSRITSRYNKYKYNPDGLPEYHHRHAAPTPSCSPLPGGNGKHQPARVSFRQSARDRERDPRGSKTAQSTPRLASPHDSSSPAKSVEHSQLASTPRRRPATQRDRDRDALVSPRHMAGTASSAARTRCHSAPRQRKATDSEQAPSPRTGACCQEGASRRSCSHAHARGFCFQCSESTRTDGLSGISVSDEVGARDYYLDSFW

SEQ ID NO: 226270 - protein, 334 aa, Zea Mays
MSRALLSHVLHRPPHFAYTCLRSGVGARGGVLASGIHPLRRLNCSAVEAVPGPTEEAPAPQARKKRVVSGVQPTGSVHLGNYLGAIKNWVALQDSYETFFFIVDLHAITLPYEAPLLSKATRSTAAIYLACGVDSSKASIFVQSHVRAHVELMWLLSSSTPIGWLNRMIQFKEKSRKAGDENVGVALLTYPVLMASDILLYQSDLVPVGEDQTQHLELTREIAERVNNLYGGRKWKKLGGRGGLLFKVPEALIPPAGARVMSLTDGLSKMSKSAPSDQSRINLLDPKDVIANKIKRCKTDSFPGFLSSRFCALSTSLFIIMETHSIELIFQYGV

SEQ ID NO: 226271 - protein, 180 aa, Zea Mays
MGFLEDFQASVEALPSMLHRNYSLMRELDKSLHGVQLENEQRCQQEIEDIKHGLESGSITYDPAKLKFSEEAMEEQKHCVRIADEKVALATQTYDLVDAHIQQLDQFMRKLEEIRQGKEAAAAVTAGTAVATTATPTVNAGATTADANPKSGRSGERGRGGPRYPRSSQCQCQCHCHLLT

SEQ ID NO: 226272 - protein, 549 aa, Zea Mays
MRRWWPAALLGCAVAVSVLVAAVECAVTYDKKAVLIDGQRRILFSGSIHYPRSTPDVTAFYKISSPPTIPWRGLWLRIYGSEMWEGLIQKAKDGGLDVIQTYVFWNGHEPTPGNYYFEERYDLVRFIKTVQKAGLFVHLRIGPYICGEWNFGGFPVWLKYVPGISFRTDNEPFKTAMQGFTEKIVGMMKSENLFASQGGPIILSQASIIFSLDLIENEYGPEGREFGAAGQAYINWAAKMAVGLGTGVPWVMCKEEDAPDPVINACNGFYCDAFSPNKPYKPTMWTEAWSGWFTEFGGTIRQRPVEDLAFAVARFVQKGGSFINYYMYHGGTNFGRTAGGPFITTSYDYDAPIDEYGLVREPKHSHLKELHRAVKLCEQALVSVDPAITTLGTMQEARVFQSPSGCAAFLANYNSNSYAKVVFNNEQYSLPPWSISILPDCKNVVFNSATVGVQTSQMQMWGDGASSMTWERYDEEVDSLAAAPLLTTTGLLEQLNVTRDSSDYLWYITRWRQASVSQCAVCWSCLACLCQWTTSRFCLWYQGRSKNQI

SEQ ID NO: 226273 - protein, 592 aa, Zea Mays
MKQSHEKSKDKKKFKDSRKSKELKDSSWSNQSLIHQDSTDEGTSETSQMLADCDDLCCKCSTSEDYFNEQEEELRHRVQLEAEERKLEEALEYQRWIEEEAKQKHLAEQCRSTHASSVIGTASLSSTVSLNRDPDNHESALNNSSHTYLEGIKFGDFSYTENENNFSQKLNGIEFDSSDAHALTSSDMSVSMLTLKMNGVCNNAQPIKPLGNFGTQNPKRSSSEPQRYSQGHSAGIEKPNFEKGCDAYPAGTVSTSNGTEVYGTGLKNAAGEYNCFLNVIIQSLWHIRRFRDEFLKTSLLHKHVEDPCAVCALYGIFIDLSKASKGQREAVAPTSLRIALSKSYPNSKFFQEGQMNDASEVLGVIFECLHKSYTSRTVYHGVSHEKNSIGSWDCANISCITHNLFGMDVYERMNCHNCKMESRQLKYTSFFHNINASSLRTAKMMCPDSSFDELLKVVIMNDQLACDQDVGGCGTPNHIDHILSNSPHVFTVVLGWQNNKERVDDISATLAGISTEIDISIFYRGLDQGGKHTLGSVVCYYGQHYHCFAFKDGRWVMYDDQTVKVIGSWGDVLVMCEKGHLQPQVLFFEAAN

SEQ ID NO: 226274 - protein, 58 aa, Zea Mays
MQLKAFCTGVRLVRDTHVCILYGLSLRTLCRAPTISCCWPVSITTRHLTRGIFLRFNF

SEQ ID NO: 226275 - protein, 406 aa, Zea Mays
MPPPTLHAGSYKRGLTSRHTARSTSLTPSLAPPPLLAFLGRIKNTSRKEKRRSPIRARQPISICTITVRAPDYQNPAEGNGAEQLRDGGFHPAVRRGQQQHPGPRSGGPGGGGGGAAGAEQDARGAQRGLPRAVRGMRRRFRGGGGGAHAAGGLRREAARRGHGSPRPDGRHRLDLEGSRVLRFRPSHRLLGRQLPGPLPLALPASGRQVLDDAAAVRGVLVPGCQDGGDLRSSVSGPAGRGRAVRVRGEDGAEDGAAGPQHAQMEDASGHPLLVHRLLPPPAQRRRCAEQTRRPPIRGAHPARRERNVLPGFQALGGRRGCRRRRGRRGARRGYRQGLHPPRARGTACACPRPLLASLVVRFNAMRCNTLSVYRMDPNPSREGVAMPRSDPGHRGPAGACTAAES

SEQ ID NO: 226276 - protein, 376 aa, Zea Mays
MAGSEQRVVAVIMVGGPTKGTRFRPLSLNVPKPLFPIAGQPMVHHPISACSRIPHLAQIYLIGFYEEREFALYVSSISHELRIPVRYLREDKPHGSAGGLYSFRDYIMEDSPSHIVLLNCDVCSSFPLPDMLEAHKKYGGMGTLLVNKVSAESANQFGELVADPETNELLHYTEKPETFVSDLINCGVYIFTPDILSAIEDVLKQKKDRANLRRVSSIEALHSATKMSLRCSGLYLSQFRHTSPHLLASGDGKRTATIVGDVYIHPSAKVHPTSKIGPNVSISANARVGAGARLINCIILDDVEIMENAVVIHSIVGWKSSIGKWSRVQGEGDHNAKLGITILGEAVDVEDEVVVVNSIVLPNKTLNVSVQEEIIL

SEQ ID NO: 226277 - protein, 212 aa, Zea Mays
MSKSKWYGLCKLCDVKQIWQVREVITVVEKELGFGEGKLLHKLCKVYLYISAQRIVGCLVTEPIKTGHRVIPSSTEGSPNDLPVSSTERGKNGHTLEFGSISFKREIIRRHSRSVKNKEECQDPGAILCETEAVPALCGFRAIWVAPWCRRKRICLKTNGRCKENLLRRQDFGDFTVCFLSPDLLWQGASMPLLQDQCILSLQRRTGVTLVL

SEQ ID NO: 226278 - protein, 824 aa, Zea Mays
MIMHIVWKRVSDTGKNWRHVYKGLIVLDYLVAHGTERVIDDIREHAYQISALADFQYIDSSGRDQGSNVRRKSQSLVSLVNDKERIQEVREKALSTKDKYRSAFAPSGRSPGGYGGGYDNDRYEGSYGSRYDNRNGNGRGDYGYRDDDRYGGPGGTPNREGDRYSRDSNERYGRDYREDEYKGSHSNHEYAEGAGRRSYGQERDSYGDGEAYSSRGRGSNADDPTQDDRPIERKLSNQQISSPPPNYEDVTRDGQDNLHDDRNGGSVPAAVSRVPSPSVPATTVPAVQVNGVHDSTVEDVPAPPTAHAEPNGFDEFDPRGSVPDSSPPVNPASVANSLEMDLFGSDPISSLALVSVPQPTTTSNVEAPANSGFETNSFVGMPPASTGFGEIDASNPFGDPTPFKAVLDESPALPQTHAAPAGSFQPTGPGTDVNPFQPASAASFGFGDTLGDLTFAPNAAPELQDMFANTASLPSEAPQAAPAFSYSQGPHPGAAIQSQFPQTVAPSFPPSQVPQSVTPNLPPGQSNFFLQSASGSGIDSLSGVPTQNGAPSYIPPQNSQFTAPANQQPLQPSFIPQTSTPALQPALISRGASQPLGVPNSVPTSGSFPLQSSSSAPPETIVSALQVNQTEPVKKFEPRSKLWSDTLSRGLVNLDISGPKANPHADIGVDFDSINRKEKRQEKKINQAPVVSTVTMGKAMGAGSGIGRAGVGAMAPPPNQMGAGRGMGPGAGAGYGGGMGMNRPMGMGMGMNQQQMRMGMNQQPMGMGMGMNQQPMGGMNMGMGMNQGMPMRPPMGMGPGGMPGAGYNQMGAAYGGQQPYGGYR

SEQ ID NO: 226279 - protein, 213 aa, Zea Mays
MLFAPTAAPPQVHKQPQKTGVAFQLASEPAVRKEDNSSQQLRENVKPSALEPTYMEESQAKRDDVESTFIMIKPDGVQRGLIGEIISRFEKKGFYLKALKLVNVERSFAEKHYADLASKPFFQGLVDYIISGPVVAMVWEGKSVVTTGRKIIGATNPLASEPGTIRGDFAVDIGRNVIHGSDSIESANKEIALWFPEGPADWQSSQHPWIYEK

SEQ ID NO: 226280 - protein, 848 aa, Zea Mays
MAQPLVVKKDDDLDEEEYYSPFLGIEKGAVLQEARVFHDPQLDARRCCQVITKLLYLLNQGDTFTKVEATEVFFATTKLFQSKDAGLRRMVYLMIKELSPSADEVIIVTSSLMKDMNSKTDMYRANAIRVLCRIIDSTLLTQIERYLKQAIVDKNPVVASAALVSGIYLLQTSPEVVKRWSNEVQEAVQSRAALVQFHALALLHQIRQNDRLAVSKLVTSLTRGSVRSPLAQCLLIRYTSQVIRESGVYQGGDRPFFDFLESCLRNKAEMVILEAARAITELNGVTSRELTPAITVLQLFLSSSKPVLRFAAVRTLNKVASTHPLAVTNCNIDMESLISDQNRSVATLAITTLLKTGNESSVDRLMKQMTNFMSDIADEFKIVVVEAIRSLCLKFPLKYRSLMNFLSNILREEGGFEYKKAIVDSIIILIRDIPDAKESGLFHLCEFIEDCEFTYLSTQILHFLGNEGPKTSDPSKYIRYIYNRVILENATVRASAVSTLAKFGALVDSLKPRIFVLLRRCLFDGDDEVRDRATLYLKLLGGEATVGETEKDVNEFLFGSLDVPLVNLETSLRNYEPSDVPFDISSVSKETKSQPLAEKKSTGKKSAELTEAETEYSVNVVKHIFDRHVVLQYNCTNTIPEQLLEQVIVLVDASEADEFLEVASKPLESLPYDSPGQTFVAFENPEGVIATGKFSNILKFFVKEVDPSTGEAEDDGVEDEYQLEDLEIVSADYMLKVGVSNFRNAWENMDPETERVDEYGLGVRESLAEAVSAVISILGMQPCEGTDVVPSNSRSHTCLLSGVFIGNVKVLVRLSFGISAPKEVAMKLAVRSDDPEISDRIHEIVANG

SEQ ID NO: 226281 - protein, 535 aa, Zea Mays
MSHHRKSKKNKKKTGKLKPLKRVRLSPESEVILEETSVDNAPSPELTSDESPHHYCNKRKKITVATEENSNSRSLKKLKKTTKSSFISEALSPRLKEDLNDSDSKSVGRTKSDGRFFIPCMPVKRVIVIKPERLKRKGIWSRDCASDSWSSEEDAVLCGTVHEYGPLWELASDFLHFLPGGSLYRGRYHHPVHCCERYRELFCKHGMSATDNSNSEKVPSGTGKAILRVSEDQAQMLVNVTSELPNNELLLQKHFMAVISSVWRSKCHRDTSCFTNTYSSALHVFSPVKKPGGSCENWPMVNFRPSFNLVRKALADVQAKSTLMVIPPPSRNQEYPCNYLELELDFLKDQHAYDEDIPSVVNVSIQEPEPSKQTPEPVEQSLLSALSCRQAENRLRIASEACYDGESSHWASSAFHINDAARHKSGSKSIGKHKAALESGRLLKSKVQKITESHQEGAIAMSSFLRMPAQLLPSTADFHISDSLSDFGIRDSEFYFSEDLLQEVDALEFFPDQGDSGLLPGIEELESLSDFTDIG

SEQ ID NO: 226282 - protein, 972 aa, Zea Mays
MHERVFSHPVSYKELAILLRRLKSEGHRALIFTQMTKMLDVLEEFINLYGYTYLRLDGSTPPEERQTLMQRFNTNPKFFLFILSTRSGGVGINLVGADTVIFYDSDWNPAMDQQAQDRCHRIGQTREVHIYRLISESTIEENILKKANQKRALDDLVIQRGSYNTEFFKKLDPMEFFSGHTSLHAEDQEKNCSTTSGVSNDVDLALSIADVEAAIRQAEDEADYMALKKLEEEEAVDNQEFSEEAAGRQEEDELVNEENGKPDEHINEEQKYNSSDVEKEKHITLSTNRLNKEKALTLAVGDEDTDMLADVKQMAAAAAAAGQASSSFENQLRPIDRYAMRFMELWDPVIDKAALNHQVNVEEEEWELDRIEKFKEDLEAEIDEDQEPLSYESWDVDFATTAYRQHVEALTQKQLLEEQERQAQEATKELEEKNDNMSSHHRKSKKNKKKTGKLKPLKRVRLSPESEVILEETSVDNAPSPELTSDESPHHYCNKRKKITVATEENSNSRSLKKLKKTTKSSFISEALSPRLKEDLNDSDSKSVGRTKSDGRFFIPCMPVKRVIVIKPERLKRKGIWSRDCASDSWSSEEDAVLCGTVHEYGPLWELASDFLHFLPGGSLYRGRYHHPVHCCERYRELFCKHGMSATDNSNSEKVPSGTGKAILRVSEDQAQMLVNVTSELPNNELLLQKHFMAVISSVWRSKCHRDTSCFTNTYSSALHVFSPVKKPGGSCENWPMVNFRPSFNLVRKALADVQAKSTLMVIPPPSRNQEYPCNYLELELDFLKDQHAYDEDIPSVVNVSIQEPEPSKQTPEPVEQSLLSALSCRQAENRLRIASEACYDGESSHWASSAFHINDAARHKSGSKSIGKHKAALESGRLLKSKVQKITESHQEGAIAMSSFLRMPAQLLPSTADFHISDSLSDFGIRDSEFYFSEDLLQEVDALEFFPDQGDSGLLPGIEELESLSDFTDIG

SEQ ID NO: 226283 - protein, 501 aa, Zea Mays
MEFFSGHTSLHAEDQEKNCSTTSGVSNDVDLALSIADVEAAIRQAEDEADYMALKKLEEEEAVDNQEFSEEAAGRQEEDELVNEENGKPDEHINEEQKYNSSDVEKEKHITLSTNRLNKEKALTLAVGDEDTDMLADVKQMAAAAAAAGQASSSFENQLRPIDRYAMRFMELWDPVIDKAALNHQVNVEEEEWELDRIEKFKEDLEAEIDEDQEPLSYESWDVDFATTAYRQHVEALTQKQLLEEQERQAQEATKELEEKNDNMSHHRKSKKNKKKTGKLKPLKRVRLSPESEVILEETSVDNAPSPELTSDESPHHYCNKRKKITVATEENSNSRSLKKLKKTTKSSFISEALSPRLKEDLNDSDSKSVGRTKSDGRFFIPCMPVKRVIVIKPERLKRKGIWSRDCASDSWSSEEDAVLCGTVHEYGPLWELASDFLHFLPGGSLYRGRYHHPVHCCERYRELFCKHGMSATDNSNSEKVPSGTGKAILRVSEESCVSLY

SEQ ID NO: 226284 - protein, 172 aa, Zea Mays
MGDRVCVDLCSIMRPGEGLLVGSYARGMFLVHSECLETNYIASRPFRVNAGPVHAYVTVPGGKTSYLSELGSGKEVIVINQSGLWRTAIVGRVKIESRPLILVEAKDNSGDETYSIFLQNAETVALITPNTGSSGRTAIPVTSLKVGDEVLVRKQGAARHTGIEIQEFIVER

SEQ ID NO: 226285 - protein, 444 aa, Zea Mays
MASSSSLASAKALARSHASLLAPQTQRTGTRCLAFFLAGFSRPVPQSGPCLAAPCDRAGQFKLLPFDDPSSAVTLPMASALQRLMRASAAAPAEPKKTVWVWTESRQVMTAAVERGWSTFLFGSKDLGKDWSSTARINALFIDGPGIFDEENQKVAVISQVSSPGELDLVQPDNAEAENIVIDFRGGWQVIRAENIVAAFQGCKGNVLAVSTNTTEAQVFLEALEQGLDGVVLKVDDMDDIIKLKDYFDRRNEAKSQLPLTKATVTKVEVVGMGDRVCVDLCSIMRPGEGLLVGSYARGMFLVHSECLETNYIASRPFRVNAGPVHAYVTVPGGKTSYLSELGSGKEVIVINQSGLWRTAIVGRVKIESRPLILVEAKDNSGDETYSIFLQNAETVALITPNTGSSGRTAIPVTSLKVGDEVLVRKQGAARHTGIEIQEFIVER

SEQ ID NO: 226286 - protein, 266 aa, Zea Mays
MEHSYAQECDFVAIFDADFQPDPDFLLRTIPFLVHNPKIALVQTRWEFVNYNICLLTRIQKMSLDYHFKVEQESGSSVHAFFGFNGTAGVWRVSAIGEAGGWKDRTTVEDMDLAVRASLKGWQFLYVGDIRVKSELPSTFKAYRHQQHRWTCGAANLFRKMAGDIVISKGATVWKKLHLLYSFFFVRRVIAPILTFLFYCVVIPLSVMVPEVSIPAWGMFYIPTAITIMTAIRNPCHISCTPGLSIWCQYGSCSRTSCPCTECARR

SEQ ID NO: 226287 - protein, 240 aa, Zea Mays
MEHSYAQECDFVAIFDADFQPDPDFLLRTIPFLVHNPKIALVQTRWEFVNYNICLLTRIQKMSLDYHFKVEQESGSSVHAFFGFNGTAGVWRVSAIGEAGGWKDRTTVEDMDLAVRASLKGWQFLYVGDIRFFVQVKSELPSTFKAYRHQQHRWTCGAANLFRKMAGDIVISKGATVWKKLHLLYSFFFVRRVIAPILTFLFYCVVIPLSVMVPEVSIPAWGMFYIPTAITIMTAIRNPW

SEQ ID NO: 226288 - protein, 692 aa, Zea Mays
MEARSSSSAAAVPPPLSIPSSSDQCVWADASPLLAAACRDLEDGELVHGENFSLFAAMSALEIMDPKMDSGIERSRYNSIDEAIEDGVAPIPLSLDRTLDVQRSIDVMDHLFSCEATWHKGHTLAQTVFTCIYLMRMERTSSHAVLNSFCRILRATCNAVISAVSTARTHEEEDLFTMSFGLPLRDEGDDKCLSILNSVEEIISRQLRACKAQALSKKKTLEGLESLQDNPDLEEDYCRALLCRLRFRKHFYHVIMCMRKPHGRGLELARKHVASCLTELNLMHKSRKFLKSQSSTMVQQSDGNCTTASGCQPVGFDVSLNSRLLSPTPPRAVKVLSWSNAIRYFERLLHDLDVICALSLNPVLDNVLHFIVQFQKTVPDLVPRAFLQTLLVQDGKLYGEYFFSDVISRALSLPDIIGDKEFQMNEFVVQLGQLVINLIKILCTNTAWQRRKLGKSLQDWSTISIQLELALKREFGETRNVLQNENMCMRVSKQLLIWTQEHAYWVAFRFLTLGFELDLYSPGEYSMVYWYMYVVLTKLIEKMQLRVLASSETSRRKGKKKKDHLKDSARDMAFSSSCLLPQCYLLLSEGLSMMLAVLRNESRSFQLPSIFNTEQERFMQHFDLLLKARVPEHISFYSFKESSSRAGMSDLVKYNFFKEIQKIVPSLRGSFASEPEKLAEVRRIEQVGWDRA

SEQ ID NO: 226289 - protein, 786 aa, Zea Mays
MVFRIMFNTAFIRSNILMLNRDHIDMLWNAKDQFPKDFRFEVIFSDMDIVTSHVTTEPVIHQEKQGLGVEEFAKVLDIFNHLDWLDGKKDTVPHTTQLKISAITDEPETFFDTREELESESSSGEIYSSSVVLKVGNELDMLVSTKPRHIPQDSSSANVQSKSQTTVQSPSRMRRTALLSPSKVKVSKTSASPMELSSSTIMPQQSSSPVQPRRVMSDSAVKFLSEITESASGEMSCSQTPVEHEPSSLMENNPAPTASLLPLCTPPPLPPPPPTVSLLPVPTKLPINTSTSTINISLRATVRSSPPSEPSVPPKDLLRTEELGKSQEPSYETRGKLQTDSTTGSNDFILSPAASSSLDEELSNARASLPTDLPAVPQNPDTRPFAIQATRSETMPPPPPPPPPPPSKSGMTLFPLTHGEEVKITIEKVVPHQPPHPPAAAASFSSSNPDAVSVILAPQKRARSPPPPPLPPPPGLAKPPFSSLRSRSSPEVSLSQPQFLDNKDSATMEYPDTPSLTPTFSQSVTRVQTLHVPPPPPPPSRTPPVPPPPPRTPPVPPPPPPSSRTPPVPSPPPGTPHVPPPPPHSSQTPPTPPPPPPSSQSFPSLSRRNRVAAPHPPPPPAPLSSRVTSAPSVPPSPPLPPPKLAVANNTSQKSPTIRPPPPPPGPLHKLTKGSVANSNPPPHPAFSFGAKDRSTARSKSPRSLRANQASKRTPLKPLHWVKVSRATQGSLWAETQKSDEISRTPEIDISELESLFSVTMPNMEAKRQRQQQHPSVATKQEKVHLD

SEQ ID NO: 226290 - protein, 101 aa, Zea Mays
MSNEMYSTIARVTDGIYEGIAIGGDVFPGSTLSDHILRFNNIPQVKMMVVLGELGGKDEYSLVEALKQGKVEKPVVAWVSGTCARLFKSEVQFGHAIFVSW

SEQ ID NO: 226291 - protein, 171 aa, Zea Mays
MAAALLPETAPRLLTPETLRTAAKQSQGIHLVPLSLRRAIKRYLRDQDRAHMNRKVLLLSASFDRAKGTGAELAAAATRAALLDDPNAPSGAEQRSARWKVRSAYGDIGLRYREDETVAYVASRMPAIYAACHRVLREVRRRLPEFAPAKVLDFGAGPSSALCVAKINREG

SEQ ID NO: 226292 - protein, 825 aa, Zea Mays
MPTSSGSSEALEEVQEEASGCELLVSQIDNVCPETPFSELLRSLELRHEGVDMPVNLQGILVNQSYLASPSDLNNLLFSPDSDFKQTMVELQGCTDFKTEPWRLDNGGESLKRVVTYTTAPSKLVKAVHATEEQSYLKADGKEYAVLLSVSTPDVPCGTYFRTEILFRIMPGPELDSQQQTSHLVISWRMNFLQSTMIKSMIENGARQGLEQNYAQFSDLLSQKIKPIDVEGSGSDKEQVLASLQGGEESDWKIAFLYFCNFGVLSSFFVSLYIILHVLRVNPSAVQGLEFPGLDLPDSLSEIIMGGLLFLQVQRILKNITCFLQAREQKGGDHGMKAKGDGWLLTVALIDGIKLAPVDATGLSDPYVVFTCNGKTRTSSIKFQTLEPQWNEIFEFDAMDDPPSVMSVHVYDFDGPFDEVTSLGHAEINFVKSNLSELADVWIPLKGNLAQSWQSKLHLRIFLNNSKGTGMVTEYLSKMEKEVGKKMTLRSPRTNTAFQELFSLPAEEFLISSFTCYLKRKLPTQGQVFLSPRTIGFYSSMFGRKTKFYFLWEDIEDIQGIPQSISSWSPSIIITLHKGRGMDTKHGAKSMDNGKLKFCLQSFASFSVANRTIMALWKARSLSTELKVQLAEEQSQINTLQSEDSGVFVGIEDAKSLQMTEVFSSTISTNMASLMEVFAGGSLEMKVMDKVGCQKYSATQWESDKPNEYQRQIHYKFSKKLSPVGGEVTGTQQKSLMPNKKGWVIEEVMELQGVLLGDFFTLHIKYQVEDLAPKQRASNVQVSLGIEWSKSTRHQKRIEKNVLSSSSARLKEMFNLASRELSHAR

SEQ ID NO: 226293 - protein, 259 aa, Zea Mays
MQNHLLQILALFAMETPVSLDAEDIRNEKVKVLRSMRQLKLEDVVVGQYKGHSKGGKSYPGYADDPTVPKGSVTPTFAAAALFIDNARWDGVPFLMKAGKALHTRRAEIRVQFRRVPGNLYRRNIGADLDKATNELVLRVQPDEAIYLKVNNKVPGLGMRLDRSNLNLLYSERYRREIPDAYERLLLDAMEGERRLFIRSDELDAAWAIFTPALRELEDRKVAPELYPYGSRGPVGAHYLAANYNVRWGDITSDDDGAF

SEQ ID NO: 226294 - protein, 452 aa, Zea Mays
MCLNMLHRSNSRNQRNRGSRIKTLLQATLLIGVIFWLLYQVKHSYDKKNEYLDDAEDQLAHNDISMFQGRKEKAGSYSDSNIQMVDDNSDVTTKPEERDADHHSDTFNYNEKTGETVFDKDSTNLNEDDKRNTERSEAEGQVNSADGNTEVNNNNNEDETTGHAEEGKHDTESNSAAESKSEVNSTGDDMSRNNYAQEENTGEASGTSHEVVQGEQSTSASGSGNGSDGDGEKNEAVDIKSGSESLPDDAKAEATDDRATVSLPDETGNIPSVHTDNSQNDASENQGDATYTTSDSSEHGIVEAVHIETGLEDESATASSGTGSGDDNGNSSDSASAEENTETVSGDDEKGMGTGTTTEASYSIQQNSENSSVSAEAENSQGDSSSGVNGSSEETSNKGDGATETYNKGEQVDPKIETSTSTNAEHNESQGADGSSGSNGNGPEQTGKSESQ

SEQ ID NO: 226295 - protein, 316 aa, Zea Mays
MAAAWEVLAVLLVAAQVASAAQVTAPAFLWAPKNYGSDDAKEVVHYQTISPKSLAKSVLEEGGWSNFMCSREDTQNNVDVAIVFIGSKLQSSDISKDKQVDPALADTLKLSFTRSEFSMAFPYVSTTVDERLEDSLLSSFAENCNNGFGRNRITYTDTCTGQDLKKYHNMDAINDLVVSGVASRRANHPSGQTDVIVFCSGGFENPGTAKSEGELLSQLVDSLDLSGAKYTVLYASQPSGLLESPSGLPLGRHLAEKKTNGTKAVQGEKCDGECLVKSSLLEGTFVGIVLLIILISGLMCMMGIDTPSRFEAPQES

SEQ ID NO: 226296 - protein, 73 aa, Zea Mays
MSLASCIYFLNEKMKNLVRASTTGFGIFVGGWILGSLLVPVIPAFVIPPTWSLELLTSLTAYAFMFVGCTFLK

SEQ ID NO: 226297 - protein, 207 aa, Zea Mays
MGEEASCDAVSLTEAGTNAKPVGKEVGREPAAAPAAAADPRLQGISDAIRVVPHFPKQGIMFNDITTLLLRPRVFKDAVDLFVERYRGMGIDAVAGIEARGFVFGPAIALAIGAKFIPLRKPRKLPGEVISEKYVLEYGTDCLEMRVGAIERSGERVLVIDDLVATGGTLCAAIRLLERAGADVVECACVIGLPKFKLGIRRHDDYT

SEQ ID NO: 226298 - protein, 242 aa, Zea Mays
MEAGGAGAEGVMRVLLVDDSPVDRRVAQLLLSSNSCAGSFHVIAVDSAKKAMEFLGLKDGGKEQAIDMVLTDYCMPEMTGYDLLKAIKALNPLKPIPVIVMSSEDEPQRISRCLNAGAEDFIVKPLQSKDVQRLRNCSTVGRPSNKGGATLPCEENAVAKWSNNKLPPSAGAGAGASATSPSGRRANLAGVAMVLHSSRVEISQYLPLLLKLVVLAYAALCLGELLHRWSSGGSCSLSPWCA

SEQ ID NO: 226299 - protein, 672 aa, Zea Mays
MGEMTRYMDALIKDSEQLAMMIDSVPSVDNLDFIMESDALGHTVMDQLQGHESLLAVAETVTLEEVNTVGAEVLEFISDFGKPNAPLPAAIVACVPKKVHVDDIGETEFEIYPEEITEAIKAGLEEPIYPEPELEVPKELITQSKLDELKLQHNPSFVPLTKEENAVKVFDSETGISQRRLSNGISINYKITQNEARVGVMRLIVGGGRATEDSESKGSVIVGVRSLSEGGCVGNFSREQVELFCVNNLINCSLESNEEFIFMEFRFALRDNGMRAAFQLLHMVLEHNVWLEDAFDRAIQLYLSYYRSIPKSLERSTAHKLMLAMLNHDERFVEPSPHSLQKLTLQSVKDAVMNQFVGSNMEVSIVGDFTEEEVESCVLDYLGTVRASSSPTIEERIEKISFRPFPSDVHFQQVYIKDTDERACAYIAGPAPNRWGFATEGNDLFNVIQRSDADAEISEPVSLDLTGKRHINVRSHPLFFGITLSLLAEIINSRLFTTVRDSMGLTYDVSFELNLFDKLDLGWYVIAVTSTPSKVHKAVDACKGVLRGLHSSRIVERELDRAKRTLLMKHEAETKTNAYWLGLLAHLQSSSVPRKDVSCIKELTTLYENATIEDLYIAYEHLKVDDSSLFACIGIAGAESGEDTNDDEPDVDLHGMGPMGGRGLSTMTRPTT

SEQ ID NO: 226300 - protein, 828 aa, Zea Mays
MRLSAQNEEGGNPALAARSGGDALRSPTNCRVRLHPDNNTGGLPGDVQGKNPFAKRKVEKFDMSNLEWINKIPECPVYCPTKVEFEDPIAYIQMISPEAAKYGICKIVSPVCASVPAGVVLMKEQPSFKFMTRVQPLRLAEWAEDDTVTFFMSGRKYTFRDYEKMANKVFSKRYSSSSCLPGRYVEEEFWREIAFGKMDFVEYACDVDGSAFSSSPHDQLGKSNWNLKNFSRLPGSVLRLLQTPIPGVTDPMLYIGMLFSMFAWHVEDHYLYSINYHHCGASKTWYGIPGDAAPGFERVASQYVYNKDILIGDGEDAAFDVLLGKTTMFPPNVLLDHNVPVYKAVQRPGEFVITFPRSYHAGFSHGFNCGEAVNFAVGDWFPLGSLASKRYALLNRTPLLAHEELLCRSAMLLSQKLLNCDPRSLDKLEHPCSQYSVKSCFVRLIKFQRRARDLLAKMGSEICYKPKTSPNLSCSICRRGCYITHVLCGCNFDPVCLHHEQELRSCPCKSSRVVYVREDILELEALSRKFEHDVYLYKERSSIRSCKEAEISDANVEHVPNLGITLDFANSKAGSSGFITVDGGNSSSAVSILTSSAHHEALMHSEARVHATQTDQIYSTAKQAINTSVTKGTCTTDESSSGMDCACNEHGSCNASVMECSDDSGSENEIFRVKRRSTLFDKPTSETKTSTLSEQQVLRRLKKVRPGVQQVSKRPEESGNGSVRSTHMSPSSNHASSDDEIDMAPLFLRIKRRQLENQDVTSRGARSQSYPSSSGSREEFVERSRDAAAELRPKRVKIRLPSSASRQIEQQRSSGQRFAREDKLPLAF

SEQ ID NO: 226301 - protein, 96 aa, Zea Mays
MKDGGVLVGGLKEYLKTIRRCRKGWVLFYWLWNKLQCCLSCKTLFVEELTGIPVTMEVASDLLDRQGPIYREDAAVFVSQSGETADTLLALLLIML

SEQ ID NO: 226302 - protein, 106 aa, Zea Mays
MSLSWYILETDPHVQSYKKIKLGCGCCCVASSCWTEEREGRSSWCADFYSGGLLFSMGLLGYIFSKSTISLVLGITPGLATLLLGTQSEVLEERQIQLPAYLGSGR

SEQ ID NO: 226303 - protein, 741 aa, Zea Mays
MIYLINMYRRGNGGTLHPLMAPLGAIGAAAASPGRPHPVRGVLRPFSAGGASAPLRGGLGSSLHAADSVSGPLPKPLLEPVSAERSFSGGQTLRSDVPPTSVQDLLLLGSPQPDPQRAVAGGIDHRRISLSSSRSEKCSTPVLPEDPHSLLSALRIQAAESSDCDAVCSPCFQFTCVEDEALKSGSVRSRRRATDDSAAPRVSGMPLHSATGVNDGGWEVVRPRFWWRKALKNPVRSPRNLQLDVKGTNLFKLKLKGKCYNCLSPAHLAFCCSAPTRCWQCLQSGHKARYCNQKVSQRTFNAAQCFPEPAVLASKSSTYQEVLLKPDKLHKYQDLPHVNSLGHPPPSTKKSYLQAVLEDHGMEARYPGDPRVRPARAFCAVSATGSIRRRRDELIDTAVVCSFDGNSHEVDILSAGDMLREKFSLQHGQYQLVKHFPEQFFIIFSDPRSKQWALDRRSVSYRGRIFHFGDWSEDSYARKTNLEFRVKVRVEGISVHCWGEDVASKALGKSCAIHYVQERTRRRERTRSFDLWAWCSDPCDIPKEVLLTVLEPDRELPPISTPLALVGAQQDAPADLKAGHVYTLRNHIEVVEDLSFLRGRGSRGGPPNRKQRMEFIWSYGAPDSVGEKRERVEAVRGREIARRDWGHDDDDDGDFQRSRRCGNRRHRSLSGWARSSRCRGGMDDCYSSNDKQRHLTPFRRHGWESKLSSRWVPKVKVWFDGRCYSGTCAQPCYNHMQGGFG

SEQ ID NO: 226304 - protein, 739 aa, Zea Mays
MIYLINMYRRGNGGTLHPLMAPLGAIGAAAASPGRPHPVRGVLRPFSAGGASAPLRGGLGSSLHAADSVSGPLPKPLLEPVSAERSFSGGQTLRSDVPPTSVQDLLLLGSPQPDPQRAVAGGIDHRRISLSSSRSEKCSTPVLPEDPHSLLSALRIQAAESSDCDAVCSPCFQFTCVEDEALKSGSVRSRRRATDDSAAPRVSGMPLHSATGVNDGGWEVVRPRFWWRKALKNPVRSPRNLQLDVKGTNLFKLKLKGKCYNCLSPAHLAFCCSAPTRCWQCLQSGHKARYCNQKVSQRTFNAAQCFPEPAVLASKSSTYQEVLLKPDKLHKYQDLPHVNSLGHPPPSTKKSYLQAVLEDHGMEARYPGDPRVRPARAFCAVSATGSIRRRRDELIDTAVVCSFDGNSHEVDILSAGDMLREKFSLQHGQYQLVKHFPEQFFIIFSDPRSKQWALDRRSVSYRGRIFHFGDWSEDSYARKTNLEFRVKVRVEGISVHCWGEDVASKALGKSCAIHYVQERTRRRERTRSFDLWAWCSDPCDIPKEVLLTVLEPDRELPPISTPLALVGAQQDAPADLKAGHVYTLRNHIEVVEDLSFLRGRGSRGGPPNRKQRMEFIWSYGAPDSVGEKRERVEAVRGREIARRDWGHDDDDDGDFQRSRRCGNRRHRSLSGWARSSRCRGGMDDCYSSNDKQRHLTPFRRHGWESKLSSRWVPKVWFDGRCYSGTCAQPCYNHMQGGFG

SEQ ID NO: 226305 - protein, 250 aa, Zea Mays
MWERYGGVDISLDPCSFGQANTLSFNSLLHKLNKYVPRSSTVVDLYSGAGVIGLSVAASRKCRSVKCIEINKQSKMSFETSASRLPANLGCTITWHNTDASVEPSHWLEGSSVVIVDPPRKGLHPSVISALQKVALSERKAYKAKSSLAKVKDEKRPWILRAREAAVHVDNTTTEEGNETWPETLIYISCGWESFKRDCKSLISSKAWQLENAHAFNFFPGTDSIEILAIFKRESEAGQKKKKKAKKKAK

SEQ ID NO: 226306 - protein, 245 aa, Zea Mays
MALRLHDVALCLSPPLAARRRSGGSFVAVASMTSAAVSTRVENKKPFAPPREVHVQVTHSMPSHKIEIFKSLDDWARDNILTHLKPVEKCWQPQDFLPDPASEGFHDEVKELRERAKEIPDDYFVCLVGDMITEEALPTYQTMLNTLDGVRDETGASPTAWAVWTRAWTAEENRHGDLLNKYMYLTGRVDMRQIEKTIQYLIGSGMVTYSLFLSIFSYLFNMASLSCTFMLLKCLFSVAWSLVLW

SEQ ID NO: 226307 - protein, 460 aa, Zea Mays
MVVKTLTELSLQDKDVTVQVEVNRRWEFRGIGDDGPVLHVDMILTDATGNAIYAELPAKLLEQKGSLLQSNKVYYIRRFRVANAKSQYKVIDAPLMIYFTVYSIIEVCRDPPSTFPLYVYNLIPYEAIDANGPKSKDFHVSEINPIQLSGKSSIYRNVFIKNLSNDIIKVTLWGNQALKFSYEAIYDQKIQHAVVVLFVGCLPKEYKGSVYLSGGAACHWYFNPSINEAQPYYQRIHNENVTIKLPPLTNEQAAFVNPPETQHKDLKELLESEPLTLPEEGFKCTVTITRLLDDHPWWYKACNTCPNKPSMRSSVSSCPTCGSTDAILRYKLNFMATDDIAEMRMFCFDNVAKRIIGKTCTSLLTSVTDTSNIPPDLAAIVSLKFTFVVVYNLMSFQNQEKELLIKSVIASHGRDLSLPSTKLSIPMHPSTPTKLLSRTRQTISPSTALSNLSTSSSLEF

SEQ ID NO: 226308 - protein, 247 aa, Zea Mays
MDAKRFLHLVEEKKRRVLEKKEAPLKWEQKLETAAKAKVDAEAKVKKLNSRKHRRRGDLSSDSDSDYGSDVDRKHLKRKNRRRNKKHEHSDSDDARRRNRRSRRSTDSSDESNSEYETRSEEERPRKKRSHRRRHHRHSSKSDSENYSSDEEQRRPAKDHSQSRRRHHRSSDDDSDKDKVKSRHGKGLRSRDEDARADFNSNKHLRSQSLEESSDDRDADESEKMRNGKRRQVLKDGQRALEGDSAY

SEQ ID NO: 226309 - protein, 160 aa, Zea Mays
MKSIRVIDRKQEVPHDGAMCDLLWSDPEDTVDGWGLSPRGAGFLFGGNVVSSFNHSNNIDYICRAHQLVMEGYKWMFNSKIVTVWSAPNYCYRNQEVFLLRGQHQITFCDATQRTLELTVLSSAGPHVARRAQALQLSSQEVVFRMCKLSVIFSLQVHDL

SEQ ID NO: 226310 - protein, 180 aa, Zea Mays
MGASDLDRQIEQLKRCEPLTEAEVKALCLKAMEILIEESNVQRVDAPVTICGDIHGQFYDMKELFKVGGDCPKTNYLFLGDFVDRGFYSVETFLLLLALKVRYPDRITLIRGNHESRQITQVYGFYDECLRKYGSVNVWRYCTDIFDYLSLSALIENKIFSVHGGLSPAITTLDQAKLFS

SEQ ID NO: 226311 - protein, 468 aa, Zea Mays
MRQRMEGAGKDGNPLRNYRIGKTLGIGSFGKVKIAEHISTGHKVAIKILNRRKIRGMEMEEKVKREIKILRLFMHPHIIRLYEVIDTPADIYVVMEYVKCGELFDYIVEKGRLQEEEARRFFQQIISGVEYCHRNMVVHRDLKPENLLLDSKCNVKIADFGLSNVMRDGHFLKTSCGSPNYAAPEVISGKLYAGPEVDVWSCGVILYALLCGTLPFDDENIPNLFKKIKGGIYTLPSHLSGAARDLIPRMLVVDPMKRITIREIREHDWFKILLPRYLTVPPPDSAQQVKKVDEETLREVLGMGYDKNLLVESIQKRLQNEATVAYYLLLDNRLRTTSGYLGAECQEAMDSSFSNIASYETPSSARGNRQQIFMESPVGLRPHLPAERKWALGLQSRAHPKEIMSEVLKALQELNVYWKKIGHYNMKCRWSPGFPAQIHNNHNFSAGSIETDSLSERLSLIKFEIQKH

SEQ ID NO: 226312 - protein, 219 aa, Zea Mays
MGTTTPAVLHPSMMHLGAYKYVSELWRRKQSDVMRFVQRVRCWEYRQQPAIVRLTRPTRPDKARRLGYKAKQGYVVYRVRVKRGGRKRPVPKGIVYGKPKHQGITQLKFQRNKRSVAEERAGRKLGGLRVLNSYWVNEDSTYKYFEIILVDVAHTAIRNDPRINWLCNPVHKHRELRGLTSAGKKFRGLRGKGHTHHKNRPSRRATWKRNQTLSLRRYR

SEQ ID NO: 226313 - protein, 178 aa, Zea Mays
MVAEILEKRIAHPQLTYFTYVEKFLPEDDPEDVIALEYNLIGSKQIYEACADGEMRSNDQVYYYTICIANEDKLFRTEAADYRIFLPTNLSGAEEQLSPRGDRHQMEAFVVCPFSTQRFYFDSRCQPHTLAVFYIPSRFVAVFSYTVHPQVILLKRLTDCQQLRANLLNIYLPLFSID

SEQ ID NO: 226314 - protein, 178 aa, Zea Mays; identical to SEQ ID NO: 226313

SEQ ID NO: 226315 - protein, 420 aa, Zea Mays
MEEAAAVAKRWPGWPGDSVFRLVVPVLKVGSIIGRKGELIKRLVEETKARVRILEGPVGATERIVLVSGKEDPDLELPPAMDALMRVFKRVTGITDGAAEGTQAAATPDVCAARLLVPGAQAINLIGKQGATIKAIQESTSATIRVISVDEHERPFYVTDDERIVEIQGDTEKVLKALQAVSNHLRKFLVDHSVLPLFEKTNTTVSQDRNGDGWSDMSRPSIGSAQVNQLPSVLDDYILQVKRDPLYLERESLVDHNIHRSGVSLYGRDPALSTLRPSAVHGAGSLLTQITQTMQIPLTYAEDIIGVKGANIAYIRANSGAVVTIQESLGSPDDITVEIKGTSSQVQAAQQLIQDSLAAHREPVRSSYVGAGLDSVYRSSYSQYGSSIYPSSSLPSYSSIDDVSRYPSSGLGGYGSSYRY

SEQ ID NO: 226316 - protein, 947 aa, Zea Mays
MLEVVTRDIFDDHLSILESSHGGSYQKHDGTTTWDKEYQLFQPSGAIKFPLQVTTTDAWLEKIKRLELLLTVKESAMDVPSNLEARRRLTFFTNSLFMDMPDAPKVRNMLSFSALTPYYNEPVLFSIKELEEENEDGVSTLFYLQKIYPDEWKNFKERVGLEEELKESEESEELKEELRLWASYRGQTLARTVRGMMYYKKALNLEAFLDMAKREDLMEGYKAAESVNDEQWKIHQRSLFAQCEAVADMKFTYVVSCQQYGNDKRAALANAQDILQLMRNYPSLRVAYIDEVEDRVGDKKMETAYYSTLVKVALTKDSESADPTQNLDQVIYRIKLPGPAILGEGKPENQNHAIIFTRGEGLQTIDMNQDNYLEESLKMRNLLQEFLTEHGVRRPSILGVREHIFTGRVRFHYGHPDVFDRLFHLTTGGVSKASKSINLSEDIFAGYNSTLRGGNVTHHEYVQVGKGRDVGLNQISKFEAKIANGNGEQTLSRDIYRLGHRFDFFRMLSCYFTTVGFYFSTLLTVVTVYVFLYGRLYLALSGLEEGLSQGRLIHNHPLQIALASQSLVQLGFLMALPMMMEIGLERGFGQALSDLIMMNLQLATVFFTFSLGTKTHYYGRMLLHGGAQYRGTGRGFVVFHAKFAENYRLYSRSHFVKGIELMILLIVYQLFGQSYRSTIAYIFITFSMWLLVLTWLFAPFLFNPSGFEWAKIVDDWSDWNKWISNRGGIGVSPDKSWESWWEVEQDHLKYSGTIGRFVEIILAIRFFIYQYGLVYHLHVTHNKSILVYLISWLVIVAVLLVMKTVSVGRRTFSADFQLFFRLIKFLIFVAFIAILIVLIVLLHMTFRDIFVCFLAFLPTGWGILLIAQACKPLARHVGLWGSVRALARAYEIIMGVLLFSPVAILAWFPFVSEFQTRMLFNQAFSRGLQISRILGGQKKERSARNKD

SEQ ID NO: 226317 - protein, 907 aa, Zea Mays
MSTAKVLDPAFQGAGQKVGTEIWRIEDFKPVPLPKSDYGKFYCGDSYIVLQTTCTKGGAYLYDIHFWIGKDSSQDEAGTAAIKTVELDAILGGRAIQHRELQGYESDKFLSYFKPCIIPLEGGFASGFKKPEEEKFETRLYICRGKRAIRVKEVPFARSSLNHDDVFVLDAENKIYQFNGANSNIQERAKALEVIQHLKEKYHGGVCDVAIVDDGKLQAESDSGEFWVLFGGFAPIGKKTVSDDDVVLETTAPRLYSINDGQLKLEETALTKAVLENTKCFLLDCGAEIYVWVGRVTQMEDRKSATKAVEEFLINQKRPKTTRVTQVIQGYESHAFKSKFESWPVGNATGSPGAEEGRGKVAALLKQQGVDLKGAAKSTTPVNEEVPPLLEGGGKLEVWCVDGNAKTALPKEDIGKFYSGDCYIILYTYHSGDKKEEYYLSYWIGKDSLVDDQVSASQITNTVWNSLKGRPVLGRIYQGKEPPQFVALFQPMIILKGGIGSGYKKLIEEKGATGETYTTEGIALIRVSGTSIHNNKTLQVDTVATSLSSMECFILQSGNAMFTWFGNSSTYEQQQWAAKVAEFLKPGVAVKHCKEGTESSGFWFALGGKQSYTNKNAPQDIITREPHLYAFSFKNGLIQVTEIFNFSQDDLLTEDMMILDTHGEVFIWIGQCVESKEKQKAFDIGQKYVEHANSIDDLSPYAPLYKVMEGNEPCFFKTYFSWDNTKSLVHGNSFQKKLSLLFGLRSEGASRSSGNGGPTQRASALAALSSAFNPSSQQRLSNERPKSTGDGPTQRASALAALSNAFNSSLKPKTPPPSRSGQGSQRAAAVAALSSVLTAEQSGSSENLRAKASSTGDKTGRDGPSFSFYHSLKYIANCTFDWGGGGFLFSLNFRICILLQFVIIYAF

SEQ ID NO: 226318 - protein, 174 aa, Zea Mays
MLLLRPFDGWGYHSEDVETLISGVVLTSPAVRVQPAHPIIAAMAPIFALIAPRYQLTASHRNGPPVSRDPEALRAKYADQLVFTGAIRVRTGYEILRLTSYLQPHLQRVAVPLLVMHGADDLVTDPEGSRALYERASSADKSLRLYHGLLHDLLIEPEKDRVMDDIVAWLSRRV

SEQ ID NO: 226319 - protein, 193 aa, Zea Mays
MYLKKVSAENPGLPCFCFGHSTGGGIILKAALDPDVETLISGVVLTSPAVRVQPAHPIIAAMAPIFALIAPRYQLTASHRNGPPVSRDPEALRAKYADQLVFTGAIRVRTGYEILRLTSYLQPHLQRVAVPLLVMHGADDLVTDPEGSRALYERASSADKSLRLYHGLLHDLLIEPEKDRVMDDIVAWLSRRV

SEQ ID NO: 226320 - protein, 376 aa, Zea Mays
MAGSMQAADAAGRLSALLSLLALRRLLAVLQPLALLLLLPFRWRSRPGAGAAASAPGASGKKGKSASSSSSSSSVVLRVPAGSPMVAARRQASARREVAMRRAREAGREYELIPTARGETLFTQCWWPRPSSTVKPSGRYDHLARRLNDIGIKVYGMDWTGHGGSDGLHGYVQSLDHAVNDLKMYLKKVSAENPGLPCFCFGHSTGGGIILKAALDPDVETLISGVVLTSPAVRVQPAHPIIAAMAPIFALIAPRYQLTASHRNGPPVSRDPEALRAKYADQLVFTGAIRVRTGYEILRLTSYLQPHLQRVAVPLLVMHGADDLVTDPEGSRALYERASSADKSLRLYHGLLHDLLIEPEKDRVMDDIVAWLSRRV

SEQ ID NO: 226321 - protein, 226 aa, Zea Mays
MAGSMQAADAAGRLSALLSLLALRRLLAVLQPLALLLLLPFRWRSRPGAGAAASAPGASGKKGKSASSSSSSSSVVLRVPAGSPMVAARRQASARREVAMRRAREAGREYELIPTARGETLFTQCWWPRPSSTVKPRALVVVMHGLNEHSGRYDHLARRLNDIGIKVYGMDWTGHGGSDGLHGYVQSLDHAVNDLKMYLKKVSAENPGLPCFCFGHSTGGGIILKT

SEQ ID NO: 226322 - protein, 899 aa, Zea Mays
MPENIDLVLEFLRKNRFAKAEAALRGELTGCADSNGMTVQRCVAELKEDDEQEDLVSSNGGPNGAVTERSADSSREFIVKEVDVGALPNGLDGKKGSGIGQPQENNVGDLYPWTFSIANSTAEQLAELLVSEEVPRHRRAAMLAEKRDRGVGTEQPGPLLEQKVSSGRGKGKVDAAGRTAINEQGHSRDKNLVPEKEEMLNGCTVKTVLPFPGENPSSSYNSTHHENERKEVRRSINADGVGKGAKGHFDEGNRQNYFEKSLDTDQVSDRCFDLQLVGDNQREELPKLPPVRLKSEDKLVNMNWEDKINHHGSGAKQSSADHAFMIGSYLDVPIGQDITSSGGRRTIGSSWLSVSQGITEDTSGFARLDDDSLEYPIGEYWDSDEYDDDDDVGYTRQPIEDETWFLAHEIDYPSDNEKATDHTRGPDRHDRPTKDEDDDQSFVEEDSYISGEQYFHGKNIAQIGTSEGPMVNGIPDNDMIAQYDGQLLDPEELNLMHSEPAWQGFVLQNSELGMLGNGKFLNDSERPHPDDPFVEDDQHGSVRSIGVGISSDAADIGSEVRESLIGGSSEGDIEYFNESSLSVSGKRHSQQDPEKKRVGAKGVKHDQINYAAGIQKGNLLPGAADGGFSFPPPLHSVKNHDSDTKTLWSKKDEMYCINDLDDCQNGVASDDMLATWKKKNSESSLRSSRDEMTSDVVRSRNSSPSYGETEDTTNVRRHKLDDAQEDTGTNLDDEEAAALQEQVRQIKVQEEEFETFNLKIVHRKNRTGFEEDKNFHVVLNSVIAGRYHVSEYLGSAAFSKAIQAHDLHTGMDVCVKIIKNNKDFFDQSLDEIKLLKYVNKHDPGDKYHLLRLYDYFYYRANLYEFQKFNRESGGEVYFTMPRLQLFSVWRRCSFCMVSV

SEQ ID NO: 226323 - protein, 350 aa, Zea Mays
MGLVKEGVDMEEGTLEIGMEYRTVSGVAGPLVILDKVKGPKYQEIVNIRLGDGTTRRGQVLEVDGEKAVVQVFEGTSGIDNKYTTVQFTGEVLKTPVSLDMLGRIFNGSGKPIDNGPPILPEAYLDISGSSINPSERTYPEEMIQTGISTIDVMNSIARGQKIPLFSAAGLPHNEIAAQICRQAGLVKTLEKGKHAEGGEDDNFAIVFAAMGVNMETAQFFKRDFEENGSMERVTLFLNLANDPTIERIITPRIALTTAEYLAYECGKHVLVILTDMSSYADALREVSAAREEVPGRRGYPGYMYTDLATIYERAGRIEGRTGSITQIPILTMPNDAGEGLPTSSDGPFL

SEQ ID NO: 226324 - protein, 2190 aa, Zea Mays
MKERSSLCESAADGNWGLKYKRKRSKLTVSPSNENEATSPTSDSPMSHGSTKKKLKHDTNISPSAKKIRGHDGYFFECVECDLGGNLLCCDSCPRVYHLECLNPPLKRLPPGKWQCPRCRPKKGSLKMLGNAEVGTSKHEKSTRTYAGTTSGSPPSHTKVSFKTRNSTQDKTGSKEQGKQSSGGTMMGGDPNNEVEKKNTLILHLKKHSMKELSENAKPLKSKFVGEPSEEKIVKHGSVLKLKKHSDRMDLSPNKSKSRGQNSQRESKRPGTKKLKYSMSDDDSVSSSEPSTSLDNNEPPPKRKPSDGKAPSSSTKKGKKKVKFIEKRHSEEQCVVGDKTTTSQEDQQVDRILGCRLQTNKINPLSHASFKQFESANLQVEDMALPLASAGIPNKSHDGTESSRNGTVEDICADESANHSGHSLEMQKDRNSKSHENESCKREQGNNILSICFVDETSIMKDDQVGRENVAASKKGEDATYDLPAEKDDTKLPVTRADAMTRTNQEHTDESKQHGKIKQITDKDYNDAGYEFLIKWVGKSNIHNTWVSESEVKILAKRKLENYKTKYGTSLINICKEQWCQPQRVIALRASVDEVEEALIKWCGLSYDECTWERLDEPTLMKYSHLVTQFKNFECQALDKDVVKDYANTRNRHELNVLADQPKELKGGMLFPHQLEALNWLRKCWHKSKNVILADEMGLGKTVSACAFLSSLCCEFKINLPCLVLVPLSTMPNWMAEFASWAPHLNVVEYHGSARSRSIIRQYEWHAGDSSQIGKTKRSYKLNVLLTTYEMVLVDAAYLRSVSWEVLVVDEGHRLKNSSSKLFSLLNSLSFQHRVLLTGTPLQNNIGEMYNLLNFLQPTSFPSLSSFEEKFNDLTTAEKVEELKKLVAPHMLRRLKKDAMQNIPPKTERMVPVELTSIQAEYYRAMLTKNYQVLRNIGKGGAHQSLLNIVMQLRKVCNHPYLIHGTEPESGSPEFLHEMRIKASAKLTLLHSMLKILHKEGHRVLIFSQMTKLLDILEDYLTLEFGPKTFERVDGSVSVAERQAAIARFNQDKTRFVFLLSTRSCGLGINLATADTVIIYDSDFNPHADIQAMNRAHRIGQSNRLLVYRLVVRASVEERILQLAKKKLMLDQLFVNKSESQKEVEDIIRWGTEELFGSSDSVDGKDSNEASGSVADVEFKHRRKTGGLGDVYEDKCIGGSTKLVWDENAILKLLDRSNLPSSVAESTDGDLDNDMLGTVKSIDWNDELNDHPGTNEDIAPIDNDGSELASESKQGATNRLEENEWDKLLRVRWEQYQIEEEASLGRGKRLRKAVSYRETFATLPNEALSEGSDEGDEPKREYTAAGLVLKEKYGKLRARQKERIAQRHIIKNYAVDNLEEFMTPYISIANEPAENPLIIVEDPSSSQLCGAKCFSESTGEMRQSSKKSRRYSEIPQDLYARIPDNAASSKDNSKATDVFNPGTPNHLLPVLGLCAPNADQVNSYKNSICAPSIKEHKRASGDVVNKQLSTPADHSNELRNEVQSASDKVIFPGASEEALRRISNMIPDNYFPFSHIPPISGKAVDPVEYIGASNASFQGKLGLPNFSLEDNTPLKHIKPIPDIFPYLSLGAHKDYIRSSVPELPDSSLLPNFMADIAGTSKQKSFMSGPLPGLGLSPGQPIHLTMPDNHKKVLDNIMMRAQYASNKFLKKRSKLDYWSEDELDALWIGVRRHGRGNWDAMLRDPKLKFLNNRTSEELASRWILEEQKIIDEPMSAATRRSNSTAFPGISDAMMSRALNESNLSKMRMEQPKLQSHVTDIQLGSSDILSRFPHVEAPNYINSGEGGPPQIPWQDFKHRSSYGGDFPGGAFDKLEKPDVGLIPPFMPNPFMTDSIDSLPINRKNNSSIPRSEIRSSSRENILFSGVSDGQINLLHEMQRHVRSGKQPIEIKLNHIDHSNPQLGNASDLGGLKSNKLPHWLQEAVRAPASSKPPERGLPATVSAIAQSMCLLLGEQEPSIPPFLILGTPLSPPKDPRINSKKRKLRKAHQSTSHVGDCIATQAPPSVKASAAPLAVDCNDGAPSLNLNSALLSSSAVSKKLDELPPTFKESNQTMDGSEAVAGKLEAPEIGCQVTGSSPVDDKARESSGSPVKDTPDAGVRLQGSDNSAMAFSALPLEAPVTSSRAEPVACDGSDMKEDIPLDAESNGNLEER

SEQ ID NO: 226325 - protein, 1033 aa, Zea Mays
MLGNAEVGTSKHEKSTRTYAGTTSGSPPSHTKVSFKTRNSTQDKTGSKEQGKQSSGGTMMGGDPNNEVEKKNTLILHLKKHSMKELSENAKPLKSKFVGEPSEEKIVKHGSVLKLKKHSDRMDLSPNKSKSRGQNSQRESKRPGTKKLKYSMSDDDSVSSSEPSTSLDNNEPPPKRKPSDGKAPSSSTKKGKKKVKFIEKRHSEEQCVVGDKTTTSQEDQQVDRILGCRLQTNKINPLSHASFKQFESANLQVEDMALPLASAGIPNKSHDGTESSRNGTVEDICADESANHSGHSLEMQKDRNSKSHENESCKREQGNNILSICFVDETSIMKDDQVGRENVAASKKGEDATYDLPAEKDDTKLPVTRADAMTRTNQEHTDESKQHGKIKQITDKDYNDAGYEFLIKWVGKSNIHNTWVSESEVKILAKRKLENYKTKYGTSLINICKEQWCQPQRVIALRASVDEVEEALIKWCGLSYDECTWERLDEPTLMKYSHLVTQFKNFECQALDKDVVKDYANTRNRHELNVLADQPKELKGGMLFPHQLEALNWLRKCWHKSKNVILADEMGLGKTVSACAFLSSLCCEFKINLPCLVLVPLSTMPNWMAEFASWAPHLNVVEYHGSARSRSIIRQYEWHAGDSSQIGKTKRSYKLNVLLTTYEMVLVDAAYLRSVSWEVLVVDEGHRLKNSSSKLFSLLNSLSFQHRVLLTGTPLQNNIGEMYNLLNFLQPTSFPSLSSFEEKFNDLTTAEKVEELKKLVAPHMLRRLKKDAMQNIPPKTERMVPVELTSIQAEYYRAMLTKNYQVLRNIGKGGAHQSLLNIVMQLRKVCNHPYLIHGTEPESGSPEFLHEMRIKASAKLTLLHSMLKILHKEGHRVLIFSQMTKLLDILEDYLTLEFGPKTFERVDGSVSVAERQAAIARFNQDKTRFVFLLSTRSCGLGINLATADTVIIYDSDFNPHADIQAMNRAHRIGQSNRLLVYRLVNHRKKWKISFAGVQKNSLGVVTVWMVKIAMKPQVLLLMLNLSIEEKPVA

SEQ ID NO: 226326 - protein, 73 aa, Zea Mays
MVGGGAHGGTTYKGYTIPHNKRWHTVAGKGLCAVMWFWVFYRAKQDGATLLGLRHPWDGHDDHSHGHGHGNET

SEQ ID NO: 226327 - protein, 53 aa, Zea Mays
MVGGGAHGGTTYKGYTIPHNKRWHTVAGKGLCAVMWFWVFYRAKQDGATLLLK

SEQ ID NO: 226328 - protein, 247 aa, Zea Mays
MREVVELPMLHPEKFVKLGIDPPKGVLCYGPPGTGKTLLARAVANRTDACFIRVIGSELVQKYVGEGARMVRELFQMARSKKACIVFFDEVDAIGGARFDDGVGGDNEVQRTMLEIVNQLDGFDARGNIKVLMATNRPDTLDPALLRPGRLDRKVEFGLPDLEGRTQIFKIHTRTMNCERDIRFELLARLCPNSTGADIRSVCTEAGMYAIRARRKTVTEKDFLDAVNKVIKGYQKFSATPKYMVYN

SEQ ID NO: 226329 - protein, 129 aa, Zea Mays
MATAEVQTPTVVAAEEAPVVETPPPAVVPEESAPAEAEAEAEAEAAAPADPEELPAAEQQAAAEEEAAAAPPAGAEEPAAAEPVAEAEAAAPEELAADEPEAPAPAGPQEPAAEAEEVAAPEEPEKASE

SEQ ID NO: 226330 - protein, 383 aa, Zea Mays
MPVPPLLSPLRLPSPAPPLHRNGAPWRRPTQLRAALRVPPPLHLGLAAARGDGVRRFVGTLGSKRARAVGAIRVSAISGDGGGGAGGTGIAAAAAATVVFAVMNRVLYKLALVPMKNYPFFLAQFATFGYVLVYFSILFIRFRAGIVTREMLALPKPQFMLIGLLEALGAASGMAAAAMLPGPSIPVLSQSFLVWQLILSALILGRKYRANQILGCLLVTAGVILAVAGGASNGPILFEVKFFWPAVMMISAAFQAAASIIKEFVFIDGAKRLEGKKPDIFVVNSFGSGFQALFIFLLLPFLSNLKGIPFAELPAYLTRGAACFLNVGGNLKGEYCFSYHIHVVNKWSFSYYIISNLWLIREKVMFSYYMISNIWLIGEKGSS

SEQ ID NO: 226331 - protein, 126 aa, Zea Mays
MGYRVLGVLATSRSIGDYYMKPFISAEPEVTVTERTHRDEFIILASDGLWDVMSNEVACRVAKSCLCGRAASKCPDTIHGSSASDAAAVLVEFAMSRGSTDNISVVVVELKRLKRWKGGSRQNGRT

SEQ ID NO: 226332 - protein, 289 aa, Zea Mays
MAIILVRAASPGLSAADSISHQGTLQCSTLLKTKRPAARRWMPCSLLGLHPWEAGRPSPAVYSSLAVNPAGEAVVSSEQKVYDVVLKQAALLKRQLRTPVLDARPQDMDMPRNGLKEAYDRCGEICEEYAKTFYLGTMLMTEERRRAIWAIYVWCRRTDELVDGPNANYITPTALDRWEKRLEDLFTGRPYDMLDAALSDTISRFPIDIQPFRDMIEGMRSDLRKTRYNNFDELYMYCYYVAGTVGLMSVPVMGIATESKATTESVYSAALALGIANQLTNILRDVGEE

SEQ ID NO: 226333 - protein, 156 aa, Zea Mays
MREHERRVWSVDFSIMDPTKLVSGSDDGSVKLRDMNQAGSIGTIKTRANVCFVQFQPDTARSIAIGSADHKIYCYDLRHIRAPYCTLVGHTKTVSYVKYLDASTIVSASTDNSLKLWDLSMSTGRIIDSPVQTFKGHTNTKVFDEYLNLHDSILIQ

SEQ ID NO: 226334 - protein, 140 aa, Zea Mays
MVGHVSPVSSSRYRPPPSPPPPRRTCASPSSPPLLLRTRLTFHWRRRRRHIGRSSPPNLIQIQSLPSESRIRNVSSLPLDPAAGAPPPDPVVNSITPSSTSLSPPPSALTHRFYIATSLVVEDTEDLILGWMKSHKLLKI

SEQ ID NO: 226335 - protein, 1117 aa, Zea Mays
MPGAGVKPPAPPVEAATGLPPRRLTPSRVSAKRSWPPGCGRFPAPLPAPASPAAAGPEVNGVDGAFTIVGGRADDEAAPAVISPSAQNGCPDKVEEAVAAATVSPLPENGAPPRPQGSDKVEEAAATVSPLPENGAPPRQQGSDKVEEAVAAATVSPLPQNGAPPRQQGSDKVEEVADPAAVSPVAQSCGLPHQEDDKVDDLSAVLPAARSSALPHALPQSGPERARQDGDGGENGEVQLVGGAVKLSSDGQQGDRVVQVAGPTLEVLGSCTTVGASSMQNGGEGDGLLVAAEKGCGGSSDMGQEVAANDFTEIENKTGTGELQGKENGIAGSRTKRWSSESSLNPLPKRRAVSAVRKFPPGCGRTIVTTADSGVLEVSPIRSFAPSFGMSAVNTTGSGDREWLPSEATPVNNGDALVAIPVLVLGESAFPTSAIEASNKKVESKKIVDEGHSKAHNRVQVRDDFAGTKQDGDQRNVVSKATQRNVSDEKMNGKFSAHKGEQVAQEMVDHKMKNELESSLQRSNLRTPLSNPIDVKVKRLDSGKMNAGLLGNARSSAGGKMQSKTLSAKKEVSSNMNTKQNKFAHKLKSDDTSKGNLHLSARESKLGTHVAINQIEEPNQIIVQALMAPDNCPWTRGRKSFASASKSLVPRNKLKGKDGSASKSLVRMNKIKEKDTTRKDILARKVTSNESINDETMDDNETRGREPIDSTSKWLVPVNKLDATPNDIPVGKVVSCDSSNDEAMDDNDGIILEDDDNSRALVVYGQKQEMCLTVLPVVPSGSHHKQSRDHDIDARSKVRKLLQLFQATYRKLTQVEEQGKRKVGRIDIEAAKALKNDPIYKKLGAVVGNFPGVEVGDEFHFRVELSIIGLHGPLQAGIATSKVNGINVAISIVASGGYPDELSSSDELIYTGSGGKAGGNKEGDDQKLERGNLALKNCIETKTPVRVIHGFKGQNRSEIGHSKGKQTSIFIYDGLYEVLECWQEGPKGERVFKYKLQRIAGQPELALHAVKATRKSKVREGLCLPDISQGRERIPICVINTIDDMKPAPFKYITEVIYPDWYEKEPPKGCNCTNGCSDSITCACAVKNGGEIMFNFNGAIVEARPLIYECGPSCRSR

SEQ ID NO: 226336 - protein, 762 aa, Zea Mays
MTRAAAEAAGEVVVEEDLPPSCDPQTQARWYQLEALERALAGNTLVFLETGAGKTLIAVLLLRRFAHRIRSSPPPSFAVFLVPTVVLVNQQAGVIKEHTDLRVAQFYGDMGVDFWNADTWRGRIDGAEVLVMTPQILLDNLRHSIFRLRDIPLLIFDECHRATGNSPYACILKEFYHPQLNSRPSDSIPTIFGMTASLIARNLALDKYSEEISEFENLMNAKVYTVASESALLQYIPIATTKIVEYDDYIVTSELYSHTIRCLNKLETKHLEILKGKLHGSPLENSEKRIKKLNAMFLYCISDLGVWLAAKAAEILQSNKESCVSFWGEELDEKLEGFVRNYVRDVYSDLSEIILKMTKRGVQRHIGEDFAEDLQDGLLTSKVYFLIKSLMGYRHMQDLRCIVFVERVITSIVLEALLSTINQMSGWSVRYMASGRNCGLQHQSRNKHVEIVDSFRSGKVHLIIATQILEEGLDVPSCNLIIRFDQAATVRSFIQSRGRARMQHSDYVLLVRRGDVNALSKTQKFLKSGQIMREESQRLESTCCQPLLNTLCNEEFYGVESTGAIVTLNSSIQLINFFCSKLPSDEYFKPLPRFKIDKALGTCTLHLPMSSPVQTIYAEGKVSIIKKVVCLKACRELHAVGALTDYLLPESSVPCEDEPDIVVDKYKNGQPDYFPEQLVDNWSSFSRRGFYYCYMVSLEGCSKTTPAEIVLAVKCDMGSDFISNSFKLWGVQDYLSFTMRYVGIIHLNQEQHLLELCIYFCQ

SEQ ID NO: 226337 - protein, 600 aa, Zea Mays
MKLARYPQTSESNRNLRIESISHETFALSHRSLLFDNFGDDEAQSDSFSQSHSSHSASNVVSSSESSEQVASGSSGVNYAATEGSKNYDSLSSWGEDPWVASNSSEECQSTDDVSKLRKELQETLVVYDKACANLVSVKKKIQVLSIECSEEARKVEHALEWEEALKQTVSDEKAKQLEVISEVEQAGKSFTREAYSRYKTEMAASMICQDKVQIVDAILTKSRSCRRYSKRDIELATDNFSEERKIGEGGYGNVYRCTLDHTEVAVKVIQENSIDKTDEFLKEVEILSQLRHPNLVLLLGFCPEIGCLVYEYLKNGSLEDQLFNSEGCQPLHWFLRFQVVFEVSCGLAFLHARSPEPVVHRDLKPANILLDRNYVGKVGDVGFAKFVSDLVPDWQTEYKDTIVAGTLYYTDPEYQQTGTVRPKSDVFALGVVILQLLTGRRPDGLVASAENAVRNGRLADILDWSQAGWPLAEAEVFARLGLRCAALRCRDRPDLESEVLPELDEILHRITFAVSLRSPKLTSVPSHFVCPITQELMEDPHVAADGHTYEHYAIRAWLKRHRTSPVTRSKLQNSSVIPNHSLRGAIQQWKSQLPAQTNE

SEQ ID NO: 226338 - protein, 582 aa, Zea Mays
MIHGPKPEPEPVHAQKWTPPPPPPAVQDNHIMSPFARTTGHSAGSARKAFPDFSLPESSDISFIGSAPRRSTERYPPRLSSGSDGVDQQQQHSFEASRTPSRWGDSFGNDSTSHSQTSTSSWCSQPPDEMEAEMKRLRLELKQTMDMYSTACKEALSAKQKALELQRWKMDEEQRSQETRLTEESAMALIEQEKAKARAAIEAAEASQRLADLEAQKRISAEMKALKEAEERLRSMAAGARESAVRYRRYTIEEIEIGTDRFNEARKVGEGGYGPVYKGHLDHTPVAIKVLRPDAAQGRSQFQQEVEVLSCIRHPNMVLLLGACPEYGCLVYEYMANGSLDDCLFHRGGGGPVLPWQHRFRIAAEIATGLLFLHQAKPEPLVHRDLKPGNILLDRNYVSKISDVGLARLVPASVADNVTQCHMTSAAGTFCYIDPEYQQTGMLGVKSDVYSLGVMLLQLVTARSPMGLTHHVGRALERGTFADLLDPAVHDWPMDEAHRFAEVSLRCCELRRKDRPDLATVVLPELNRLRALGEDSMDSCTTMSGRGGMHSSSSAFHGNPYSQPRHVIKATPSSSLQNRRFL

SEQ ID NO: 226339 - protein, 62 aa, Zea Mays
MARSWQDWSPEATQAERMCCLHHGPLVLQHNQVMKHELYISFQVPSSVTLNILSNDKLRLCS

SEQ ID NO: 226340 - protein, 416 aa, Zea Mays
MAATSPFSSYPPRLHSKTLKPRHSRPLHHKAAPAASAPRPLLLSFPAPARHCGAGLRASAAQKNSADYKFDEDDDDDEEEEYEYDGEEEEWEEEDDEDAMNVEAMEEEARGAAADLAKRLARELHIDDDVREKRRNIRDKTSVSKHIPDNLLPKVAIIGRPNVGKSALFNRLVGGNRAIVVDEPGVTRDRLYGRSYWGDHEFMVIDTGGVITLSKSQAGVMEELAVTTTVGMDGIPLATREAAIARMPSMIEKQAVAAVDEASVILFVVDGQAGLVAADIEISDWLRRNYSDKCILLAVNKCESPRKGQMQALDFWSLGFSPLPISAITGTGTGDLLDLVCSELRKFEVLDAVEEEKNKVPAIAIVGRPNVGKSSILNALVGEDRTIVSPVSGTTRDAIDTEFTTADGENKIITWK

SEQ ID NO: 226341 - protein, 322 aa, Zea Mays
MGQSYVTAGKHEETPEAFPLPRGVAIVRADAGWAHCVAITDEGDVYTWGWKECVPTGRVIGDQSSVGTKEKDERQMAMATDQGVSPRSQVSRTSSGAASGPSESRGTDDSTKRRRLSSAKHGPESSTSSDESLSAPPCVVTFNTGVKIVSVAAGGRHTLALSDLGQVWGWGYGGEGQLGLGSRIRTVSSPHPVPCIESALYSKDRPSAMKDSGALLTFGWGLYGQCGQGNTDDVLSPTCVSSILGSKMQDVAAGLWHTVCTSVDGDVYSFGGNQFGQLGTGSDQAETVPKLVDATSLENKNARSVSCGARHSAIITGNFKLF

SEQ ID NO: 226342 - protein, 327 aa, Zea Mays
MAMATDQGVSPRSQVSRTSSGAASGPSESRGTDDSTKRRRLSSAKHGPESSTSSDESLSAPPCVVTFNTGVKIVSVAAGGRHTLALSDLGQVWGWGYGGEGQLGLGSRIRTVSSPHPVPCIESALYSKDRPSAMKGNKAAEGHVSKVLGNCVRAIACGGRHSAAVTDSGALLTFGWGLYGQCGQGNTDDVLSPTCVSSILGSKMQDVAAGLWHTVCTSVDGDVYSFGGNQFGQLGTGSDQAETVPKLVDATSLENKNARSVSCGARHSAIITDEGEVFCWGWNKYGQLGLGDSMDRNVPCSVPVDAYHPLNVSCGWWHTLVLADSPT

SEQ ID NO: 226343 - protein, 98 aa, Zea Mays
MDTQQSVVAAAIQSRGMVAAAANHPVSVAAVASGPQLVPCTWRPANSGTRPGSARLVVHTPLAGTPGSKSRRFGRRRRRGSIPGGWSSSSPRCPAWER

SEQ ID NO: 226344 - protein, 144 aa, Zea Mays
MVPCQNTRTSQGAICKPDIRCCVSGREGSGSHLLRPPQQDAPEEAKQAALVFVAWFHPPPHASPTARRLVRASQFRLVLQRLSPVACSSSSHDDGVCPRRRPASSISRAAIRQEDPLRRPPPAAATSQAFRLRRTGRNRPGPGA

SEQ ID NO: 226345 - protein, 329 aa, Zea Mays
MFGYLFLVSLREKALASFSALSSGVLVCTDVAARGLDIPSVDLIVQYDPPQDPNVFIHRAGRTARYDQEGDAIVFLLPKEDTYVEFLKLRGVPLTERECLANTDDVIPQIRSAALEDRNVMEKGLRAFVSFVRAYKEHHCSYIFRWKDLEIGKLAMEYGLLQIPSMPEVKHHSLSLEGFISVDDVDITQIKYKDKAREKQRKKALKRKAEEEAQNPKPERKRPPEKPEKPKRKKTGKQRQSIQTKEDLDELAHEYRLLKKLKRGDIDEEEYEKLTGFGDSDGEASDGDGSNLDERKKGNKAQKKTKQRGKCKSGSKKFEGRSKLRSKRR

SEQ ID NO: 226346 - protein, 172 aa, Zea Mays
MAEASGGRRVARTVVVMAEASAGRGRMVARRAVTAEASAGHTVARTAVTAEASEARTEGCTAGTWAACHGGAWAACCGRRRSRSRVKATSASHCRARPVHSCCSATPASRGAGGGRRRRRGAGGRELRWRLPLRLGSTQRRATGCSVHTAAHASPFIEEERHVRSLRTLTLW

SEQ ID NO: 226347 - protein, 454 aa, Zea Mays
MARNINSDYIDFSHLGGFDMGINFDEFEENVKKLMEVYLDSAHDKAVEFIEDVHAKFYGPFTDDEVPNNDQSSRYVITESSPTSIEKELVGPNTELSTPPACFITMENSSTGCDTDAHKTQSESFSTKSTGLSSMNHVYPENNLSEGAHIDSNDLCIRIYDSSEEVILWNPVSSVKPQQSHELTTIPQDDHALHALETEVTEQVGLNCSGHSDSSVCSGVSPLENSCANCEEKMVLHSANDPVGVTVHDSTTLTQEYHVSYTLHMEQMIEQAGLHCSGHSDILIHTTDFCNALLLEDSSTNYEMTVCLQPYQATLPGTQANRPEVHMVSTISYSANSPVESTIHGTCTSHDSSTSASSCADDPSMSTDSMVKSVDMDGQKHMKNDKIKVHLAPQPENASFKKMLLRNLSRKLRWSKAQADTHQTMAPGSQGAEDPGYPLVSPSDDDLEDSWEIL

SEQ ID NO: 226348 - protein, 92 aa, Zea Mays
MKILVCATSNKVVGVHMCGDDAPEIIQLWTPDANATSMVAGPELDVLSAIENNQRLYCLLIFWNEFGCESFQKVSSVTRADLLSLELLRYLY

SEQ ID NO: 226349 - protein, 313 aa, Zea Mays
MMGEFRQELRDGFIEACLHLVNRDFDALAKDFVTLGLLPPTAQKGEVTKALTGVFENAVNRGVQNISFGDLSGNLGRTMYKFKFQIPSYFSLVIRSLAVLEGIAISFNPKYKVLGSSYPWIARKVLTDSSPKLRSTLQTLLYKDGTFQIDRLESLLTESLRARTEQSLVRNEQDVDSTRYAIKQVLSFTLADQGAFVKDLLLQEIAKGIDALGVATLSSATSAAASRLPFGGGPSPLTSLDDEDATNLRNLYRLLLLLSKVSQKENPSPIPEYNSAIEKEGGSTDELALALYGMTSLPEFLPVLSVIPEVSWT

SEQ ID NO: 226350 - protein, 390 aa, Zea Mays
MVFSEITPEPVAAASLGQVYQARLRSSGKIVAVKVQRPGVQAAISLDIYILRFLASLARKAAKLNTDLPAVLDEWASSLFREMDYREEARNGLKFRELFGKFRDVSVPEMYLEQTRRRVLIMEWIEGEKLSEVRDQYLVEVGVYCSLSQLLEYGFYHADPHPGNLLRTVDGKLAYLDFGMMGEFRQELRDGFIEACLHLVNRDFDALAKDFVTLGLLPPTAQKGEVTKALTGVFENAVNRGVQNISFGDLSGNLGRTMYKFKFQIPSYFSLVIRSLAVLEGIAISFNPKYKVLGSSYPWIARKVLTDSSPKLRSTLQTLLYKDGTFQIDRLESLLTESLRARTEQSLVRNEQDVDSTRYAIKQVLSFTLADQGAFVKDLLLQEIAKMHLV

SEQ ID NO: 226351 - protein, 480 aa, Zea Mays
MRDTKTKGIWIWGTPVEMDVDGSKVSVLYLDTEGFESVGKSNVYDDRIFALATVLSSVLIYNLPETVREADISRLSFAVEIAEEFYGSLQGQDVAFEPAKLLWLIQRDFLQGKSVQQMVNEALQRVPNDNGDRYINEVNQIRDSLAVMGNHSTAFSLPQPHLQRTKLCDMEDKELEPLYVKRREQLKQLVSSIVKPKIVQGRTLNGKDFVSFLQQVYREKMDSLNLPVPVDELQKLHEMTNGEARILFDKQHFGKHHAAQSALKLEDEIKEVYRNFLLANEYQSSKLCEARFSECEDKMDHLQVLKLPSMAKFNAGFTHCNQSFVKDCVGPAKESYERRMSKMLAKSRALFIKEYNNKLFNWLATFSLVMVVIGRFVIKFFLLEIVAWVMFIFLETYTRMFWSAESLYYNPAWHIIVSSWEMIVYSPILDLDRWAIPIVIMLSLGVLYWRCFGRRRKRVKGSLLPLYKNSYKNSSRPRSD

SEQ ID NO: 226352 - protein, 227 aa, Zea Mays
MEDLQGQDVAFEPAKLLWLIQRDFLQGKSVQQMVNEALQRVPNDNGDRYINEVNQIRDSLAVMGNHSTAFSLPQPHLQRTKLCDMEDKELEPLYVKRREQLKQLVSSIVKPKIVQGRTLNGKDFVSFLQQILEALNKGEIPSTGSLVEIFNKAILDRCLKVYREKMDSLNLPVPVDELQKLHEMTNGEARILFDKQHFGKHHAAQSALKLEDEIKEDVLCRCTETSF

SEQ ID NO: 226353 - protein, 1143 aa, Zea Mays
MTVPTKDDSQSGTVADTVPLPTYRSLAAPVRKPVDKFALLPAFLKVRGLVKEHIDSFNYFVNKGIKKIVEANNRIEARNDPSIYLRYLGVHVGMPSVHVEYNIENITPHFCRLTDRTYSAPIKVHIEYTVGKQHEVRRKNNFIIGYMPIMLRSHACILYEKDEAELAKYGECPLDPGGYFVVKGTEKVILIQEQLAKNRIIVDTDSKGRVIASVTSSTHAIKSKTVIFMDKGKIYLQLNQFNKPIPIIVVMKAMGMESDQETVQMVGRDPRYGDLLFPSIQECASERIYTRQRALQYMDEKEGRSYSILRDVFIAHVPVKNGNLRPKCIYTALMLRRMMDAIVNSDTFDDKDYVGNKRFELSGQLISLLFEDLFKTMNSQAVERMNKNSDKTHSSPLDFSQLIMQDSITFGLERAISTGNWDIKRFRMHRKGVSQVLSRLSYMASLGYMTRITPQFEKTRKTSGPRALQPSQWGMLCPCDTPEGEACGLTKNLALLSHVTTDQEEGPLIYLCYSLGVEDLLSLSSEEIHTPGSFLVMFNGLILGKHKDPQRLVIDLRNLRRSNVIGEFVSIFINEKQHCVHIASDGGRVCRPLIIADMGISRIDETHMEKLRHGTCGFDDFLRDGLIEYLDVNEENNALIALYEHMDQDDVERSSITHIEIEPLSILGVVSGLIPYPHHNQSPRNTYQCAMGKQAMGNIAYNQLFRADSLLYLLVYAQRPLLTTKTIELVGYDKLGAGQNATVAVMGYSGYDIEDAIVMNKSSLDRGFGRCIALKKYTVLKDNYGDGVSDMIVEPQRDNGVLIKQNMRALDEDGIAGPGQIIRNHDIYVNKRTPKNTSKGIGRALRESDYKDSPALYKGVDGETTVVDRVMLCSDTNDKLSIKCIIRHTRRPEVGDKFSSRHGQKGVCGTIVQQEDFPFSERGICPDLIMNPHGFPSRMTIGKMIELLGGKAGVSCGRFHYGSAFGEPSGNADKVADISSTLIKHGFSYNGKDFLYSGILGQPLEAYIFMGPIYYQKLKHMVLDKMHARASGPRVLLTRQPTEGRSRDGGLRLGEMERDCLIAYGASMLIFERLLLSSDPYQVQVCRKCGLLGYYNHKLKTSYCSMCKNGENMAKMRLPYACKLLFQELHAMNVVPRLKLTEV

SEQ ID NO: 226354 - protein, 343 aa, Zea Mays
MASPPPTSLSSPHLIHLRLQPLPSVPPLHLTTLPFLRSLPLHLHSLRLNRPHLPPLPLASSGSGSDITGSGGEDDLPPSGGGGGGGGGEGDGEGEGDGSEGDSVNRREALFVLAQLGRKLESLPADLAAAVEGGRIPGEIVRRFVDLEASPVFRWLLQFGGFKERLLADDLFLTKVAIECGVGIFTKTAAEYEKRRENFVKELDFVIADVVMAIVADFMLVWLPAPTVSLQPPLAMNSGAIAKFFYNCPDNAFQVALSGTSYSLLQRVGAILRNGAKLFAVGTSASLIGTGVTNALIKARQAASKDFAGEVENIPILSTSVAYGVYMAVSSNLRDSYVCGEKQ

SEQ ID NO: 226355 - protein, 493 aa, Zea Mays
MDRIRGGKNDFDAACLTEVQNYRIFASTWNVGGKSPPRGLNLDDWLHSSPSADIYVLGFQEIVPLNAGNVLGTEDNLPAKKWVSLVRRTLNKNPGSCCYGGYRTPSPVPDPVVEQNADFEGSSRRLDSLSYLHRRSFNLSRSLRVEGDHMLPHQRLDRRFSVCDPVSLGGRPSDFDRNFPFMGSPDDHCIEEDTSNEAYFPPFPYGYGASAPMEENDHQTNTSRYCLVASKQMVGIFLTVWVRSEIRNDVRNLKVSCVGRGLMGYLGNKGSISISMSLHHTTFCFVCCHLTSGEKEGDELRRNSDVMEILRKTRFPQVRGAADVKSPETILEHDRIIWLGDLNYRIALSYCSAKALVEMHNWKQLLEKDQLRIERRCGRVFHGWKEGRIYFPPTYKYSFNSDRYSGVRPKEKRRTPAWCDRILWYGNGLSQLSYVRGESRFSDHRPVYSIFMAEVESARHRRRNMGYSSSRIEVEELLPYPYSSGEMKFYWFG

SEQ ID NO: 226356 - protein, 98 aa, Zea Mays
MSHPMEECGTNQPIEKVLAAEDAARGCCSIRTTPTSCSCAGSWRSSSRLPNFSTPLSSRAAASWVSSCSTSRLAQLRQQRRHRHCQHQLPMPSRPAIL

SEQ ID NO: 226357 - protein, 591 aa, Zea Mays
MPLHLHLLSSPATAAKLAAGLRAAPLRRCHSLAPAPRHTDRVALASSLSAVARSAGPAVAAAQTKPSVSGKKQVLISLSDKTDLAYLGNGLQGLGYSIVSTGGTASSLEAAGVSVTKVEEITHFPEMLDGRVKTLHPSIHGGILARRDQEHHLKALKDHGIGTFDVVVVNLYPFYDKVTSGNISFEDGIENIDIGGPTMIRAAAKNHKDVLIVVDHNDYPALLEYLKGKRDDQQFPRMLAWKAMQHVASYDSAVSEWLWKQSNKGEMFPPSFTVPLELKSTLRYGENPHQSAAFYADKSLSLVGAGGIATAIQHHGKEMSYNNYLDADAAWNCVSEFDSPTCVVVKHTNPCGVASRKDILEAYRLAVRGDAVSAFGGIVAFNTTIDEEIREFRSPTDGETRMFYEIVVAPGYTEKGLEVLRGKSKALRILEAKRSGKGMLSLRQVSGGWLAQESDDLTPEEITFTTKSERSPQENELADAKFAWLCAKHVKSNAIVIAKNNCMLGMGSGQPNRRESVRIAFRKAGEEAKGAALASDAFFPFAWNDAVEEACQNGIGIIAQPGGSKKDEDAVACCNKYGVSLVLTGVRHFKH

SEQ ID NO: 226358 - protein, 708 aa, Zea Mays
MESSTAVASAALLLALLGSLLQQTPAALASVSGKPRSSYVVYLGGHPPRADGVSLEVASRRATDSHYDLLGAVLGDREKARQAIFYSYTKHINGFAANLDPGAAAEIARYPGVVSVFPNRGRKLHTTRSWQFMGLERDGDVPQWSAWEKARYGEDTIIGNLDSGVWPESESFDDGEMGPIPDYWKGICQNDHDRAFQCNRKLIGARYFNKGFGDEVRVPLDAAFKTPRDENGHGTHTLSTAGGAAVRGASAFGYAAGTARGGSPRARVAAYRVCFRPVNGSECFDSDILAAFDTAIDDGVHVISASVGGDATDYLNDAVAVGSLHAVKAGVTVVCSASNEGPDLGTVTNVAPWILTVAASSVDREFSAFAVFNHTRVEGVSLSARWLHGKGFYPLITGDQAIHPGSKQEDAQLCLVGSLDPEKTRGKIVVCLRGNIPRVDKGAAVRHAGGAAMILVNDEANGNVLQADPHVIPAVHISYADGLRLSAYIKNTKVPSGFVVKGRTILGTRPAPVMAAFSSQGPNTINPEILKPDITAPGVNVIAAWSGATSPTDKSFDKRRVAFNILSGTSMSCPHVSGVAGLIKTLHPDWSPAAIKSAIMTSATVLDAEMKPILNSSYAPATPFSYGAGHVFPSRALDPGLVYDHPHEPPRPQLPINHCARSSRRHDHDGPAQAQERRAAGDVHGRRRRARGDARVGDTGDAGVQGNR

SEQ ID NO: 226359 - protein, 965 aa, Zea Mays
MADLVVGLAKTVVEGALTKAQSAIEEETKLQQSVQHNLVFIAGEFEMMHSFLNVANEERVKNNVVRTWVRQRQMLPPCLAASALPIKEAVTEIEQLKVRVEDVSRRNSRYSLISDSGSKPIMQQQTAPKTIFGTMVLDMMVEARDTAKRQQGLGDLTQLLTKEQADLGVISVWGTGSELGTTSIIRKAYQDPELCQKFECRGWVKLTQPFNPHEFLRSMVAQFYANSCLQNGMVINVDELKRIEEMATTGGGLIGAFMDKVNENRYLIVLENLSTIGDWDTIGTYLPDRKNGSRVIVSTQQCEIASLCIGHSYQVAEVKQYSAEHSVCVFFEEVHRQKPSSPIKDSIDEELQELILKCGGLPKVIVAVANFLAPKTVSWMDSASSMNLKFMQELESSPEFACLQPLFGWLHSYFRTCPDFLKPCIFYLSIFPRDHSIRRRRLVRRWIAEGYARDTDKISAEERGEQFFCRLLDLSIIMQKPYSVTTGFRDSRMTLCQVNSFVREYIISRQMEENLVFELGGSCTLTSQRMGRHLIILKSWDRDRIVFESIDFSRLRSLTVFGEWKPFFISDRMRLLRVLDLEDASDLKDEDLKQMMKLLCRLKYLSLRGCTGIYSLPNSLGCLRQLETLDVRHTAIATMPRTITKLKKLQYLRASTTKPTKEQPTPDTAVTPKPTKKQPNPHTSVSWTSSLFHRHRQLEGVVVPTGLEKLTALLTIGVVNVNSARGRSILKEVRKLTQLRKLGVSGISRNNSKDFCLAISSRAHLDSLSVKLKKDNQDCLCVTPDGYLPPKNLQSFKLYGLADSFPKWINQLENLRKLVLEMTILTQDTIKGLKDLKVCILRLITKQLPDGKLNFCVMLHGQQLRCYETVKILEISCSSSLDVAFGSQSLQNLELLKVSCCSGSGSVMKLSGLEKLSESELKEVQIKGSDDFIVKTDVEEQLARHPKKPVLKVEKVLSSTGDFEL

SEQ ID NO: 226360 - protein, 432 aa, Zea Mays
MWVFYLISLPLTLGMVVVTLRYFAGPAVPRYVVATVGYAWFCSLSIIILVPADIWQTLTASAKGGIGFFWSWSYWSTFILTWAVVPTIQGYEDAGDFTVKERLKTSIHMNLLFYSIVGAIGLIGVILLLIMHRAWDGGIVGFAMACSNTFGLVTGAFLLGFGLSEIPRNIWKNAYWSHRQKVLSHRVAKMAVKLDNAHQEYSNAIVVAQATSNQMSKRDILRPYMDIIDNMLSQMLREDPSFKPSGGRFGENDMDYDTDDKSMATLRRQLRRAHEEYYRGKSEYMTCVMEALKLEDTIKNYERRDASGWKYVSSFRDRRSGTLGPILDTIEFIWQCILRKQLQKAFAVILGCMSAAILLAEATLLPSVDLSLFSILIKVVGKQEVLVQVAAFVPLMYMFICTYYSLFKIGMLMFYSLTPRQTSSVSLLMICS

SEQ ID NO: 226361 - protein, 561 aa, Zea Mays
MPTTHRPLVRSNPRLSPPRHRSPSIPFQWGGPRLLLLLLLRRHHHDHRRIACPSAVWNLHRRRNRSSMESSSKSSYSKLSAANDKMDSDAAGSHESARSNGLSVDAADKAPAAGGAGRADKTSDASTGSSDDSLVDSSGGTGRHTKRHTGSDRRWEAIRSASAGGSPLSLVHFRLLKRLGYGDIGSVYLVELRGTGTFFAMKVMDKEALISRNKLVRAHTERQILGLLDHPFLPTLYTHFETDKFYCLVMEYCCGGNLHSLRQKQPNRHFTEQAARFYASEVLLALEYLHMLGIVYRDLKPENVLVRDGGHIMLSDFDLSLRCSVSPMLVRSSSVHAAANNGVVHADGASQQGQGCIQSPSAFFPRIVLPKKSRKTSRSDSSIKDGSILEFNAEPTDARSTSFVGTHEYLAPEIVRGEGHGSAVDWWTFGIFLYELLHGTTPFKGDSNRATLCNVVDQPLRFPDAAPPVPVSTVARDLIRGLLVKDPQKRIATRRGAAEIKQHPFFDGVNWALVRDAHPPSVPDPADLGRFASKEKPAAAVATAHRAPAAKPKTGNFVQYF

SEQ ID NO: 226362 - protein, 608 aa, Zea Mays
MMEFLEKLTQPGCFGNTISDGAILHLSTRVGDDVLTLGGPGYKVWQEFWITGDVDGRGIPVSNPNGPLDHDLFLLCARDTVKLLRNHASLALWVGGNEQVPPVDINKALKNDLKLHPMFVSYQTSKSEVIYLSEESTDPSKYLDGTRVYVQGSMWDGFANGKGDFTDGPYEIQYPESFFKDSFYKYGFNPEVGSVGVPVAATIRATMPPVGWSIPILKKRIDGYIEEVPNPIWDYHKYIPYSKPGKVHDQIELYGAPKDLDDFCEKAQLVNYVQYRALLEGWTSFMWTKFTGVLIWKTQNPWTGLRGQFYDHLQDQTAGFYGCRCAAQPIHVQLNLVTYFVEVVNTTADELKDMAVEISVWDLDGACPYYKVTEKIVIPPKKVKQIIEMKYPKMKDAKPVYFLLLKLFRLSDNGTISRNFYWLHLPGQDYKSLEQYQQKKIPLKIDSDVSVSGTRHKVRMTVENISKKSVVDSTRSVSAMDLGDASGSHSTRKETTRKGNGSDGLWRKIRSGLGVARPSDNRRTLEVSGTDSGVAFFLHFSVHTSESSTDGEEYNDTRILPVHYSDNYFSLTPGENMAVDISFEAPQGSSPRVVLRGWNHHLDHAVMI

SEQ ID NO: 226363 - protein, 465 aa, Zea Mays
MQTDYMSLNASLVLFAEAVKGSLLSTNLEVQAGTLDLIFHFLSSDANICALLQTLIDENVADYIFEVLRLSEIPFHPVQSHVLRLVWICMANCSGILSLPQEEQIACTLTAILRRNLNGELDMSSETFILVCSILIEILKSPHAHDIEKLPSFIEEASKYAISSTLSHGYDSTILSTHSLLLLKEALIFCLEGSKYNIARTKDLEDSIMGTCGTILLQWLESAVVDGNDEETLAEILQIFQIILSRASDKKPLKFAELLASSSWLCANNQILASVEQYILLNGGTFPYEINGSIMLTLLVHLYAFIRGLSHSCSIPHSPEAENTLFHLIIHKDWDLLVIRVHSVAIKWLFQKQEIMEPLAFQMLKFCRTFCEDETVMLSNSSQLVDMQMIAELALSGETTISSLLVSLLDQMLKEGTEDELFSVVSVIAEILMISPCSSDQFISCANASTFGQEDEWLPLVLKML

SEQ ID NO: 226364 - protein, 368 aa, Zea Mays
MQTDYMSLNASLVLFAEAVKGSLLSTNLEVQAGTLDLIFHFLSSDANICALLQTLIDENVADYIFEVLRLSGNNDLLVISSIRVLLLFARSEENFKEKLAIGFSTLLPVLHYVAEIPFHPVQSHVLRLVWICMANCSGILSLPQEEQIACTLTAILRRNLNGELDMSSETFILVCSILIEILKSPHAHDIEKLPSFIEEASKYAISSTLSHGYDSTILSTHSLLLLKEALIFCLEGSKYNIARTKDLEDSIMGTCGTILLQWLESAVVDGNDEETLAEILQIFQIILSRASDKKPLKFAELLASSSWFSLSFGFMGLFPTDHVKSLVCLVTSLIVDRLLGCNYGETIRDAHIYLPSDPTENDVFTWAM

SEQ ID NO: 226365 - protein, 143 aa, Zea Mays
MINMAGRGLEVKPGPTVNFISCKTDLNNFFVEYFVSLTSFLLLASYIMALDSEDEENELNVLVIKENGKGEVKEDQRSEEKAVAAASKSSLGLEKKARMSMSLMILMREKVKLKNAQMWLFMDDSIKKPATCNQILRNLPPAT

SEQ ID NO: 226366 - protein, 74 aa, Zea Mays
MGWVPATASREKAYIHLNNKIPDDLKFDLNCLFVTHGKLCQSCTKKVGSDKRKSSNSACPLAGYCCIGEKLQQL

SEQ ID NO: 226367 - protein, 309 aa, Zea Mays
MQCPRLALLVPLPCRESSPPTSSPEISPPETRPRHGCRSFRPACPPRPPLPRGCCQNWWVDDLSVVKVDHSQVLLASVTFSAPMPLLRLRVASPRSGLPAAIDGSAVSVHFRRMSVFASTRPVAAALGAAAFEEAVVKYEPRALAVSVAASTLDLGKHEVNLTRLLPLSFEDLEDDGDSGFEKWSTSFRLSGPVRGARLNVTFSCSLLAGGGTSEQHRGGEVAGLRRGSMARAVSVQVPTPLPARSRGVRVLHEVLPSLRSARPVPSSVADGGPDARKEEVAAPDCTEEGSPEAKHCTSVEPVFVSFGG

SEQ ID NO: 226368 - protein, 900 aa, Zea Mays
MPPGSASAAAIATRFATHWIADALAGDEYIDFSVLKVLVGASSKPLAGAPEFTRERVALRCIQEVSSVIAAGGDAADTAGVLRVDGAQSCQNVLFQLMREVGSPGDLEKDLLPHFSQDIQEYLCTEKFMLPETSFQMLKQVDPLLTSMALQSQMEHNDTEQCDNDQSLRSSHRCVNIEKPVFVFPTDVVNESETGNLQKDPPAPTSVFHQPCMPQSRSYVPPQEDTIDAVGLGTRSSERIPIVEGNMSVGSVLASDGCDAPLQGSITEPFSQQDKHDHTATVEPKSCKQKSPSLSHCADGDGANDGGSSNQSSKVSIHEGLSSHATVTSGFDRISDVLPTDASGPEHLPECITAQDTNMISQLDSRKAHLSALQQDRGEKVTQDLEDISANIGLVEKDHVHGDLTLQSASVLLSISCNGANQGSKSETNLQPGIVATEDRMALEEQNADKSHLEFSDTNMANQALHDDCSVMKNNAVHGGLTAQTAAVSQNCNVTLHDKTSEANCFSEPENEKNIQKNNCHTYVPGSSQDRGGESAKETSNELKSKDASPEIFVHFEDQYIIDTLEGLSQQDLCLKCGKGGQLLECSRCFLAVHSSCLGSSATFEGTNLFYCPICSYKKAIEACKKANKTYCEARKNLAALLSKTQVTKQVQPGDAHENEVNNLAHQVKEPNQQRRKQKINAIVLQNNNEIQVKDSEKRRQAVDEEGRKEASNDNSSHETGSSSQIRCDSPLNQDVEADQDGNLTASNQPGGSDESEATSSDDSGRPSSSWQSSRYWRCTRHNKKGLQDKEPAVSSKSKEDQQMPTSPAKRKSANPQKHYSNPVARARRRRKLWWTAEEEAMLKDGMAKFSPHNDGQISWTQILQYGRGVFNIARLPCDLRVKWRNMQMKERRAVSYTHI

SEQ ID NO: 226369 - protein, 55 aa, Zea Mays
MICILLKRKHAEAKELAVRAIVNNNTMLMLNHPMIEEKLLYSEICERPEIQEVLI

SEQ ID NO: 226370 - protein, 557 aa, Zea Mays
MDESRKRAVSTANGKNISSSLDEDFGNDFLSSWKLPKSGKDTIDFSVDSVPKSSKKFSFDNLDDFGLNGAFDKLPSFQMGMSDLDFSSPDKKKVKHTSSNADLFEKKKETDKDNFSFSFDFNELGKFSLDGKLGIEEKSTNRFNGKSDPVSSEVKKDTQRGLLAKGNAILEENNSKDKMHTLDTRTSRPSHLTNHENVKNASQPTSNIDVADSSDKMQEHTSVNPATMEQTKVDSVLNDNPGEHPKEIYAMKAAVNIPSQDFSCGAISSEDPTQGPADHVNSKDAPIVNCGKVHVSRESNDDEQSNGLQSRDTSIINSNVSRRPSGQFNSQNEVLEESVSLNEGSQDNQSFSGAPKKFLKKTSHGTTNTEEEISGPKILSCSVQREIRSVEPAPMKERGSFSLLSKSVHMKATRVELTSETALNQSSSASKVIKKMTTHPTDLKREHMQANAVPHKSKTALSKTYSKLASNGLLATSMNAKVDTNAKLGLEPPISGKSSLLNARSSTPHSAGHKVVASHVLLKASNTSDSLQGVPSKDNKSSTISQLTGARNQKSEI

SEQ ID NO: 226371 - protein, 699 aa, Zea Mays
MDESRKRAVSTANDEDFGNDFLSSWKLPKSGKDTIDFSVDSVPKSSKKFSFDNLDDFGLNGAFDKLPSFQMGMSDLDFSSPDKKKVKHTSSNADLFEKKKETDKDNFSFSFDFNELGKFSLDGKLGIEEKSTNRFNGKSDPVSSEVKKDTQRGLLAKGNAILEENNSKDKMHTLDTRTSRPSHLTNHENVKNASQPTSNIDVADSSDKMQEHTSVNPATMEQTKVDSVLNDNPGEHPKEIYAMKAAVNIPSQDFSCGAISSEDPTQGPADHVNSKDAPIVNCGKVHVSRESNDDEQSNGLQSRDTSIINSNVSRRPSGQFNSQNEVLEESVSLNEGSQDNQSFSGAPKKFLKKTSHGTTNTEEEISGPKILSCSVQREIRSVEPAPMKERGSFSLLSKSVHMKATRVELTSETALNQSSSASKVIKKMTTHPTDLKREHMQANAVPHKSKTALSKTYSKLASNGLLATSMNAKVDTNAKLGLEPPISGKSSLLNARSSTPHSAGHKVVASHVLLKASNTSDSLQGVPSKDNKSSTISQLTGARITKLGIRSLKSDMALEKESVQVSGTKCSPVTTSRILDSIPEGKPALPSPSIMQKVPEESALNPKAPKVLKHIMRSPAVRKSPRTVPELGNEMICILLKRKHAEAKELAVRAIVNNNTMLMLNHPMIEEKIYSIQKFANDLKSKKYLFEEVGTINSH

SEQ ID NO: 226372 - protein, 690 aa, Zea Mays
MWSEFVDSMDESRKRAVSTANGKNISSSLDEDFGNDFLSSWKLPKSGKDTIDFSVDSVPKSSKKFSFDNLDDFGLNGAFDKLPSFQMGMSDLDFSSPDKKKVKHTSSNADLFEKKKETDKDNFSFSFDFNELGKFSLDGKLGIEEKSTNRFNGKSDPVSSEVKKDTQRGLLAKGNAILEENNSKDKMHTLDTRTSRPSHLTNHENVKNASQPTSNIDVADSSDKMQEHTSVNPATMEQTKVDSVLNDNPGEHPKEIYAMKAAVNIPSQDFSCGAISSEDPTQGPADHVNSKDAPIVNCGKVHVSRESNDDEQSNGLQSRDTSIINSNVSRRPSGQFNSQNEVLEESVSLNEGSQDNQSFSGAPKKFLKKTSHGTTNTEEEISGPKILSCSVQREIRSVEPAPMKERGSFSLLSKSVHMKATRVELTSETALNQSSSASKVIKKMTTHPTDLKREHMQANAVPHKSKTALSKTYSKLASNGLLATSMNAKVDTNAKLGLEPPISGKSSLLNARSSTPHSAGHKVVASHVLLKASNTSDSLQGVPSKDNKSSTISQLTGARITKLGIRSLKSDMALEKESVQVSGTKCSPVTTSRILDSIPEGKPALPSPSIMQKVPEESALNPKAPKVLKHIMRSPAVRKSPRTVPELGNEMICILLKRKHAEAKELAVRAIVNNNTMLMLNHPMIEEKIS

SEQ ID NO: 226373 - protein, 770 aa, Zea Mays
MWSEFVDSMDESRKRAVSTANDEDFGNDFLSSWKLPKSGKDTIDFSVDSVPKSSKKFSFDNLDDFGLNGAFDKLPSFQMGMSDLDFSSPDKKKVKHTSSNADLFEKKKETDKDNFSFSFDFNELGKFSLDGKLGIEEKSTNRFNGKSDPVSSEVKKDTQRGLLAKGNAILEENNSKDKMHTLDTRTSRPSHLTNHENVKNASQPTSNIDVADSSDKMQEHTSVNPATMEQTKVDSVLNDNPGEHPKEIYAMKAAVNIPSQDFSCGAISSEDPTQGPADHVNSKDAPIVNCGKVHVSRESNDDEQSNGLQSRDTSIINSNVSRRPSGQFNSQNEVLEESVSLNEGSQDNQSFSGAPKKFLKKTSHGTTNTEEEISGPKILSCSVQREIRSVEPAPMKERGSFSLLSKSVHMKATRVELTSETALNQSSSASKVIKKMTTHPTDLKREHMQANAVPHKSKTALSKTYSKLASNGLLATSMNAKVDTNAKLGLEPPISGKSSLLNARSSTPHSAGHKVVASHVLLKASNTSDSLQGVPSKDNKSSTISQLTGARITKLGIRSLKSDMALEKESVQVSGTKCSPVTTSRILDSIPEGKPALPSPSIMQKVPEESALNPKAPKVLKHIMRSPAVRKSPRTVPELGNEMILGSGTPKAHVDNAISSRMPPGMGAISDLELPVLENDGNIEKAEACRKELEDICILLKRKHAEAKELAVRAIVNNNTMLMLNHPMIEEKIYSIQKFANDLKSKKYLFEEVGTINSGANDLSSGAWVM

SEQ ID NO: 226374 - protein, 193 aa, Zea Mays
MIEPFDLILILNNLSSQTFETLRRDLSYCDQRVLPLLGVFLVVPLAGNPDTDSPRHTPDTAAPDVLVELHIDPDIGGTHGLLGELPDLLDGIRCLLLEEKQAPSRRGSIYPGAHSTDRGTLGSVRIKQRCANEIRLRRARRRRTRPRGTGRSARRPPSPWRYSAETSRRTGSRPSQRRRRGPRAGGTGSWSPA

SEQ ID NO: 226375 - protein, 985 aa, Zea Mays
MTRVIHDSGDDMQKEALDLVSSDVNFPKGHFPDYRIGPNNQIIDPEETHEAVPLKEIVAKETAQLLEQHKRLSVRDLKEKFEKGLSGASKLSEEAKRREAASLDRQVLLKKLRDVLDTLKGRVAGRNRDDAEEAISLVEALAVQLTQREGELIYEKAEVKKLANFLKQATEDARKVAEEERALALAEIEKARAAIEKVEKAWRVHDFASSSREKAEIEELRKEVREARRIKMLHQPSKVMDMEFELQALRTLISEKTQLCNQLKKELAMIKRLEDDSSGLFELEGSNTLGSQLCIIPRVDGASNITNCPIQWYRVISGGTRELISGATKFMYAPEPFDVGRLLQAEIVLNADKIIVQTDGPVDNAAGLERYVDSLMKRTDIEFNVVVTQMNGKDYSSNSVHVFHIGKLRIKLRKGWSTKARESYSTTMKLCGSRGGGNAAARAVFWHPRKGSSYTLAFETDRDRNAAIMIARKFASNCNIALAGPGDQVHVNIIGSAVAAHAGGEEESRAARLQSFFASVLSGLFGQAEAEDEDEDEEMPTRNHNAAAAAAPQHHHHNRGGAPALGKSKAVPGRADAMNRRAPLGDIGNLVSVRPAEGKPQLQEQINRPITRSFGAQLVKNVQANAAIKNAAILPARHAPRQERKAPAKQPPPEDVIVLSSDSEQSRTQLESSASSVRSRKKVINTLSSVLSARSKAACGITDKRRQVAVIEDIDKLDVNNELAVVEYIEDIYTFYKIAQHDRRPCDYIDTQVEINPKMRAILAGWIIEVHHKFELMPETLYLTMYIIDQYLSLQPVLRRELQLVGVSAMLIACKYEEIWAPEVNDFILISDSAYSREQILSMEKGILNSLEWNLTVPTVYMFLVRFLKAAALGNKVEKENMVFFFAELALMQYGLVTRLPSLVAASVVYAARLTLKRAPLWTDTLKHHTGFRESETELIECTKLLVSAHSSAADSKLRSVYKKYSSEQFGGVALRPPAAAVEIK

SEQ ID NO: 226376 - protein, 1261 aa, Zea Mays
MAEGSSSHRRSAFSPGLAVLLSGDEAKISSQKSHLVSYHDEIGHQAVERTIEHIFDLPHKSVVRPPGPVDTGFVHSVVRNQARKFDLDWENCIRGYHRSVFIVDKGAGQRKVVLDDSSICGSFRNVRGPSLVESSAPFSSARANACVWKGKWMYEVTLETSGVQQLGWATLSCPFTDQKGVGDADDSYSFDGRRVTKWNNDPKPYGQPWAVGDVIGCCINLDAGEISFYRNGTSLGVAFDGIRSVEPKKGYYAAVSLSEGERCHLNFGSHPFRYPVDGFDPLEAPPRSWSFVTYLLRCLFRLLEVHNLEKSESAYFEKLRRVKKFAPLQELFGPISEGICAEIFSAIEASQGCLEYIAWGSLITLLLDVFRTREPHDFSCLDQVLDLFLRFPGCTSLFQELIVALSCMCKVAPLVLTECPYSGSYPFLALVCHLLRHKDVMCLWWKAEDFVFSFEGFLTRKIPNKQDLQCLVPSVWWPGSSEDEVSMTLTMTTLSDAIKKIEEMHRELCSLVICFIPPMSTPQPPGSVFRSFVQSLVLKARGGDHRMVVNGTFNNTVLVSLYTVILHLLSEGFSMDSAGSASSSKANFGNGVGFLHKGGKRKFPTQLFFRNDAYHSVIPRIGGPPSILMHHQFDAVENEVQWDEGCMNDEETRVTHTTAQKPCCCSVTDVAVGLRYKETAKYVPSTSKGSCKPMPERSPHVAAECNGRGLSDEIEDKPSTSAQSEIEYGYQSLHSLENMPMATQSSSETLKEEELLDVMLLLYHLGISPNFRQSQSISLLEETDRQIREKSCSEQVRRLKEARNSYHEDLVDCVRHCVWYRATLFSQWKQRGMYATCMWVVELLLVLSNSNSMFHYVPEFYVESLVDCFHALRRSDPPFVSPALFLMQGLASFVTLVVKHFDDTRIVNPDLKDLLLQSISVLVQYKEFMLVFENNREAINKMPRSLLSAFDNRSWIPVTNILSRFCKGSGFASYKNGESASSATFQVLLRETCIHEQELFFSFLNRLFNTLSWTMTEFSMSIREMQDKNQVADLQQRKCSVIFDISCSLARILEFCTREIPCAFLMGPDMNLRRLTELVVFILNHIISVADAEFFDMTLRRPGQHQEKTNRTMILAPLVGIILSLMECSSTSERRELNDVIAVFASMDCPATIHFGLQYLLSYNWSNVLRGDSSLAKLAQLKEFSHYFRRITASVDGEEEDHSLNAGDEDDDHTCCICYNCDSDATFQPCHHRSCFGCISRHLLNNQRCFFCNAVVTSVTR

SEQ ID NO: 226377 - protein, 846 aa, Zea Mays
MVMGLGSKRRVAEGGTEPEEESSEEYEVEEVCDHIASSRGSRLALFGSDLRLGRFRPRRRRRRPLAGEGAAEGFLHDLVIHPDNRWYQLWTKFILGWAVYSSFFTPLEFGFFRGLPENLFFLDTVGQAAFLIDIVVKFFVAYRDPDTYRIVYSPTAIALRYCKSSFIFDLLGCFPWDAIYRACGSKEEVRYLLWIRLTRVTKVTEFFWRLEKDIRINYLFTRIVKLIVVELYCTHTAACIFYYLATTLPESMEGYTWIGSLQLGDYKFTHFREIDLAKRYITSLYFAIVTMATVGYGDIHAVNIREMIFIMIYVSFDMILGAYLIGNMTALIVKGSRTERFRDKMKEVIRYMNRNKLGKEIREQIKGHLRLQYESSYTEASVLQDIPISIRAKISQTLYKPYVESIPLFKGCSAEFIQQIVIRLQEEFFLPGEVILEQGSAVDQLYFVCHGALEGVGIGEDGQEETLLMLEPESSFGEISILCNIPQPYTVRVCELCRLLRLDKQSFTNILEIYFVDGRRILSNLSESEYGGRVKQLESDITFHIGKQEAELTLRVNSAAFYGDLHQLKSLIRAGADPKNTDYDGRSPLHLAASRGYEDVVQFLVNEGVDMDLTDQFGNTPLLEAVKQGQERVAALLFAKGAKLSLKNAGSHLCTAVAKGDSDFIRRTLAYGADPNCRDYDHRTPLHIAAAEGLYLIAKMLVEAGASVFTTDRWGTTPLDEARKCGGRVLGALLEEARANELAMFPERGEEVRDKMHPRRCSVFPYHPWRAATGEERRIEGVVLWIPHTIESLVALAQEKLGLPGPASRLRLLREDGARVLDVDMVNDGQKLYLVGGEDGDQKYGQ

SEQ ID NO: 226378 - protein, 221 aa, Zea Mays
MLFHYDGQTTEWDAEFEWSRQAVHVSARKQAKWWYAKRFMHPSVLAPYEYVFLWDQDLGVEAFEAEAYLRIVRRHALEISQPGLDIVRGVKTYDVNVRREEGGEIHTSDGFVEVMAPVFTREAWTCVWHMIQNDLVHGWGLDWNFWRCVNEPKKHIGVVDAQYIAHHFGFTLGDQGTEGNRGQVRDRASVEFGIFKSRVDNAEKAWTATTLPVPSDPNSKS

SEQ ID NO: 226379 - protein, 403 aa, Zea Mays
MMAYLLILLRQDQYSQGPPSEAFSYHEDVRISLGLSPKDFLIAIVGTPFSYGDNLMEEALVLQAVSPLLRRYHSENSAQSELKVKIFTGNITEKHRMALESVALSVGFPRGAAEHVAAEDKDILLRTADLVIYYSCLEEQLFPSVLVEAMSLEKLVIAPDLGIIRKHIDDGVNGLLFPRKNVGMLAQVLLQAVSNGKVSISGQKIASAGKAHAKNLMASETIEGYAVLLENVVKFPTDALHPLTVDEIPLALKKEWKWHLFEDVKHLHHMNTSLSSYKILKKLEQEWHRNQMENSSLSTTKISDTFSAIAWEEQRANEVMDIKRKMEEDELKDRNDQPHGTWEEVYRNVKRVDRLKNELHERDDKELERTGQPLCIYEPFFGEGTWPFLHQSSLYRGVGLVSC

SEQ ID NO: 226380 - protein, 366 aa, Zea Mays
MEGVSRATWMLLHIIAGSQCSSLTNQQGDKDGMQRSWCHSGGKDDVLEDGLCDLEVPPVASQNYVGLTSKDIFVEVAPDEFGLPDVDADSKLEKEHIRWLSMQFTISRPLHLESVLLVALGSSTTDLHHTCSTLEDLSLGAFSTQEEAEAYDITTIKVRGLNAFTKFDMSRYNIKSILDSSALPFGGTAKRLKETEAAASARDHTGVLSYDIGGDAHSAVRVGTQRLLQRSEAHRATLVEMVSLQIGAQGVGGMAHTIFDEMPLNSGEEEIALFSGGYSNYSVFDEMPLGDVIWDEEYGHHDLLDQLAPDAYYLAAKRTPYDSVPMNLLNDVAVSAPKYDDLTNVGQAKGIVHYHGPLPCSHPWPC

SEQ ID NO: 226381 - protein, 419 aa, Zea Mays
MSQYPRLQEFLLLVQQQLITILEGGTGYIQVGSVNRYLPLNNVYPPKVPFSYGSSYGSFGSHGSYTGNAGFGNSYGSIGDANAINMYYSPLGSSGLTQIGPSPDVRLRMRLSHDRGIRLSPGSLGPMSVGASPSQFTPPNYHMQIPANSTGTHGSGSPASGVIHGSPLGKAAAVGPYNMRRNLPMPPHDYVSQHGQGRFRDGVSFSHSDACAQGHTGHSHNAAVPSSYHSGWRPKIGSRSGISLEASSSHVPSKAPSQSFDFSASSTLDPANWDPNYSDESLLQEDNSLSADLSSNLHFGDATGQDHIFATSNPVPTNQRGDQLFHVSSQGVSAHSSVLINYGGYNPQNYPQQNARPRHGQPILHQRYNQATSSPMRPMGSHHNGQPAWPSSFGMGDGVPWGGTRGHSFTTRKDYGSIF

SEQ ID NO: 226382 - protein, 495 aa, Zea Mays
MGKWYFPHLKLDRLICTYPWNNSELAETEKTDRLGLVDFLKGLLEFDPNKRWSPLQALHHPFITGESFTGPYEPIPETARIPVARAAAIDHNPGGGHWLHSGLSPQVGSVNRYLPLNNVYPPKVPFSYGSSYGSFGSHGSYTGNAGFGNSYGSIGDANAINMYYSPLGSSGLTQIGPSPDVRLRMRLSHDRGIRLSPGSLGPMSVGASPSQFTPPNYHMQIPANSTGTHGSGSPASGVIHGSPLGKAAAVGPYNMRRNLPMPPHDYVSQHGQGRFRDGVSFSHSDACAQGHTGHSHNAAVPSSYHSGWRPKIGSRSGISLEASSSHVPSKAPSQSFDFSASSTLDPANWDPNYSDESLLQEDNSLSADLSSNLHFGDATGQDHIFATSNPVPTNQRGDQLFHVSSQGVSAHSSVLINYGGYNPQNYPQQNARPRHGQPILHQRYNQATSSPMRPMGSHHNGQPAWPSSFGMGDGVPWGGTRGHSFTTRKDYGSIF

SEQ ID NO: 226383 - protein, 334 aa, Zea Mays
MYYSPLGSSGLTQIGPSPDVRLRMRLSHDRGIRLSPGSLGPMSVGASPSQFTPPNYHMQIPANSTGTHGSGSPASGVIHGSPLGKAAAVGPYNMRRNLPMPPHDYVSQHGQGRFRDGVSFSHSDACAQGHTGHSHNAAVPSSYHSGWRPKIGSRSGISLEASSSHVPSKAPSQSFDFSASSTLDPANWDPNYSDESLLQEDNSLSADLSSNLHFGDATGQDHIFATSNPVPTNQRGDQLFHVSSQGVSAHSSVLINYGGYNPQNYPQQNARPRHGQPILHQRYNQATSSPMRPMGSHHNGQPAWPSSFGMGDGVPWGGTRGHSFTTRKDYGSIF

SEQ ID NO: 226384 - protein, 235 aa, Zea Mays
MGLEAAMALGDPPADYASIATVGLFVAFMCVCIVVGHLLEENRWMNESITMLFIGLGTRAVILFASSEKHSRVLVFSEDLLFIYLLPLIIFNAGFQVKKKQFFRNFITITLFGAVGTLISFTVISLGALGLISRLNIGALELGDYLALGAIFSATDSVCTLQVLSQDETPFLYSLVFGEGVVNDTTSVVLFNAIQNFDHGNISGAKLLNFIGSFLYLFGSSTILGVAVSYMLFRF

SEQ ID NO: 226385 - protein, 416 aa, Zea Mays
MGNCCRSPAAVAREDVSSSHFPASNAKKKPHQARNGGGAGQKRLSVLGDEGCEVVGIDDKYVLDRELGRGEFGVTYLCMDRGTKELLACKSISKRKLRTAVDVEDVRREVAIMRHLPKSPSVVSLREACEDDGAVHLVMELCEGGELFDRIVARGHYTERAAASVTRTILEVVQLCHRHGVIHRDLKPENFLFANKKENSPLKAIDFGLSIFFKPGEKFSEIVGSPYYMAPEVLKRNYGPEIDIWSAGVILYILLCGVPPFWAETEQGVAQAILRGNIDFKREPWPNVSENAKDLVRHMLEPDPKLRLTAKQVLEHHWLQNAKKAPNVPLGDIVKSRLKQFSRMNRFKRRALRVIADHLSAEEVEDIKDMFKTMDTDNDGIVSYEELKTGIAKLGSHLAESEVQMLIEAEYCTSLY

SEQ ID NO: 226386 - protein, 367 aa, Zea Mays
MGNCCRSPAAVAREDVSSSHFPASNAKKKPHQARNGGGAGQKRLSVLGDEGCEVVGIDDKYVLDRELGRGEFGVTYLCMDRGTKELLACKSISKRKLRTAVDVEDVRREVAIMRHLPKSPSVVSLREACEDDGAVHLVMELCEGGELFDRIVARGHYTERAAASVTRTILEVVQLCHRHGVIHRDLKPENFLFANKKENSPLKAIDFGLSIFFKPETEQGVAQAILRGNIDFKREPWPNVSENAKDLVRHMLEPDPKLRLTAKQVLEHHWLQNAKKAPNVPLGDIVKSRLKQFSRMNRFKRRALRVIADHLSAEEVEDIKDMFKTMDTDNDGIVSYEELKTGIAKLGSHLAESEVQMLIEAEVARAG

SEQ ID NO: 226387 - protein, 282 aa, Zea Mays
MAEDDMELWKWVLLPRIRTVTTMLMRIERNKFLIDFLSWEVATTLQVVGTQKNRCTINPGDSCKPKWYSPVGRSFYSPNLGRRQKLGEGLESWRGFYQSIRPTQMGLSLNIDMSSTAFIEPLPVIDFVAQLLNRDISVRPLSDSDRVKIKKALRGVKVEVTGNMRRKYHISGLTSQATRELSYVSFIAGMRFPVDDRGTVKTVVQYFMETYGFSIQHTTLPCLQVGNQQRPNYLPMEVCKIVEGQHYSKRLNEKQITALLKVTCQRPQERELDILQDSGSHQ

SEQ ID NO: 226388 - protein, 252 aa, Zea Mays
MEQTGMTVDEVMRRIQVEDALEQGYGPVHMAASYGNLKVCKFLLKELKLDVNATARDGATPLAFAMYGNASLAIVMLLLDYGANPNKEDKNGIYPLHIAAQRGYYEIAELLLSRGAYVDPQWESRSPLYIAANYGNARIVELLLHHGAQPNIAMKAAISERSFIGLKSLIEAGAPVNIGLPETPLIAAATAGLTDFVKCLVQAGADANIPDDNGRVAVEIAAIQGYQECVEVLFPATAPLAGVADWSIGGLL

SEQ ID NO: 226389 - protein, 252 aa, Zea Mays; identical to SEQ ID NO: 226388

SEQ ID NO: 226390 - protein, 92 aa, Zea Mays
MLIQQIGDTFVTEDTTNVMFPREVTVPGYTHPLVAVGTGYREKFFVKVYAAAFYVDYSLRLDTEQWKAKTGIESFDSSSVFDSIFKDLHFGR

SEQ ID NO: 226391 - protein, 2791 aa, Zea Mays
MKPLSRNIVRFEIVHLVYNPLVDHYLAVAGYEDCQVLTLNSRGEVTDRLAIELALQGPYIRRLEWVQGSQVQLMVVTNLFVKIYDLSQDNISPMHYFTVADDVIVDATLVPSSMGKLVLLVLSESGVLYRLNVTLEGDIGAKILTETVLVEDVISMHRGLSLYFSSTYRLLFVSHQDGTTFMGRLNADSSSITELSYINEDHDGKSKPAGLYCWRELVAGSGILTCLSKSKSNAPLVALLSPHQLVAQNMRHNTGANSSVVGVAAYKPLSKDKTHCLLLYDDGSLHIYSHTPSGGDGSMNLTAEQTKKLGSSILSSRAYTGTKPEFPLDFFEKTTCLTCDVKFNSETTKSGDSESIKQRLTSDDGYLESLTPAGFKVAISNPNPDIVMVGCRIHVGNTSASNIPSEITIFHRVIKLDEGMRSWIDCIEIYGRAKDEFGWKEKMDAALDMEALGGNATGGRSGKRLQIVKAAPIQEQVLADALRILSRIYLLCQPSCFTDMVDGGMELDNMKCRALLETIFQSDREPLLHSAACRVLQAVFPKKDMYHHVKDTMRLLGVIKSLPAITSRIGVGGAASSWVIKEFIAQIHTVSKVALHRKSNLASFLESHGTELVDGLMQVFWCILDLDRPDTQTINSLVVPCVEFIYSYAECLALHSNEKTSVSVGPAVALLKELLFAPYEAVQTSSSLAISSRFLQVPFPKQTMIANDDAPENQAKASASAMNSTSANSQVMIEEDPVTSSVQYCCDGCSTVPILRQRWHCSICPDFDLCETCYEILDADRLPAPHSKDHPMSAIPIEVDTFGGEGSEIHFSVDELTDSGVLHADRSVQTSPSSIHIFDASESADLPETITDQATVSISASKRAINSLVLNHLIEELRGWMGTTAGTRAIPLMQLFYRLSSAVGGPFMDSSKPENFDLEKFVKWLMDEVNINKQFPAKTRCTFGEVLILVFMFFTLMFRNWHQPGSDNSHSKSSGSSDLTDKGPAQVLGSTTITLPSSSADLDKNEFASQLVRACSALRQQKFLNYLMDILQQLVHIFKSSSINGEAGSSGSGCGSLLTIRRELPAGNFSPFFSDSYAKSHPTDLFMDYYKLLLENTFRLVYSMVRPEKEKSAEKDRCYKVPNTKDLKLDGYQDVLCSYISNPHTAFVRRYARRLFLHLCGSKTHYYSVRDSWQCSHEVKKLNKIINKSGGFRNPVPYERSVKLIKCLSTLCDVATARPKNWQKFCLKHMDLLPFLMDNVYHFSEECVIQTLKLLNLAFYSGKDANHNAQKAETTDLGGSTRTSSQSPDMKKNRKADDGSEGSSEKSCMDMEQVVEMFSDKEGDMLKNFINIFLLEWNSAGVRHEAKCVLFGVWYHAKNRLRETMLSILLQKVIHLPLYGQNIVEYTDLITCLLGKVNDFSAKQNHSELVNKCLTSEVISCIFDTLHSQNELLANHPNSRIYNTLSCLVEFDGYYLESEPCVTCSCPDVPYSRTKLETLKSETKFTDNRIIIKCTGSFTIQSVTMNVYDARKSKSVKVLNLYYNNRPVTDLSELKNNWTLWKRAKSCHLTFNQTELKVEFPIPITACNFMIELDSFYENLQASSLESLQCPRCSRSVTDKHGICSNCHENAYQCRQCRNINYENLDSFLCNECGYSKYGRFEFHFMAKPSFSFDNMENDDDMRKGLAAIESESENAHRRYQQLMGFKKPLIKLVSSIGEQEVDSQQKDAVQQMMVSLPGPTCKVNRKIALLGVLYGEKCKAAFDSVSKSVQTLQGLRRVLMTYLHQKSSSDTNALPAFSIPRSPNSCYGCSTTFVTQCLELLQVLSKHENCRKQLISAGVLSELFENNIHQGPRTARTLARAVLSSFSESDEDAVHELNNLIQKKVMYCLEHHRSMDIAQSTREDLLLLSETCALVDEFWEARLRVTFQLLFSSIKVGAKHPAISEHIILPCLRIISQACTPPKSDCGDKESGLGVSSLTLHSKNDDTTGNTASNNPNTKIQSDISGKIYDGSRRDQDIPLLSYSEWEGGASYLDFVRRQYKVSQAVKGSAQKTRHDSYKSDYLVLKYGLRWKRRACLKSSKSDFSKFALGYWVSDLILSSCSQSIRSEICTLISLLCPSNSPRQFQLLNLLMSLLPRTLSAGESAAEYFELLGTMIDSESSRLFLTVRGCLTTLCSLITKEVSNVESQERSLSIDISQGFILHKLVELLNKFLEVPNIRARFMSDRLLSEVLEAFLVIRGLVVQKTKLINDCNHLLKDLLDSLLLESTENKRQFIRACISGLQRHVKEKKRRTSLFILEQLCNLICPVKPEPVYLLILNKAHTQEEFIRGSMTKNPYSSVDVGPLMRDVKNKICNQLDLIGLLEDDYGMELLVGGSIISLDLSISQVYEQVWRKHHGQTQHCLSNVSAITGASSIRDCPPMTVTYRLQGLDGEATEPMIKELEEEREESQDPEIEFAIAGAVRECGGLEIILSMIQSLHDDEFRSNQEELTSVLNLLKYCCKIRENRCALLCLGALGLLLETARRAFSADAMEPAEGILLIVESLTMEANESDISIAQSVFTTSTEAIGAGEEARKIVLMFLERICHPSGAKKSNKQQRNEEMVARILPYLTYGEPTAMEALIQHFEPYLRDWSEFDQLQKQHEDNPKDDNISQKLSTQRSAIDNFVRVSESLKTSSCGERLKDIILEKGITKAAVEHVKESFASAGQTGFRTSEEWTTGLKLPSIPPILSMLKGLAKGHLPTQKCIDEEGILPLLHALEGVPGENEIGARAENLLDTLANNENNGDGFLGEKIQELRHATRDEMRRRAL

SEQ ID NO: 226392 - protein, 614 aa, Zea Mays
MLTGGEWECPQCDFYNYGRNMSCLKCDCKRPATIPSIPASVGSGLGGVAQLLSVTSAGKSEIERKLAESDKKAERWLSKVSQLQDSADLSSLAEDEDFPEIMPMRKGVNKFVVSMHKTPLERRLTNAQYRSNNSPPASDPKISQTLDRILGRSTPTTAPNNQSVTSDAPTEALKKSTDHLGGIDPVPFVPLSADLFAKPQTNNGQSNQNGKINAEDDSSMVNNAVPLPERQSTGSLDTAEIWSEKVAEPDNAKDSPSAVSDENFPEIMPIRKGENRFVVSKKKDRSLTSQQYKRRSILEQADSSDFVPFVPFPPGYFAKKDTPIESTTDTGIVPEGSQPKGNLNNGNWNINYNKHQSQSHGAQCRPSGAAYTGTRIMGNSQGNYNGSNGESTYHGANFEQEPYNKGYRNNNYWSSDNNNSNNAWSNNSNFNNNNDWSGNNSYNSSTENGNSSYNSSHGYNYNGTWSDSNHSAWSSSSSNNNQSGSFVDNNSVTSSRSSMNDANHVSHSSGYGGSSNRGYTGKSLEGSAVKDPDPLDMSEEAKAERWFRRAAQIKDISELANIPDEDFPEIMPMRKGVNRFVVSKRKTPLERRLTSPQYRRNLPIVRSETDEDAS

SEQ ID NO: 226393 - protein, 634 aa, Zea Mays
MLSSSTSRRESKSSDLFRAAAMALRDAANKTAGIEPNKAASNNNVATVAAVSIKEAIAAVRHEGWMVRYGRRKIGRSFFHTRYFVLDNRLLAYYKKKPKDNMVPLNSLLIDGNCRVEDRGLKTLHGQMIYVLCIYNKKEKEHQITMGAYDIEDAMAWKKKIELIIDQQQDSMTAKNRKAFASMDFDMELGGQFLFSDHDSTAEDDEERPTLTRKTTIGNGPPDSIHDWTKEPDIGVSNQNDPNQFCSKKNWRLLRCQNGLRIFEELLEVDYPARGCSRAMRAVGVVEATCEAIFGLIMSMDVTRYEWDCSFRNGSLVEEVDGHTAILYHRLHLHWCPMLVWPRDLCYARYWRRNDDGSYVVLFRSTEHLKCGRRRGFVRAFIESGGFKISPLKCRNGRPRTQVQHLMQIDLKGWFLNYSLSFQYHSLLQILNCVAGLCEYFSQTDDIHITPRIPVMESMFDADSEPKNRKLQEFDTKANRNMGMIDEESDDDDDYQVPEANIEEDVNKSHHDIKRTDEPTEKIDLSCFLSILHRDPEEKSRNCWTIPDSKIFKVRSKNFPQDKSKIPAASYLMELAAIDWFKDTKRMDNVARQKGCVAQVAADRGMHTFVVNIQLGHVFCHKYLEKGILTTTLF

SEQ ID NO: 226394 - protein, 203 aa, Zea Mays
MLPTRPLALSRTKQHPTTTSPPSLLYRSRRPSPPCAMRVGWSATVAGRSAGHSSTLATSCLTTDCLRTTRRNQRTTWVEDRGLKTLHGQQQDSMTAKNRKAFASMDFDMELGGQFLFSDHDSTAEDDEERPTLTRKTTIGNGPPDSIHDWTKEPDIGVSNQNDPNQFCSKKNWRLLRCQNGLRIFEELLEVDYPVCSSFSRFF

SEQ ID NO: 226395 - protein, 785 aa, Zea Mays
MLSSSTSRRESKSSDLFRAAAMALRDAANKTAGIEPNKAASNNNVATVAAVSIKEAIAAVRHEGWMVRYGRRKIGRSFFHTRYFVLDNRLLAYYKKKPKDNMVPLNSLLIDGNCRVEDRGLKTLHGQMIYVLCIYNKKEKEHQITMGAYDIEDAMAWKKKIELIIDQQQDSMTAKNRKAFASMDFDMELGGQFLFSDHDSTAEDDEERPTLTRKTTIGNGPPDSIHDWTKEPDIGVSNQNDPNQFCSKKNWRLLRCQNGLRIFEELLEVDYPARGCSRAMRAVGVVEATCEAIFGLIMSMDVTRYEWDCSFRNGSLVEEVDGHTAILYHRLHLHWCPMLVWPRDLCYARYWRRNDDGSYVVLFRSTEHLKCGRRRGFVRAFIESGGFKISPLKCRNGRPRTQVQHLMQIDLKGWFLNYSLSFQYHSLLQILNCVAGLCEYFSQTDDIHITPRIPVMESMFDADSEPKNRKLQEFDTKANRNMGMIDEESDDDDDYQVPEANIEEDVNKSHHDIKRTDEPTEKIDLSCFLSILHRDPEEKSRNCWTIPDSKIFKVRSKNFPQDKSKIPAASYLMELAAIDWFKDTKRMDNVARQKGCVAQVAADRGMHTFVVNIQYSLVMYFVTNTLRKGSLLQRFFDGDDEFRNSRLKLIPSVPKGSWIVRQSVGSTPCLLGKAVDCSYVRGPAYLEVDVDIGSSAVANGVLGIVFGVVTTLVVDMAFLIQANTYEELPEQVIGAARLAHVEPATAVVPDLSNTSNDSSNSNNDNNNNNNNNNGSSEDDLSKKTN

SEQ ID NO: 226396 - protein, 1040 aa, Zea Mays
MDIKVGGHANYPEELTLYYLDPQGGVQGPFLGADIISWYEDGYFGLELPVRLSQFPDDVPFRPLVEVMPHLAQKTQSRIPLPCDGNSESLESSQSKFESSVPSTSSGRTDQFSIWDSESNAVDPKRGDHEASIPSRSGWLSSPETGKDISNTSNRQQHIPESVNQDAEEVLYTGRPNSSMGQSLRDLENDRADFQSTPHDPHSVAGEANLLQHNVPRDSDLSPLGLLWSELEGRPKQPLSSNVLSVNERRNPKPTTPKDIPPVNMRQGPLSRMNEVSSVRDEWPANFGRLDNMNDANISGRIHQVEAEHHLNFDGHLLLQQIRREQQQQRQEQLMAHNNLEFSGAFPGQVFDPLNQHRQPMNQQIPDVEHLLRIQFELEQQQQRQLQQEQHQRQLQQQRQAQLLQRQQQQQQQQQQQMILEQLLQQQLQGSNFGPTSMVDQVLLREHVLNELHQQPHHLQRQHDAAIEQLIQAKFGHGLHREHHNDMLDVLSRSNQRQMLPLEQQLLLGLQHEQQLKSQQLANALRQHSGQEEERHLSGVWPMDAAAQFIRSGTSPNQIHSRFDLLENLQRSSSFDHHEHLDRSLSLHEQLHMGGQGIRSLERTGSLPGGGPGPNPDVINALTRHHGLSQLETHGDVYPLVQMPMLPSGVHPQQLRHQDQLPGSHIGRLERHWSDANGQLQNSLMESSHINQLQIEAEKERRNVEMNLSVDNPHAWGALMNKDRNTEQDLTDMIHKKLVLQSQQSRGFPDVSVPASFRRKDHFVQPVVESPLRSVDMSFEESLSERSLYAKSGQLAQEGSSNLGTLPNSIENTGKFNLRSGSGSMLEQKHFLGIDDVQSDFLETTGGRTSANQLVGSVNELTRGKRQGSSASLAGDDPNLADEGVSKWSDSGMSKGSSHSLLKRSTNQHTTTSQSVPTDLSAIRLKKAGLASSDENKMEAGFASVAQGMEGCVPSNKETGAYGMPSATNNPDASGQSFSEALKSSRKPPLQYDASESADCGPGGKGAKKKTKKGKQIDPSLLGFKVHSNRIMMGEIVRDD

SEQ ID NO: 226397 - protein, 1457 aa, Zea Mays
MLEGTVDRKERRRNAFDADSGLRWLEEERETSLLGRRERKKDVDRDVDNRKIDRRSDNVSARDITDPRAAPASERWHDGSTRGLGNEGRRDGKWSSRWGPDDKEKDSRSDKKVDAEKDETHADKLTFTGRLLSESDSRDKWRPRHRQESHSVGTATHRAAPGFGSEKGRVKDSTNVGFAAGRGRGNPNSVASFNRPSSAGSIGAPAVHGKFAKTAVSFCYPRGKLLDIYRQKNMMSSFDDVHMKLDEIPSVTLSTAAKPLAFVAPDTVEEALLEDIRKGKVISSEGINGIGNKKERAKELEEPASGIDDDMGKASFAIAGLGQEGSSGLISVNDASYVEGTLPSGVSTSLLKISLEENAISNQHGITDTQEGLKTAEIKENADHALGTKLPDDSNTLFEVPSFEHLQEPTRPYQSNNMDIKVGGHANYPEELTLYYLDPQGGVQGPFLGADIISWYEDGYFGLELPVRLSQFPDDVPFRPLVEVMPHLAQKTQSRIPLPCDGNSESLESSQSKFESSVPSTSSGRTDQFSIWDSESNAVDPKRGDHEASIPSRSGWLSSPETGKDISNTSNRQQHIPESVNQDAEEVLYTGRPNSSMGQSLRDLENDRADFQSTPHDPHSVAGEANLLQHNVPRDSDLSPLGLLWSELEGRPKQPLSSNVLSVNERRNPKPTTPKDIPPVNMRQGPLSRMNEVSSVRDEWPANFGRLDNMNDANISGRIHQVEAEHHLNFDGHLLLQQIRREQQQQRQEQLMAHNNLEFSGAFPGQVFDPLNQHRQPMNQQIPDVEHLLRIQFELEQQQQRQLQQEQHQRQLQQQRQAQLLQRQQQQQQQQQQQMILEQLLQQQLQGSNFGPTSMVDQVLLREHVLNELHQQPHHLQRQHDAAIEQLIQAKFGHGLHREHHNDMLDVLSRSNQRQMLPLEQQLLLGLQHEQQLKSQQLANALRQHSGQEEERHLSGVWPMDAAAQFIRSGTSPNQIHSRFDLLENLQRSSSFDHHEHLDRSLSLHEQLHMGGQGIRSLERTGSLPGGGPGPNPDVINALTRHHGLSQLETHGDVYPLVQMPMLPSGVHPQQLRHQDQLPGSHIGRLERHWSDANGQLQNSLMESSHINQLQIEAEKERRNVEMNLSVDNPHAWGALMNKDRNTEQDLTDMIHKKLVLQSQQSRGFPDVSVPASFRRKDHFVQPVVESPLRSVDMSFEESLSERSLYAKSGQLAQEGSSNLGTLPNSIENTGKFNLRSGSGSMLEQKHFLGIDDVQSDFLETTGGRTSANQLVGSVNELTRGKRQGSSASLAGDDPNLADEGVSKWSDSGMSKGSSHSLLKRSTNQHTTTSQSVPTDLSAIRLKKAGLASSDENKMEAGFASVAQGMEGCVPSNKETGAYGMPSATNNPDASGQSFSEALKSSRKPPLQYDASESADCGPGGKGAKKKTKKGKQIDPSLLGFKVHSNRIMMGEIVRDD

SEQ ID NO: 226398 - protein, 1147 aa, Zea Mays
MGKASFAIAGLGQEGSSGLISVNDASYVEGTLPSGVSTSLLKISLEENAISNQHGITDTQEGLKTAEIKENADHALGTKLPDDSNTLFEVPSFEHLQEPTRPYQSNNMDIKVGGHANYPEELTLYYLDPQGGVQGPFLGADIISWYEDGYFGLELPVRLSQFPDDVPFRPLVEVMPHLAQKTQSRIPLPCDGNSESLESSQSKFESSVPSTSSGRTDQFSIWDSESNAVDPKRGDHEASIPSRSGWLSSPETGKDISNTSNRQQHIPESVNQDAEEVLYTGRPNSSMGQSLRDLENDRADFQSTPHDPHSVAGEANLLQHNVPRDSDLSPLGLLWSELEGRPKQPLSSNVLSVNERRNPKPTTPKDIPPVNMRQGPLSRMNEVSSVRDEWPANFGRLDNMNDANISGRIHQVEAEHHLNFDGHLLLQQIRREQQQQRQEQLMAHNNLEFSGAFPGQVFDPLNQHRQPMNQQIPDVEHLLRIQFELEQQQQRQLQQEQHQRQLQQQRQAQLLQRQQQQQQQQQQQMILEQLLQQQLQGSNFGPTSMVDQVLLREHVLNELHQQPHHLQRQHDAAIEQLIQAKFGHGLHREHHNDMLDVLSRSNQRQMLPLEQQLLLGLQHEQQLKSQQLANALRQHSGQEEERHLSGVWPMDAAAQFIRSGTSPNQIHSRFDLLENLQRSSSFDHHEHLDRSLSLHEQLHMGGQGIRSLERTGSLPGGGPGPNPDVINALTRHHGLSQLETHGDVYPLVQMPMLPSGVHPQQLRHQDQLPGSHIGRLERHWSDANGQLQNSLMESSHINQLQIEAEKERRNVEMNLSVDNPHAWGALMNKDRNTEQDLTDMIHKKLVLQSQQSRGFPDVSVPASFRRKDHFVQPVVESPLRSVDMSFEESLSERSLYAKSGQLAQEGSSNLGTLPNSIENTGKFNLRSGSGSMLEQKHFLGIDDVQSDFLETTGGRTSANQLVGSVNELTRGKRQGSSASLAGDDPNLADEGVSKWSDSGMSKGSSHSLLKRSTNQHTTTSQSVPTDLSAIRLKKAGLASSDENKMEAGFASVAQGMEGCVPSNKETGAYGMPSATNNPDASGQSFSEALKSSRKPPLQYDASESADCGPGGKGAKKKTKKGKQIDPSLLGFKVHSNRIMMGEIVRDD

SEQ ID NO: 226399 - protein, 1348 aa, Zea Mays
MCSYQHHLDNSIPLSPQWLYAKPADGKISLPHGSSLELAEKEVRMLEGTVDRKERRRNAFDADSGLRWLEEERETSLLGRRERKKDVDRDVDNRKIDRRSDNVSARDITDPRAAPASERWHDGSTRGLGNEGRRDGKWSSRWGPDDKEKDSRSDKKVDAEKDETHADKLTFTGRLLSESDSRDKWRPRHRQESHSVGTATHRAAPGFGSEKGRVKDSTNVGFAAGRGRGNPNSVASFNRPSSAGSIGAPAVHGKFAKTAVSFCYPRGKLLDIYRQKNMMSSFDDVHMKLDEIPSVTLSTAAKPLAFVAPDTVEEALLEDIRKGKVISSEGINGIGNKKERAKELEEPASGIDDDMGKASFAIAGLGQEGSSGLISVNDASYVEGTLPSGVSTSLLKISLEENAISNQHGITDTQEGLKTAEIKENADHALGTKLPDDSNTLFEVPSFEHLQEPTRPYQSNNMDIKVGGHANYPEELTLYYLDPQGGVQGPFLGADIISWYEDGYFGLELPVRLSQFPDDVPFRPLVEVMPHLAQKTQSRIPLPCDGNSESLESSQSKFESSVPSTSSGRTDQFSIWDSESNAVDPKRGDHEASIPSRSGWLSSPETGKDISNTSNRQQHIPESVNQDAEEVLYTGRPNSSMGQSLRDLENDRADFQSTPHDPHSVAGEANLLQHNVPRDSDLSPLGLLWSELEGRPKQPLSSNVLSVNERRNPKPTTPKDIPPVNMRQGPLSRMNEVSSVRDEWPANFGRLDNMNDANISGRIHQVEAEHHLNFDGHLLLQQIRREQQQQRQEQLMAHNNLEFSGAFPGQVFDPLNQHRQPMNQQIPDVEHLLRIQFELEQQQQRQLQQEQHQRQLQQQRQAQLLQRQQQQQQQQQQQMILEQLLQQQLQGSNFGPTSMVDQVLLREHVLNELHQQPHHLQRQHDAAIEQLIQAKFGHGLHREHHNDMLDVLSRSNQRQMLPLEQQLLLGLQHEQQLKSQQLANALRQHSGQEEERHLSGVWPMDAAAQFIRSGTSPNQIHSRFDLLENLQRSSSFDHHEHLDRSLSLHEQLHMGGQGIRSLERTGSLPGGGPGPNPDVINALTRHHGLSQLETHGDVYPLVQMPMLPSGVHPQQLRHQDQLPGSHIGRLERHWSDANGQLQNSLMESSHINQLQIEAEKERRNVEMNLSVDNPHAWGALMNKDRNTEQDLTDMIHKKLVLQSQQSRGFPDVSVPASFRRKDHFVQPVVESPLRSVDMSFEESLSERSLYAKSGQLAQEGSSNLGTLPNSIENTGKFNLRSGSGSMLEQKHFLGIDDVQSDFLETTGGRTSANQLVGSVNELTRGKRQGSSASLAGDDPNLADEGVSK

SEQ ID NO: 226400 - protein, 751 aa, Zea Mays
MPVQDDDESVSWLVHGSAGDAPAVLLHGSLDIWIHEARNLPNKDILSKRMRDLLCKPSEGMTSDPYVTVQVASAVVARTFVIPDDENPVWAQQFLVPVAHEAATVNFVVKDSDVVGAELIGVVAVRADQLQAGDMVEGAYPVLERNGKECAPGAVLRLSVQYVPVARLTMYHHGVTPGPDFAGVPRTYFPLRRGGKVTLYQDAHVPDGTLPEVRLGNGDCYRHGQCWRDVYDAICQARRLIYITGWSVFHTIHLVRDGHDDMALGDLLRRKSQEGVRVLLLVWDDPTSRRLLGIKMEGYMGTRDEETRRFFKHSSVQILLCPRSAGKRHSWVKQQETGTIFTHHQKTVILDADAGNHRRKIVAFVGGLDLCGGRSHNDSLLWINKIPDIIAIDDEIYSNDDDPERWDVQIFRSIDSNSVKGFPKDPREATSKNLVCGKNVLIDMSVHTAYVNAIRGAQHFIYIENQYFLGSSFNWDSHRDVGANNLIPIEIALKIANKIYSNERFSAYIVVPMWPEGNPTGTPTQRILYWQKMTMQMMYEIIYKALKEVGLDGTYEPQDYLNFFCLGNREAEDTTCTSSGPFSASNPQDQARKNRRFMVYVHSKGMIVDDEYVIIGSANINQRSMEGTRDTEIAMAAYQPQHTWANMLSAPRGQIFGYRMSLWAEHIGAIEESFTRPESLECTRQVRHIGQQNWEKFISSHVTEMKGHLLKYPVSIDSRGKVNPLSGCATFPDLGGNICGSFLNIQENLTI

SEQ ID NO: 226401 - protein, 874 aa, Zea Mays
MCIMCLTHVAMPHYVLNAAKDATSAQFAGVQYRTMETGFSYVFTTSAWKRALFLSSTMKGFRKRKTMAIQLAWMSSSCIHYITDVCLDENAVSSDPLLAFLLDEVVIKDWCKRAVNVLITEIGVIYRSGLETMRSRLSQLQKFATQLAGIYSILEVMVSSFNEAVSAHVNDLHQLIENTLKAKQHLEAMIWCIRHRFIQDICSRYTDHTSWSSDVIQRKAYAEERKWPGFSDKGSDINEANQTTLFIEQALQNLGIEQNYRDKEEDITITCLQNEQSSSMFCSTITTDHCSIDRYPFKNLREAVDVLFLHGASDMVIAKQAILLYYLFDRHWSRPDSEWRYLVDDFATTFGITNRTLLECLVFCLLDDHSSEALKEACSLLPKIFSKETHPKIAQVLLERQRPDMALLVLKCTGRDSFSATENFEKDGISSLSEAVTAVRVRIECGLLTEAFMYHRSYCSKVKEQHSANMTHTEDAFEGSWIYHVEMMMVEFCTICIERNLVDKMIDLPWDSEEEKHLHKSLFESAHEAPMDPIGSLLVVYYLRRYRYLEAYGVDRSLQKFEQKELENATEEIASKIRAIAQWRESLVAKCLDMLPEVQRENVKAINSGEQIQFARTAQISSPAHVGKSQNPVMDLSTTFTSVLQNKSSLFSKNNALTDSSGLIRSSHSERKVPSALQTRAPPHGSPISNMRSTVGGKFPTVGQNVDSPFLRGAKGISSRKGETGFKEGIKYADHDPLPMYLNLSSGDTPTKDYRTSLLKAEANKTTYFQGQDSVGKGEFHFGSRAVKPFNLNGTGAGQNGLAKISGYAGFREDYKVPTKENILSFSKKSSVGGAEASKGVSRWRSDESSEEERTNRESGAPLVTRRRPRFSRR

SEQ ID NO: 226402 - protein, 253 aa, Zea Mays
MALASQYEVTIEKPYGLKFTKGRDGGTYVEAIQPGAAADLTGQFEVGDKVLATSSVFGEEIWPAAGYGQTMYCIRQRIGPLYMKMERRFGKWDGAGDLTEKEIIRFERNSGVVSGRVREIQLQNYQRKMEQKMQREEDLRMGLKLYKDGKYEEALEKFESVLGSKPEPSEAAIASYNVACSYSKLGRVEAALSALEDALKSGYEDFKAVRTDPDLANLRKSEEFEPLLKNYDESFINENAINAIKSLFGLGNK

SEQ ID NO: 226403 - protein, 1200 aa, Zea Mays
MWSMHKSIHRYSFKAIVTNHLVLRGTYRSLTLVIYGNTAEDLGQFNIELGLDHSLANVVSSPSEGKLEDLPPALHSSKLSFEESLSSLKPSSFHATDVDLSIEAKKVLHLALKMYQISDVENLIPNLRSAVLSAISKYVTASTNHILHTLSQDSANAFINSDFDSQEINKILAEAGKELSEIWKNVHAVTESNLFNDNGFTIGVDEDLPTTKILIELFNHCFPYYKKLSLLDLQCPSQSKWLVLSLSLVLLLCSSKESCFYFVDTGGMEQIINLLCWRTPKSAATTLLLLGIVEHATRNGFGCEAFLGWWPRAEHTSIPVGSSDGYCSLLKLLLEKERHDIASLATYVLQRLRFYEILSKYESAVVKVISNIQADKLSTDGVPFLISASVELGEMLKLIIFCGPIEDPSPVATASRIFKSEHLEGLLSYKATIDLITSSKYSFLQYDTDPYLLSLIQERSFFPLSAALLSSPILHLPNGPAAEILMGIASSIESIILSLLFCRSGLSFLLSQPEATELILLSLQDAEKMNKSECITLRQAFVLLSKGFFCRPKEVGLITELHLKVGSAATRILSVPPNSDELLWVLWELCAISRSDSGRQALLALGYFPEAISVLLRSLSSYKDLDSVMAENGGSPLGLAIFHSAAEILEVLVVDSTASSLESWIGFAVDLHKALHSSSPGSNRKDAPTRLLEWIDAGVVYQRNGARGLLRYSAILASGGDAHLSSGNVLVSDSMDVENVVADSNSRDGQVIDNLLGKLVADKYFDGVALCSTSVVQLTTAFRILAFISDDKPVASSLFEEGAITVIYVVLMNCKSMLERLSNSYDYLVDEGAELSSTTELLLDRTHEKAIVDLMIPSLVLLINLLHILRETKEQYRNKKLLSSLLQLHREVSPRLAACAADLSFMFPTFAIGFGVVCHLITSALACWPLYNWAPGLFHCLLENTEATNASVPLGPKAAFSLLCLLGDLFPDEGIWLWKVELPSLSAIRSLSTGAVLGPQVEKGVNWYLHPEHVTILLVRLMPQLDRLARIIDNFATSVLMVIQDMLRVFIVRVALEKIECAVVLLRPIFMWLDDKVDKTSLSERDTFKVHQLLQFTVKLSEHPTGKALLWRMGFTRILSKLLQNCSRASFPYDNQTFGRAHSKNDLMLKWRIPLFKSIAYIFSIDPCNNEKADVEESLNEKSVHECSSVMHDLMMFCQS

SEQ ID NO: 226404 - protein, 1891 aa, Zea Mays
MWSMHKSIHRYSFKAIVTNHLVLRGTYRSLTLVIYGNTAEDLGQFNIELGLDHSLANVVSSPSEGKLEDLPPALHSSKLSFEESLSSLKPSSFHATDVDLSIEAKKVLHLALKMYQISDVENLIPNLRSAVLSAISKYVTASTNHILHTLSQDSANAFINSDFDSQEINKILAEAGKELSEIWKNVHAVTESNLFNDNGFTIGVDEDLPTTKILIELFNHCFPYYKKLSLLDLQCPSQSKWLVLSLSLVLLLCSSKESCFYFVDTGGMEQIINLLCWRTPKSAATTLLLLGIVEHATRNGFGCEAFLGWWPRAEHTSIPVGSSDGYCSLLKLLLEKERHDIASLATYVLQRLRFYEILSKYESAVVKVISNIQADKLSTDGVPFLISASVELGEMLKLIIFCGPIEDPSPVATASRIFKSEHLEGLLSYKATIDLITSSKYSFLQYDTDPYLLSLIQERSFFPLSAALLSSPILHLPNGPAAEILMGIASSIESIILSLLFCRSGLSFLLSQPEATELILLSLQDAEKMNKSECITLRQAFVLLSKGFFCRPKEVGLITELHLKVGSAATRILSVPPNSDELLWVLWELCAISRSDSGRQALLALGYFPEAISVLLRSLSSYKDLDSVMAENGGSPLGLAIFHSAAEILEVLVVDSTASSLESWIGFAVDLHKALHSSSPGSNRKDAPTRLLEWIDAGVVYQRNGARGLLRYSAILASGGDAHLSSGNVLVSDSMDVENVVADSNSRDGQVIDNLLGKLVADKYFDGVALCSTSVVQLTTAFRILAFISDDKPVASSLFEEGAITVIYVVLMNCKSMLERLSNSYDYLVDEGAELSSTTELLLDRTHEKAIVDLMIPSLVLLINLLHILRETKEQYRNKKLLSSLLQLHREVSPRLAACAADLSFMFPTFAIGFGVVCHLITSALACWPLYNWAPGLFHCLLENTEATNASVPLGPKAAFSLLCLLGDLFPDEGIWLWKVELPSLSAIRSLSTGAVLGPQVEKGVNWYLHPEHVTILLVRLMPQLDRLARIIDNFATSVLMVIQDMLRVFIVRVALEKIECAVVLLRPIFMWLDDKVDKTSLSERDTFKVHQLLQFTVKLSEHPTGKALLWRMGFTRILSKLLQNCSRASFPYDNQTFGRAHSKNDLMLKWRIPLFKSIAYIFSIDPCNNEKADVEESLNEKSVHECSSVMHDLMMFCQVLPVGREMLACSLAFKELVYSYTCRSAVTLILSQIHTSNKDVLEKDESDPNHNSPSLDGWNCFSSLFKCWKKLVKYVGSNERTDYLVETIYSLTLGAITLSQYGENLEGLLILRYLFGLPSDPSGSLESSGESPSEIELFMKTYEEKICQGIENSATAVGKTLLRKLLNSIKLLRSILENSGQSADTVQMVLEEGTDSLSEIARSVVMTAHLMPSLANVSVNDESPFLFSNMWKVIVDSEEPLDCQEGEFAKRLVWELPDSSLDRQLAPGQSARRKLALGESASRRVRDNQLPEPTGQFSRGLNTSNASSGHTRRDTFRQRKPNTSRPPSMHVDDYVARERNIDGASSASNIVNSTPRGTLSGRPPSIHVDEFMARQRERQNHAPAPTGDAPQAKSQTTSLDDSLRTKPENLRQPKTDLDDDQEIEIVFDEESGSDDKLPFPQPDDSLQSPPVIIGENSPGPVIDETENQENERVPFFQRATSIPKDDENLGIGISSQTAMLSEANSSLELKHSVSSPGKNSFRDHAEESNYDSIGVSGRPSLQADHQQLSRRHEKRSPRKFSETSLSNGFHGREHRHSNNHPPLPPMPPPISSVSMQNTDSVNRQSSSFSARDRPTPNPSGYPTQSFDSSMPSAFTGLQGQTQYMLAGAGSSSANELPNVEAKLLWNTFPANRIPLETFSSGIWANTEASW

SEQ ID NO: 226405 - protein, 290 aa, Zea Mays
MSTVVMGVDLECHKCYKKIRKVLCKVQDKVSIRTISYDEKNNTVTVSGPFDAEEVADRLTADAGKVITDIHVVGGFGFGLGGGGGGGGGKQQKHGAVAPGKAPKPGKASGNGHGQGGHGGGGHGGGGKPGKNKHVKFDDMDMDDDFDDLDMDEPAGRHAHAHAHGHGHGDGKPKIVRTTNTPIAARLEAPRTGPAMSMAAAAPVRMPMPAMAPMPQQQGMGGAPSIWPPAPEWGYSAQPYGSYSGPPTGGYYGGGGGPAGHWPYGGGYGRNPYGQQYYEDEEPSAACSVM

SEQ ID NO: 226406 - protein, 307 aa, Zea Mays
MGQSKAEFLKQFGGDYGYPDAPRGIDELRAAEFKRLEGMVYLDHAGATLYSEAQMTDVARDLMSNVYGNPHSQNDSSMATIDAVTSVRHQVLKYFNASPRDYKCIFTSGATAALKLVGECFPWSRDSCYMYTMENHNSVLGIREYALSKGATVSAVDVEEVVDPSKNHESDSLFKVSKRSNQRRGDNVLLHNYQNGSLSAISGNNLNLFAFPSECNFSGHKFNLSLVKLIKEGKFMDFSSQQQGQWMVLIDAAKGCATEPPNLTLYPADFVVCSFYKIFGYPTGLGALIVKNATTNYYIDAGDRLPK

SEQ ID NO: 226407 - protein, 409 aa, Zea Mays
MGQSKAEFLKQFGGDYGYPDAPRGIDELRAAEFKRLEGMVYLDHAGATLYSEAQMTDVARDLMSNVYGNPHSQNDSSMATIDAVTSVRHQVLKYFNASPRDYKCIFTSGATAALKLVGECFPWSRDSCYMYTMENHNSVLGIREYALSKGATVSAVDVEEVVDPSKNHESDSLFKVSKRSNQRRGDNVLLHNYQNGSLSAISGNNLNLFAFPSECNFSGHKFNLSLVKLIKEGKFMDFSSQQQGQWMVLIDAAKGCATEPPNLTLYPADFVVCSFYKIFGYPTGLGALIVKNEAASLLNKTYFSGGTVAASIADIDFVQKRKGIEQTLEDGTISFLSISSLRYGFKIIDILTISAIARHTASLATYVRNKMLELKHSNEKNVCIIYGQDFKRPCHMWLVRFGRDRWRWR

SEQ ID NO: 226408 - protein, 507 aa, Zea Mays
MSSPCHSELFLLEKEDPMKKELMQLVVTTRLDPELEVPLLLTGPLKLVHAFLVSPAEVDLAAACVMHVGRPFWLHCPGFFQKIWDTFYLILIYSAVSRGSISLLDIPFSDLSDVVAADDYFYIEGASASIPRSIAKVTLNESKTKVVNFSIAWSSSPDLVQYRPFFSTPELVEFPTSKPGQKAYAYFYPPSNPNFQGLPYEKPPLLVKTHGGPTAETRAILDLSVQYWTSRGWAYVDVNYGGSTVVESDRRDDDGLSEALMLGVGCNIDIILQGKKRFDMNPPVDPFETKSELQDTWFAPNSPSIDNKDFNVGDHIDVKLIEVGADGGSIDELTAFKEKPSENVLSRVSWQKEEVVKEPSVGSFRNLLLYHQACVSVDEDGDHIFISDSNHHRIIISNSNGMILDYKSAKFLRPASSFYHAAEDCQFIVDSENHAVRKADLGRTLQTVYPVFNKSNGIWSWITDKLGMRKEATPTIQDFHADSMPLPWHLIRIFIRFSWEGDCFVNN

SEQ ID NO: 226409 - protein, 599 aa, Zea Mays
MQRNTKGDEHISSQGTAGFLDSHEVVCSKDYLETYLSEETMEDDKAKAVAEVMKTLRVDKLTVDLFCAILCLCEWKVEAAAEYFNFCRGKPQIPEKSLKQKFVFQCKFFYYFVVFHFCIVTRLSCLSPVDFVKGQLQRFFPEDYDSEKIKKNNIESPNLSDQPLQRDLIVAPVKRRLVDEFKSCDLSHRQKRKVKLQGNSLQTQTPRRSPRLVNVNNTCNKNKKVSKGRAKVLKTPPDATDQVKDRAHKSCLLDEKLDNALKAVHEEATGSLSQDLRKLDSPRCEVGLSKEHGHDQGDTGKMLDEVSDVENSKEHVGSDAMGNSESYMSTYCVEPLPTNSRLTAYSRINELSFTWKHSQHASSLEKVLLDIQRDNFVNTIARIQKIVRDDPSDVLSADVIEATVQIEILKWGLCLQDKCAHKIVNTMLDYAKKVKGRHNFNTEMRKEEFSAKLQDLLKWQLKELEFKYTSLESDYKKAMADASNFFSTFEEHRKKLHAIKDGIKDLQQACMTKDDEMQKLALQVAEHATAYQKSIMEKVRVKMALKSHEQTLGYIKEQLASAESGSIDVGALVKIEMDNMSREIELSKQNLLNINFKKE

SEQ ID NO: 226410 - protein, 345 aa, Zea Mays
MLLGRRGHAQVPGALPVDGPRRPHPQSRRATDRVQLLQDVRIPYQQKRMFGFVTFVYAETVKVILSKGNPHFVCDARVLVKPYKEKGKVPGRFRKLQHTHHGGAEFVGCASPTGLLDSRDPYALLLLSGAQNLFTAGTDTTSSTVEWALAELIRHPDVLRKAQQELDAVVGRDRLVSESDLPRLTYLTAVIKETFRLHPSTPLSLPRVAAEECEVDGFRIPAGTTLLVNVWAIARDPEAWPEPLQFRPARFLPGGSHAGVDVKGSDFELIPFGAGRRICAGLSWGLRMVTLMTATLVHALEWDLADGVTAEKLDMEEAYGLTLQRAVPLMVRPAPRLLPSAYAAQ

SEQ ID NO: 226411 - protein, 152 aa, Zea Mays
MIIVNIVHDISRMFGRGSPRMNLIQAAAMQRVSPRSTTNKRKKRTSPKVGRLRANWNSGLEKGLIEILQDHNNDYYKGQNGWSSEAWNRIVKLFHEKFPYVTFTKCQIQDKEKELKRDYKALKEARQQSGVSWDERLCRIEAEEPIWNNLTT

SEQ ID NO: 226412 - protein, 459 aa, Zea Mays
MLGRTRDQIRTTEQVKATIGTCQALKLDALVIIGGVTSNTDAAQLAETFAQLKCPTKVVGVPVTLNGDLKNQFVETTVGFDTICKLISNACIDALSAEKYYYFIRMMGRKASHVALECALQSHPNMVILGEEVSVSKLTIFDITKQICDAVQARAEKDKYHGVVLIPEGLVESIPELYALLQEIHGLHNKGVSVENISSHLSPWASALFEFLPPFIRKQLLLHPGSDDSAQLSQIEIEKLLAQLVETEMDKRLKEGTYNGKKFNAICHFFGYQARGALPSKFDCDYGYVLGHVCYHIVAAGLNGYMATVTNLKSPVNKWKCGAAPITSMMTVKRWSRGAATSQIGKPAVHMASVDLKGKAYELLRQNSSSFMMEDIYRNPGPLQFEGSGADTKPISLCVEDQDYMGRIKKLQEYLEKVKSIVKPGCSQDVLKAAVSAMASVTEMLTIMSSLSFSGQATI

SEQ ID NO: 226413 - protein, 1436 aa, Zea Mays
MGRKKRTSAPNPTPPPLDASRRSPAAAEKPAGIGREDAAVRAEVDKALACLQRGSHARAQRLTRDAIARHGEASPLLLRAHGTVHARAASVLDDHASRARHQRTALQAAQRAVQLAPDSIELAHFHAMLLFDAATDSRAYDEVVAECERGLSIEAPSDPAPHSLRLPGPDVDQVQSELRNLIQKANLASISSWVKNMGGAGDDKLRLIPVRRLADEPMEARLVPTAPSPRRPNEIKKATKTTEERRQEIEVRLAAMRLLQQQKEQSNDVVSATPASSRSHGDDAPSSSESSVGGHRADRRKGGSRKATGSSASERTDQVRAYWGSIPVEQRLAFLNTSISELKSHYASAMHKEKDAASAASDVLNEVIQFANKHDKWEFMVCGRCREQFTHVEAHRWHVMVEHVGLLSSELQEMVPQEIDADWAEMLSGCNWRPLDATAALKLFEEDQHNNLGPDREDESNSLDSWSNKAMDMSESSAWSHNEESSGFGVVVREGDTKWPFSDDDERAKILERIHSSFKILVKNHNLSVHNLNRVIRFAVEELRGLPSGSLLLNHSLDESPLCIRFLEASSLQKVDNFLQDLMQASGLNRNLQKAEGLGDGDSFIQNHDVLEKVTLNSDSSELIIDGHTFGGKFDSESVDTDALLSWLYAGSSIGEQLLAWNRMIDERSNQCVDLIRALGREFNNLQNSCERKLEQLRNEDAFTSVEGLFCEEQTRREQVGRYGFQTFEELLRKRQEFLEHNTEEQSDSNRSEIDAISAILKELHTSHFGYDEALTGMAPRFSDFDGGEEDEWRLHDFIHPNDSMVHMVVSKMKEHVTMEISKIDAKIMRTLSVMRQLEHKLGPVSALDYRMILLPLMRSFLQSHLEELVDKDARERSDAAREAFLAELALDAKKNASKGGDMKQSHEKSKDKKKFKDSRRAKEFKDSSWSDQSLIHQDSADEETTETFQILADCDDLDCKFSTSDDYFNEQEEELRHKVQLEAEERKLEETLEYQRRIEEEAKQKHLAEQCRSTYASSVIGTARLSSTGNQDNHESAINHSSRTYLEGIKFGDFRYTENNFSQKLNGLDSSDAHALTSSDMNAPRWTSTCKIAPYANHSYQTGKQNRLHVLPSDDLQFAHRDHAAGTEKPNFEKVGSGAIPSADLCIKDDFDKRFQEDLDEAVRQSLGYDAYPAGTISTSNETEVYGTGLKNAAGEYNCFLNVIIQSLWHIRRFRDEFLKTSSLHKHVEDPCAVCALYGIFIDLSKAAKGHGEAVAPTSLRIALSKSYPNSKFFQEMNDASEVLGVIFECLHKSYTSRTVCHGKPHEKNSIGSWDCANISCIAHSLFGMDVYERMNCHNCKMESRRLKYTSFFHNINASSLRTAKMMCPDSSFDELLKVVIMNDQLACDQDVGGCGKPNHIHHILSTPPHVFTVGLLLWPALSLFCLQGWTMGHV

SEQ ID NO: 226414 - protein, 84 aa, Zea Mays
MEMGGMSDAERLFFFEMACKNSEVAYEQNPNDADNLTRWGGALLELSQVRTGPDSLKLLEGTSMQGIGAFVMKAKAPGEQALIS

SEQ ID NO: 226415 - protein, 939 aa, Zea Mays
MTSACLRRTQGMVTSIQQDEVSASPLSNVINRTDRMKLRAYSRRSNEENHNHAFMDMELEQDIVLPVPSRRQVERLDYKKLYDEAYEEESSNSSDEEEWSGKELLEGSGTDSLDERLRPVKRCSRRAPAGQQNNELTPQSRPHGSNSEQKTEVLRSNGSSSTGRKYDPEVTQKLKVHFEKDPYPSRETKENLSEELGLTFNQVSKWFSSTRHYSRVASAKKEMHPDSHTCENNDETTVDSMQAKQPNAGVMEKLTGDRNGIVPEKPMVQDNLNQGAMEKLTRDKNDIVPEKPVMQSSLNQCNNEDIPLSGTEIEMESYEQESSDSSDEEWSILSTPRKTRLQDHGKSSVTESLRSAKRCSRRAPAREQNNERIQSEQLHGSASEQQTEFLRSNVSSGKVSKYHFGPIVSQKLKEHFEKDPYPCRATKESLAQELGLTFNQISKWFSGTRHYSRDAVAKNQKRPGENTTVNNNSTTFDDIQVIEPNVGLIDKPAADVNDMISEKLMVQINLNEGIEEDIPPSQYARCEEKITMTPAAISREAGLPGYGPGPGENFLQVSSRNTSCEQSVILAPTAIAREVGPPGYATGENQGNGAPWNTSYERRLFMNPVTSSRAVSPPGYGPEESRGSGISWNTSSEQILFMSPTTISRELGPPGYGPREDQCSGTSWNASCELGVFMSPVTTSREDSPPGYGPRENQENDNMRCELRMFTSPTTISREVGPPGYELTGKNKGNGASCTTNYQQGAFTSPEAFPREACPPGFVSGENQGNDTPWYMSSKQMAFTSPTTNPRVGPPGYGQENQGSRVSWNTSYEQGVFMSSTNISREAGPPGYGPGESQGNITSWISTGGQRMFTGPSTIPNEVGQQGYGPSGIPGTDGSRSMDLKAFPPGYGPAGENQGGGASGSVISPQARSAENVEFSDDARKKAIQRELRRRQKFR

SEQ ID NO: 226416 - protein, 605 aa, Zea Mays
MQQLDFAVTISALLGIPFPFGSIGRVNPELYALSIGTWVNQRRGTNACTSQDDLEAWMGRYAEVLCVNCWQVKRYIDQYSATSVIGFPSEDLQHIMDLYSRAQENWSASLITSSSETCSQEKVEKGSVLLQQIDAYNDFLKSFAKLARSAWTEFDLWSMGIGLLLMMLSVIIQASMLVNMTISQSSDQKSSGSSIIHRLSLAFSLVVIRAASFLSNSYILAEGRVANFLLATSCITSVWHSVLKGNISIENFVFLLLNIFTRFGIEVGMSKQLPAPTITKDHPVSVIYKILGANSCNILLELFPIISLAFVAYIMLKCLSRAICQRFLKFFLLCGTMVSYLSIAFHWASETTLFAHAGTVQEFGRSLAPRIVYTIGGLSLAISAFSRIFGSTVHLKLNKRIIILSAVMLCSWSPTILILLGRQGPFVALICMTGAWCMIKLQQKHQRETELSVADPVSVIQWSLLAVCLFYMTGHWCTFDGLRYGAAFIGFDHFHIIRQGLLLSIDTFGISHVLPILSLPLIAIVWYNTISKDNELKDVILNNINKVLLMYGLITTITATLTIICVAIQRRHLMVWGLFAPKYVFDAIGLLLTDLLICLASIYYS

SEQ ID NO: 226417 - protein, 1130 aa, Zea Mays
MDAEPRREGSDRAPAADSSAAPDGDEAMARGVAAAEKPTAASEAGAGGDVAAAERGRDGETPAGDPGVVADEGGAVGDQCPAAPQASEVDEGGAAGKERSDGGLANGAVEGSSIAGEVPDVAPVVSEARMDEDGGCSTGNEYSEMKMEVDGGCVAEREGDGQEQEQECTAAAVESEVKTGEGDGGVVNQGTTAHAGGLQVKEEVGEGLVGRYIGRSAPGRTRILIGKVVSYDSTAGVYSLVFEDGHAEELGLPQLQELLMSDDNGALGMKVSCRKRKLDLLVSSGSALEVKEPPSTRQRVDGCEMSARPDELQHSASGSDMSEDVESSSNSSDFTREETSEPCPPVQAVELPPSSGDIPVPEESISSLLSVYNFLRSFSVQLFLSPFGLDDFVAAINCSVQNNLLDAVHVSLLRALRRHLESRSAEGSRSASNCLKYALYQHTLNHRGKSFGRSLLVAEYYKLPVTMKLRVLQILCDDVIESEELKTELENRVGYNEEMEYEIESSAFLEAGSRSVSTRAAKASACKNTNDFHNLLESAPNVTNPETAPAVLSQDGNSDDCRICGMDGTLVCCDGCPWAYHSRCIGQNKAFLPQGDWFCPECMVNKLGPTSSRIERGARGAQMFGIDMCGRLFLGTCNYLLVIETASDAESYARYYNQYDVAKVLQSLAVSDAYVDICKQIKDYWKHLLGIIHNERSTTGKEVGAKVALPQTNAQQKFVANQSAMCSVECLEEQKCKSSLGVVTEKNAEVFKQTVSAQNNIHNAHRNGAFGPSVVSSVSHQNGSIVTGGSNIAQAQPAQSIFHPDPSTVSVTSGSFCPSSLGKHHLQMFPERSGNMSGVKAAKLSSFKPQAYMNLYNHGNIAASAAANIAVITSDDSKVSASQLTAKHRKKMAADNALQLKAFSSAATQFLWPSTEKKLMEVPRDRCGWCLACRSSAIGTKKACFLNMATSNAVKCSARILSVMRVIKNSDSHFPSIVAYLANMEESLRGLLVGSLQDMQQKERWHQQLQEASNCRTVIPLLLELESNIRGVAFSASWLKPIDDWPLESPGPSTGASRPAQYQKRGVGGRRGRRRSVASESGTATATDEDNSWTWWTGGNISKRTLQRGALLHSTRRKAARQVDSRFILP

SEQ ID NO: 226418 - protein, 374 aa, Zea Mays
MALATTAVSLHLFLTRPASVLRVGRGLPCLLLRATSSTSASPDFNITFAEPAPSKKAPSAQPLVPWIVRGEDGKPRLSTSPPPDVIQAIALAEAEAKKAAKKETLKGQNGAVAAAAAAASNASVKGKERKPAPTVPPKFSKAARRFYNENIKEREPQRLAKVLAAAGVASRRTSEELIFQGKVTVNGSVCTSPQTKVDISKDSIYVNGNRISKKLPPKLYFAVNKPKGYICSCGEESKSVVSLFNDYLKGWNKIQPGLPKPRLFTVGRLDVATAGLIIVTNDAISEGTKIDGVMCIPDLVEPLAAQSDTRKTRLRIVVHEGRNHEVRELVQNAGLQVYALKRVRIGRFRLPADLGIGKFVELKQADIKALDGNN

SEQ ID NO: 226419 - protein, 561 aa, Zea Mays
MTVTWTSGYDITEAVPFVEWGEKGGRRFLAPAGTLTFDRNSMCGAPARTVGWRHPGYIHTSYLKDLWPDSRYTYRLGHRLMNGTRVWSKSYSFRASPYPGQDSLQRVVIFGDMGKAEADGSNEFNNFQPGSLNTTYQITSDIENIDMVVHIGDICYANGYLSQWDQFTAQIEPIASTVPYMVGRSAECLSVRYSLISCPSHVYNTAYKKRSFCSGNHERDWPGTGSFYGNLDSGGECGVPAQTVFYTPAENRAKFWYATDYGMFRFCVAHTEEDWRPGTEQYRFIERCLSSVDRQKQPWLVFLAHRVLGYSSCAYYESEGTFEEPMGREALQELWQKYKVDLAFYGHVHSYERTCPVYQVRLHQLPSTASEQVLVIHPTESLDCNLPTNFSAEPVRRRRVGPLQRAVPGDDARRGRRRGSQPLGVRRLEDPVEPLHRLRPRLRQAHRLQPLVAAVRVQEEPRRQRVRPFHHLARLPGRPRLLRRQLPPDHTGLMKPHDRGGFHFSDKGFGPCGGSLAGQQRFKLLYIVFFFFFSFFGSAPINEAFSLLPPLPACETMLFYP

SEQ ID NO: 226420 - protein, 150 aa, Zea Mays
MNILKRQVRLVTLVAVPCIFGVKLTGKDLMEFIWQLDETDGSSDMPPAVLRILNFKACRGAIMFGDPLLPSECCLIIEELKATSLCFQCAHGRPTTVPILNIASLHDELARLQMLSGRKAETWHGLGHHEPSLERAHMRLERLRKLRRGL

SEQ ID NO: 226421 - protein, 867 aa, Zea Mays
MDPTTPVLALSKAFASSRTKPFLLLAPHRRRSLFAARASAPSSSSVPGDLLISLARLALRGPGPPAAPRRWFASVSSASPLASGGPPRGGGGRGNGDGDGGGGGDGWKRPRASQGAGVVEEAAAQGADVIVLDVGGMSCGGCAASVKRILESEPQVRSATVNLATEMAVVWAVPEDSVVQDWKEQLGEKLANQLTTCGYKSNLRDSSKVGSQTVFERKMQDKLEQLKQSGRELAVSWALCAVCLVGHISHLFGVNMPLMHVIHSTGFHLSLSIFTFVGPGRRLILDGLKSLLKGSPNMNTLVGLGALSSFAVSSIAAFIPKLGWKTFFEEPVMLIAFVLLGKNLEQRAKLKATSDMTGLLSILPSKARLMVDNDAEKSSLIEVPCDTLAVGDYVVVLPGDHIPADGIVKAGRSTVDESSLTGEPMPVTKITGAEVSAGSINLNGKLTVEVRRPGGETVMSDILHLVEEAQTRAAPVQRLADKVAGNFTYGVMALSAATYMFWSILGSQLVPAAIQHGGAMSLALQLSCSVLVIACPCALGLATPTAVLVGTSLGATRGLLLRGGDVLEKFSDVDAVVFDKTGTLTIGRPVITKVIPSRGMGDANTKDLGANQWAEADILSFAAGVESNTNHPLGKAIMEAAGAANCVIMKANDGSFMEEPGSGAVATIGEKQVSVGTLDWIRRHGVIHNPFPEAEHFGQSVAYVAVNGALAGLICFEDKLRGDSRQVIETLSKQGISVYMLSGDKESAAMNVASVVGIQADKVLAEVKPHEKKKFISELQKEHKVVAMVGDGINDAAALASADVGIAMGGGVGAASDVSSVVLMGNRLSQLIDALELSKETMKTVKQNLWLDYPLLLEHCFQLRGRY

SEQ ID NO: 226422 - protein, 878 aa, Zea Mays
MDPTTPVLALSKAFASSRTKPFLLLAPHRRRSLFAARASAPSSSSVPGDLLISLARLALRGPGPPAAPRRWFASVSSASPLASGGPPRGGGGRGNGDGDGGGGGDGWKRPRASQGAGVVEEAAAQGADVIVLDVGGMSCGGCAASVKRILESEPQVRSATVNLATEMAVVWAVPEDSVVQDWKEQLGEKLANQLTTCGYKSNLRDSSKVGSQTVFERKMQDKLEQLKQSGRELAVSWALCAVCLVGHISHLFGVNMPLMHVIHSTGFHLSLSIFTFVGPGRRLILDGLKSLLKGSPNMNTLVGLGALSSFAVSSIAAFIPKLGWKTFFEEPVMLIAFVLLGKNLEQRAKLKATSDMTGLLSILPSKARLMVDNDAEKSSLIEVPCDTLAVGDYVVVLPGDHIPADGIVKAGRSTVDESSLTGEPMPVTKITGAEVSAGSINLNGKLTVEVRRPGGETVMSDILHLVEEAQTRAAPVQRLADKVAGNFTYGVMALSAATYMFWSILGSQLVPAAIQHGGAMSLALQLSCSVLVIACPCALGLATPTAVLVGTSLGATRGLLLRGGDVLEKFSDVDAVVFDKTGTLTIGRPVITKVIPSRGMGDANTKDLGANQWAEADILSFAAGVESNTNHPLGKAIMEAAGAANCVIMKANDGSFMEEPGSGAVATIGEKQVSVGTLDWIRRHGVIHNPFPEAEHFGQSVAYVAVNGALAGLICFEDKLRGDSRQVIETLSKQGISVYMLSGDKESAAMNVASVVGIQADKVLAEVKPHEKKKFISELQKEHKVVAMVGDGINDAAALASADVGIAMGGGVGAASDVSSVVLMGNRLSQLIDALELSKETMKTVKQNLWWAFLYNILLCRLDYPLLLEHCFQLRGRY

SEQ ID NO: 226423 - protein, 360 aa, Zea Mays
MQPSGREMQGGGGGGGQDDFLDQMLSTLPPAWPDLGYGKSSPWELPAGPDAAAAAAAAFDETALLASRLRHHQIGGVDEKPLMLHLSDLHGVAAGGGDDAGFMPLPLFTDRAAFKSPNAAGADQALYNGFGAAGMHAAAVHQPPFGQLRRERIAERMKALQELVPNANKTDKASMLDEIIDYVKFLQLQVKVLSMSRLGGAAAVGPLVASMASEGDDRAGNGTSDDGGDGATNGDNGGGGSSLRVTEQQVARLMEEDMGTAMQYLQGKGLCLMPISLASAISSSTSSSPPPSLLPRPSVGSVEGARGPLHDDSGGAGGDDGSRTINFSSLLNLSRSCRVCSLLGEEESKLLVQRDHIHIT

SEQ ID NO: 226424 - protein, 274 aa, Zea Mays
MANENIDRTIETAEAILAQFEIIRRGAKICIQCHSFGACLVGRYKGPRMGCNLQVNDSAEAVIVRGPRADLKSFLEAMALLKGVIHFFSSNKKFTSCEGVLNQVNNLLTKSKLKIEEEFRQLMSTYSKASEPAHLFDCFPNPLLASEGNSRAVGEQLSKSFESATYRTPTLIPPRILPLLHDIAHQLVQDGNQQLCYRIYRDARSSALELSLQKLGIEKLTKRSMQPWLASGTWIQIMHVTVKVLLAGERKICNQIFDGITFNKDQCFAEVTGS

SEQ ID NO: 226425 - protein, 1060 aa, Zea Mays
MSSLSRELVFLILQFLDEEKFKETVHKLEQESGFFFNMKYFEEKVHAGEWDEVERYLSGFTKVDDNRYSMKIFFEIRKQKYLEALDRHDRAKAVDILVKDLKVFSTFNEELYKEITQLLTLENFRENEQLSKYGDTKSARSIMLVELKKLIEANPLFREKLVFPTLKASRLRTLINQSLNWQHQLCKNPRPNPDIKTLFTDHTCSPPNGARASPVSVPLAAVPKAGAAYPPLTAHTPFQPPPGPSLAGWMANAAASSSVQSAVVAAASIPVPPNQAVSMLKRPALTDYQSAESEQLMKRLRPGGHGIDEATYPAPTPQPAWSVDDLPRTVACSLSHGSNVTSMDFHPTRHTLLLVGSANGEFTLYEIGLRETLLSKPFKIRDINACSPQFQNAVVKDSSISINQVTWSPDGEMIGVAFTKHLIHLHGYQPPNETRHLLEIEAHSGGVNDIAFSRPNKQLCVVTCGDDKLIKVWDMHGHKLFTFEGHEAPVYSICPHHKESIQFIFSTSLDGKIKAWLYDNMGSRVDYDAPGKWCTTMLYSADGTRLFSCGTSKEGDSYLVEWNESEGSIKRTYSGFRKRSAGVAGVVQFDTAQNHILAAGEDNHIKFWDVDNNNMLICTDAEGGLPALPRLRFNKEGNLLAVTTADNGFKILANADGLRTLRALGSRPPFEAFRPQYEASSMKVSGAPVVASISPNIGRMDHLDRNSPAKPSPILNGGDTASRSIDIKPRISEEKPDKAKPWELMEVLNPQQCHVATMPETPDQARKVVRLLYTNSGVGLLALGSNAIQRLWKWSRNEQNPSGKATASVVPHHWQPNSGLVMTNDTADTNPEEAVPCIALSKNDSYVMSACGGKVSLFNMMTFKVMTTFMPPPPASTFLAFHPQDNNIIAIGMEDSTIHIYNVRVDEVKTRLKGHQRRITGLAFSTNLGILVSSGADAQLCVWTNDTWEKKRTVSIQMPAGKTPSGDTRVQFSSDQSHLLVVHETQLAIYDASKMERIYQWIPQDTLSASISHASYSCNSQLVFAAFTDGNLGVFDAENLRLRCRIAPSVINSNVCFMIP

SEQ ID NO: 226426 - protein, 818 aa, Zea Mays
MDGDKVKESAPDCASGAAEPTKKQDKRKRAYAEFDVVDKKSVSAEWQQEMDALYKYYKEVSGHQLNPEELSCTTNDSIIACLLEESSLSCAKLTDGIYKRMKLQYGVTESSVRTSVLNIGRRSSYGISAMDVNGLEDESDSSLWCWETEDLALLPLHLRSSLSIRRTARKLIHKRILVLSGKLATKDASNACSNQNSLMENAGEALDLDEIRSIIESKHKNDDDIKTEAQDFQAIRKAVKKQQMMVGHIQTEKNKKERELRHIYEKTEREAKRIERENKRLKKHQEEEERAKKKKEKEEAELKRKASIQKQANLMERFFKRKADSNIGSSDSHHMERTTCSKSTGNIEELAVAATSAMDCTLCKENHLSMEELRMIHVAKWRTLFQHNRLRHWGVRRSPKIQLFLELRLQKPSTPIASDSMSTPTKEQSSLESTGNLDITKLLDELEIPSRSQNSTSSSVLLVKKLLQFDNSSRPAYYGTWRKKSSTVSARQPFQRDEELNYDVESDEEWEEVDPGDPGERLSDYEEDDEKTMNEHDAMIDAEKETENSFIVPNDYLSDDEGMQCESVCVRFDGISSLLSIPGVTVEELNALLQRQKALHIITEHALKIDRPLVICNLDHRKLGLLNAEGITGMLKMEKICLQALCMKKYPGSPIIDVPVVNTTIEDGFCRSNKKSPRTPVSSKAISESDMPEFAKLVASCPQGRVKLVELLHETFPYVSKARLKNKVGEIAEFTKNRWQDILDRYNLSLSPDKGEGLKCAASCCSQQCQPPNESGNTGESSSPQCSLKSEMVRQQLGAQGSSHGSARHPSTKMAGGQ

SEQ ID NO: 226427 - protein, 792 aa, Zea Mays
MDSLDPPCRLPPPHNSTAPSSPSPASVAGPRPAAVRSGSETPTTAVRSGSETPTASPSPSASPSPSTPGTPTAAVASPPPHNSTAASQSDVPHQQPGQRRPMCAVCTKPLRLCLCGRLRSPPVDNAVGVTVLQHAMEAHHPLNSTRVARLGLRNLVVAQVTDVNHRACFILTMLDAGGGAAASGPAGGPVVGEDLNSSICSTRPTTAVSWSSDIRTRRRAREWRGRWWNWNGSGYPAGRGDGGVVPADVRHVLHVGRLPDLHLRLLHISYTRATHKIVDYDVTIPSSPILVGVGSFRYEEQRVIEVQIRMWQQGDPNFWTIRPLSDMMVRAATHDVCFLLNIYEKTMEKLSKERLRKRLGLEEATKNKGFDLGNGGKTQNVSVPTVEGVARGTSYGWVDGGLRGTNLGAGVIDPTNVHSDNLLHVWSMPSTANVSQQEAPRPLEKVNLLAARNERESFQIALRPKVSWATSGIAGSVLIQCTDLCSSSGDRYENSSLPEDRIGELVKETLAAVGLKVVPTEYKYLSKKILPTNQGSVTEYFLSIRPTERAWPAVYFLYDLSPITFTIKEERRNFLHFITRLCAVLGGTFAMTGPHLSREKDNEEEESDRDGFFRRLLRDSKEEDMELTPSSDGLLKRLFRDKEDRQGEDDEKDFFAGCSRIRTRRGEIVIMQDMGMRKDWARVWKMMTEKVSSAKFSKIRMRRGKMKGIKSQMREKRQLFKEKNDEKKEGSTPSKKEEDDKGHKNADDDNFFRRLFKDKNEEKKGIVHDRNEDDKCEEGCLECTQKILRVGT

SEQ ID NO: 226428 - protein, 423 aa, Zea Mays
MMAQACKKRRGVYISTELGGSDTDSDVEGSKPSKKSGVTSISTCEHQSSYNLKAASMKSSRMIRLCGNIVRKLIDHKGGWLFKDPVDPDLYKIPDYFDVIRNPMDLGTVKNKLTKKKYVSIEEFAADVRLTFSNAMKYNPPGNDVHAFARELNEIFDSEWESVERKFRGRNLVQEQKTKAIKVRAIVDSKSTVARGQVACSNPKSLAARGPVPCSNSFAKKTLTDALSSKVKIKFSVRSSAHTSSKDIPVQTAGVKEGSLNHSFPTGNKEAYLNCTFPFAKENAKISSTRETERSSGSTGNDSWSCNDISTSPIASSVQGEESYLCDEPLSPSRALRAAMLRSRFAGTIVKAQQKALLDHGKNIDPVKLQLEKERLEKRQQEEKARIEAQVKAAEAAAQQKFEEEMRVKREQEREAARLAVRI

SEQ ID NO: 226429 - protein, 532 aa, Zea Mays
MIDSDKHTWQICTCSENSVPLSGIPESQADAQIDTDTGHRQTDVDSTADVLSMSDGDNSCIAKESETGTSASSISNEGPQDNATSRKKFRKVFFKKDKRTKKRDDNFERALLIANTCTKVDVIWQDGTKECGVAATALIPIHSPNEHEFFPEQYVVDKVTNDVGVDDSSEPRRVGLVRGVNAKDRTATVSWFKPPLHPEEPKEIACNEIVSVYELDVHPDYDYCYGDIVVRLPPVKPVIESTNSKEQMELDKTLDSSEGFAASYSAPPDTSADEQLSQKESCLQFTSLSWAGNIVGFQDGEIEVIWGDGSISKVGPHEIYVVGREDDGASLDDGTASDGSSWETVDDNEMDVLHDSAKGDSQNVPENSIGRENGSFSSQDGSSVATGPLSVAFEFVTRLASDLFARGRRHLDGSSDAMDEVESHWSNEISEIGDDIDKCNKNHVESPEHAAVIENDSSVEKSVDVVMADNPVHSECFKHFDVLQCPLDHHYLENTTQVEKSGSKRYNRNGAYLRRTYQTIFMSGYLRIAWIS

SEQ ID NO: 226430 - protein, 586 aa, Zea Mays
MLLLRANALAAVPVSFSITPAASYSCFPWPSSSTTAASCSVGSSARLDAAVQYDPLRPGSDAWAHPDGMVTAEGDEEKQRYDTEGESNDWEGEGPQGSSDPEGINVPRQRYIAVPKEALLDAVLSQFASDDDDAADFKRCARCLDAILHAEHKRMLEEMRTSYMLTQRHRDEEEEQDDTDTASGSDYVNGKAGSGFFGITQLDGTLFLTRSVDLRTLLGLTPDPDSQTRRGYATERQKGLLLVEKLDYLQSKLLQNVFFSLSKPLKKPGKWLNEALKRSTDNQGFQIWIDKLRLWLKEQTYADNSLLLIESSSWDKLSSDQLPDADVPIWIAAQRAVSRYEGILSPVGPRGRLLRRLLKWTGLIPSLPEATIKSNNETKHLEGHVRPNFLPRITLANIWEPASRESCNNNIWEMVKASFRILFGRSTLQEPAFQELILLYTDEVVPSETKDEMVPLQLKIYERIPIPDLPVRLDIATVIGQLFLLDIVAGTALVILVFRVALGYKQTRDRYQLLVNKTLYEKTLASGFGSVYFLLDASEQQQYKEALLAYAMLLCRKKYEVWGMFTFDRYRSCHITDYSTTSVALL

SEQ ID NO: 226431 - protein, 64 aa, Zea Mays
MLFMVLDGCGSGSLWHASLACSLPQDLSDLKTKQKQNPDEPTRRSVLLVFSSLRLAWATESVAS

SEQ ID NO: 226432 - protein, 695 aa, Zea Mays
MAGPWDTHASTSRAPAGPDGEAEGASPDSLRNTPSNIARLEDAIGHCAARRKYLAHTKSPSDGEDVRWYFCKLPLADKVLSSSVPRTEIVGKGDYFRFSERDSLALEASFLEREEELLAYWWREYAECSAGPRGSLVESDDSAYLYKVEEERVGVPVKGGLYEVDLMRRHCFPVYWNGENRRVLRGHWFARKGGVDWIPVREDVSEQLELAYNCQVWHRRKFQPSGLFAARVDLQGSTPDLHALFTGEDDTWEAWLVFDTGPKFGSNTIKLRRGYFCSESASTKPSQDELRQKKEEEMDDYCSQVPVGHLVFMVHGIGQRLEKANLVDDVVDFRRVTANLAERYLTSYQRSTQRVLFIPCQVSNQLNKLYMKFLKRNPGYSGKVSLYGHSLGSVLSYDILCHQESLWAPFPTEYLNMETSDRNQGAKSANEADLHDSGAKDHDTSSLGYSCADNENSVIDEDSTRTDVSCMDSILPSCVLEDSPNNHDTVVPRGAVVADQNGEEKKVENYQSVYAEEGTTSGVITKKAEGSSISRSAKEVHEEVLDKEKLMVLAKDKLILSLEEEVKCLKAKLDQLEQHNHLVTENTSGVEYHEGQNYNHALNSGKLFVAQESTNQSYSPQIKYTKLNFKVDTFFAVGSPLGVFLSLRNVRIGIGKGQDYWQDKNVIEEMPCCRQMFNIFHPFDPVAYRWAFIQN

SEQ ID NO: 226433 - protein, 440 aa, Zea Mays
MDDYCSQDELRQKKEEEMDDYCSQVPVGHLVFMVHGIGQRLEKANLVDDVVDFRRVTANLAERYLTSYQRSTQRVLFIPCQWRKGLKLSGESTVEKLTLDGVKGLRVALGATVHDVLYYMSPIYCQHIIDSVSNQLNKLYMKFLKRNPGYSGKVSLYGHSLGSVLSYDILCHQESLWAPFPTEYLNMETSDRNQGAKSANEADLHDSGAKDHDTSSLGILPSCVLEDSPNNHDTVVPRGAVVADQNGEEKKVENYQSVYAEEGTTSGVITKKAEGSSISRSAKEVHEEVLDKEKLMVLAKDKLILSLEEEVKCLKAKLDQLEQHNHLVTENTSGVEYHEGQNYNHALNSGKLFVAQESTNQSYSPQIKYTKLNFKVDTFFAVGSPLGVFLSLRNVRIGIGKGQDYWQDKNVIEEMPCCRQMFNIFHPFDPVAYRWAFIQN

SEQ ID NO: 226434 - protein, 161 aa, Zea Mays
MESTLQLSNIDLIFAYTIKGKTGSSMRATSFVQNDILSPTLDDAVNLLGDYSTWLSSSNTREANVYLECFCERWDALVAPEERALLDPNGLVNEGEKLTIKALEGFNASAAAKDFEEEIRELAFGTFGGLGIAGLSASLLTSVLSTTLEDLLALALCSAGG

SEQ ID NO: 226435 - protein, 255 aa, Zea Mays
MRYLMTFLFGLVFGTVFWQKGKNIDSQQDLYNLLGATYAATFFLGASNSITVQPVVSIERAVFYREKAAGMYSPLSYAFAQTCVEVIYTILQGILYTVIIYATIGYDWKADKFLYFLFFMTACFNYFGLFGMMLVACTPSALLANILITFALPLWNLFAGFLIVRPAIPIWWRWYYWANPVSWTIYGVVASQFGENQGELSVPGGKPVVVKQFLKDNLGIQHDLLGYVVLVHFAYIIAFFFVFGYSIKFFNFQKR

SEQ ID NO: 226436 - protein, 500 aa, Zea Mays
MIQEIFLLAKDAKDKHIQDYAAWAISFLRSRWSKNQNQILYEDNGSNRSPDDHDQASSFSEQSLVWNLSLWLSDLKFEKSGDVVPISTVGTVLKCLSKAPRLPTTDWGAIVRRCIKAEAQISHKLTNQEDPKILKEACLYLTLAHAAHISPLLQFLDDLTDILRFQRLDINVQSILLKHLLHLMKLFSDSRLDKLHEDFTEYLYSPTSSYLNYSSEQKSMLRMSFWEGIYTCLVDVSEESGVFSFIEKCIQCLLPLLTLHSDGQPEFMKEWSVAILCLTNAQKKWLDDILQIRSTALVNEGHVDVAKKIILRARLCATGCGSTHELGNIKTAILCTKADGVWWSVLVEITSALNSAENIIKRQWLLDALDIGCVTAHPSTVLCFVGLLCGSCCIYMPLLLVNSINVLSDLPVTLPAFLSTIVSDDFRNSVADRLWLLTTDIYTWAEQLAHGHDQPGHDRIHRSETEIATFLANILLSTCITVEDYLSVDKRLKLANLEAL

SEQ ID NO: 226437 - protein, 500 aa, Zea Mays; identical to SEQ ID NO: 226436

SEQ ID NO: 226438 - protein, 129 aa, Zea Mays
MPAQKRPLPSSASPGSDADVEEAPGADADGCGGADQRSPKVTLNGVEERDGGPLQAKDQRHDSDADDEEEGDREGGGGGDGSGSGGDDDCDSQSSQSDGVMDEFTLVKLVDVRKEVQCPICLVRCYCFF

SEQ ID NO: 226439 - protein, 1102 aa, Zea Mays
MSIAWLPSTNPAAGPLAIAEAVPISISLVQFFSPECTMSALPPAEELDASHQKKRRRRKKHREQVEAIAASSEPPPPPASPESKPKSTIPVAPETLTSAAVRESPRPLGNPESKSESPLLVAPETLASAVMAAAAVRLVKERERKNQVVPPASPLMEEPVWKEEKQRKKRKHVGAALVVPSPPTPDAAQNLRMEAKMMAEGATVRKKQRRLKAGQEQSGEPPFSIDVHPQGGEEATDDGGVGVMVTQCVKRSKSKNSRVLKTQQTLPQGFFPPMANPNSIDQDPNYSSPFGAFFAQFAYKPANIADRPARLPPRGHPSSGSSLLTGKETSKAAWTATSNTKQPCPASESTSDSQEEARIEGKEKPEKKMTREMAVRESTRHLAILESMSASSVPVAPETPTSAAMTAATVMQDKECKRENQEALPAAPLIEDPVPKVEKRHKKRKVAQITQMENKVMTEGATVRKKHRRQKVKQEQSGQTPFLNDVYSKAGEEAAAGGVMGSQCVKRIDRSKNSKVLKKQQTLPQGFFPPIANPDFIDQDPNYCSPFGAFFAQFAYKPERRQDGNGSPLPSTTGRTARLPPRGHPLSGSSLLTAKEVSKAARTTTLNTKQPCPASESTSDSQEEARIEGKEKPEKKMTREMAARESPRHLAILESMSASSVPVAPETLTSAMTAATVMQDKERKRENQEALPAAPLIEDPVPKVEKRHKKRKDREAAMIIPSVPTAAVAQITQMEKKVMTEGATVRKKHRRRKVEQEQSGETPFLNDVYSRAGEEAAAGGVMGRQCVKRINRSKNSKVLKKQQTLPQGFFPPIANPDFIDQDPNYCSPFGAFFAQFAYKPERRQDGNGSPLPSTTGRTARLPPRGHPSSGSSLLTAKEVSKAARTTTLNTKQACPASASISSSQEGVRVKGKKKPEEKTTMEKKPRKPPILLSPAEKWSDKYRRLPLDQLVPPPRSPHKLLQEKYASDPWKVIVICMLLNLTQGKQVRKKVKGFFKRYPDAQTAYTADPEKMAEYLAPLGLQRVKTNRIQKFSKAYVGEEWTYITELCGVGKANEVVPKDHKLVDYWNYVCFELPSIQKSQEAGVTELGNLVAKVQEVAVSC

SEQ ID NO: 226440 - protein, 876 aa, Zea Mays
MSGGGDGGDKEAFFHCLDRVPSGLHLDADFPSDDEEDDEDDVRVSFTSAAGDQHFKSFRYQAAVPVEDDEDDDDDDDDDEDTSKYDMWMSDEPMSIQERRRRLHQGLGMASSRDLALRRHSMKKRPADVPRAMSRSVSRSKPPPSPIPANAASAANVPSTTSVAQAAAAAPRPAKEVITRRRSDSNLVVRDGASVSGKPPSQQPLRRVLSLPARPDARDSTPVVGKPQAGAPRGLPVVPPQAAPGIKGGKGDGDEGSKNNRDGEKEVAVVAASTPKDASSSTQQQTGVLGLEEFEKFIGNTPIMKLMRRGTSQNQPAPLPAGVPPKADKSGGKKKGGWLKNIKSVAIGFMQDKDANAKSGVVSAAAAVPKSVPTNASAGSAAPPAAGSERPKVHQYGKSSKELTGLYMCQEIQAHEGSIWSIKFSADGRRLASAGEDSVVRVWQVVETSAPPCSLAMDGKSGPLAPLPSPGAADGASSTTTPALASMPKKPAKGKSGGRDALPEHLVVPDKVFALAEQPACVLEGHQDDVLDLTWSKSDQLLSSSMDKTVRLWDTESQACLKTFAHSDYVTCIQFNPVDDRYFISGSLDAKVRLWSIPDRQVVDWTDLNEMVTAASYTPDGQGAIIGSHKGSCRLYKTADCKLSAEAQIDIQPKKRKAQAKKITGFQFAPGNPAEVLVTSADSQIRVFDGVTMVQKFRGFKNTSSQITAAYTSDGRYAVCASEDSHVYLWRTTRVPPAAAIGIGMKPKAWCTIRSYENFYCKDVSAAVPWTQSPSPPGAGDGSPTGGSPASADKPPQGASCNDESCSVAAKPEGGDPSSCSAAAAEPSSSARQGGAKGDGGNAWGLVVVTASLGGEIRVYQNFGMPFRIKGQANFF

SEQ ID NO: 226441 - protein, 266 aa, Zea Mays
MLMGNTWPVGMAGGNTAATLWCSHCGMGIAAPAPGSGSIVRCAFCRGVTRVEHQRGGVGERAMTTRTLAAAASLPRQLPVSAGPVEIPASYPRVSGGNKKRALLVGVSYTGTAHELKGTVNDVKEMRRLLCDRFGFPGACILELTEKESDPTRVPTRENLLRAMRWLVEGSSSGDSLVFHFSGHGVQKLDMNDDEVDGYNEALCPMDFERSGKILDDEINDTIVRPLGKGVKLHAIVDTCHSGTILDLPYLCRMSSGRTTPALRAC

SEQ ID NO: 226442 - protein, 1140 aa, Zea Mays
MATPLAGKGPIAAAIPRSPPPLAEGGAGGSAAEAPVLIFVYFHKAIRAELERMHAAAVRLAMGRAGGDVATLEARCRFLFTVYRHHCDAEDAVIFPALDIRVKNVAGTYSLEHKGENDLFAHLFTLLQLDVQNDNAIRRELASCTGAIRTFVSQHMSKEEEQVVFTWFGGKSESSSTCESSSGQTDKHAHSLEHTKIGKRKSIESSQLVTHPIDEILYWHNAVLRELSDIAEETKRIHQSGDFSDIAGFNMRLQFIADVCIFHSIAEDQVIFPAVDGELSFVQEHAEEERRLNKFRSLIEQIQLAGAKSTVVDFHSELCSQADQIMQKIESHFNDEEIKVLPKARIKFSPEKQRELLYQSLCVMPLKLLERVLPWFIVKLNDAEAVSFLQNMRLAAPSSETALVTLLSGWACKGRLEDTSNPGKFVCMASGAVTCASDGNGFKTCQSLCPCYVSSNGAFSKPVKRASQGESSTNTDRNHSSHNAATEASQCNNRACYIPRLRVESSYLGVHSSTPTKSFRPLSFNYVAPSLYSSLFSWDTDTLVSGPDNISKPIDTIFKFHKAIRKDLEFLDLESGKLIDGNESCLSQFIGRFRLLWGLYRAHSNAEDEIVFPALESKEALHNVSHSYTLDHKQEEKLFQDISTVLSELSQLHDGLSYPLDVEAGTNDISSNEIDWARKRNELLTKLQGLCKSIRVTLSNHVHREELELWPLFDKHFSVDEQDKIIGHIIGTTGAEVLQSMLPWVTSALSLEEQNMMLDTWKQATKNTMFDEWLNEWWKGPSTSSDPSDKASTPSEESHFQENLEQNDQMFRPGWKDIFRMNQSELEAEIRKVSRDSTLDPRRKAYLIQNLMTSRWIAAQQKSPQPSVEGHNGCTRRPGCVASYRDPGKQIFGCEHYKRNCKLVAACCDKLFTCRFCHDKVSDHTMDRKSVMEMMCMQCLNVQPVGPNCQSPSCNGLSMAKYYCSICKFFDDERSVYHCPFCNLCRLGSGLGTDFFHCMKCNCCLGIKMIEHKCREKMLEMNCPICCDFLFTSSAPVKGLPCGHFMHSACFQAYTCTHYTCPICCKSLGDMTVYFGMLDGLLAAEQLPEEYQDRCQDILCNDCERKGRSRFHWLYHKCGFCGSYNTRVIKTDTAECSRPL

SEQ ID NO: 226443 - protein, 388 aa, Zea Mays
MGNTCVGPSITMNGFFQSVSTALWKTPQDSDALPAAAANGPGGASPGRSQSALPKPASDVHHHIAVLSEAPEPVKIGAYHSEPAPAVQSEAPEPVKIAASHSEPAPMAAKPGAAAANASPSPSPRPRPQVKRVSSAGLLVGSVLRRKTENLKDKYSLGRRLGQGQFGTTHLCVERGTGKELACKSILKRKLATDDDVEDVRREIQIMHHLAGHPSVVAIRGAYEDAVAVHLVMELCGGGELFDRIVRRGHYTERKAAELARVIVGVVEACHSMGVMHRDLKPENFLFADHSEEAALKTIDFGLSIFFRPGQIFTDVVGSPYYVAPEVLKKRYGPEADVWSAGVIIYILLCGVPPFWRTSRAYSRRFCTGGWTSSRSRGPASPTAPRIS

SEQ ID NO: 226444 - protein, 218 aa, Zea Mays
MPCKDSFSKHCAKSKKVQIVQQINHDGEVNRARYMPQNSFIIATKTVSAEVYVFDYSKHPSKPPLDGACNPDLRLKGHNSEGYGLSWSIFNEGHLLSGSEDAQICLWDIKANSRNKSLDALQIFKHHDGVVEDVAWHLRHGYLFGSVGDDHHLLIWDLRSPSPARPVQSVVAHQGEVNCLAFNPFNEWVVATGSTDKTVKLFDLRKIHTSLHTFDCHK

SEQ ID NO: 226445 - protein, 258 aa, Zea Mays
MRKPSKGCKERDANYHRNDHTDDHGGKHFFKVLVGDFHKRLVIPGKFAKHFADKVEGSITLESLGGYTFDVQVAKDLGRVVLQSAGWKSFVSAHYLKKMDFLVFKYDGMSRMKVLIFDPSGCEKVPPSFVAENASSGGVKREAPIGLSGSYARLPMKAPETKRKSWKQMDRSRIIMNASSSLSNSSGGMASSEDDEAHPVPSYMLPQGTRLDRLQKKILKERLRDICSEIPIYVCVLKKTNISGHSQALRVDSSVPWQ

SEQ ID NO: 226446 - protein, 620 aa, Zea Mays
MHALEIERSHFPNNCDDLEEDADNDICASQNICSAKSININGLSKKSRGARSLYDIEINSAQELSQTLTLYKQPQNLSSSSTRYASSKRKKWKGHKDHEDDSVHGFQRMRDLREIGTKNVFKQKSGSGIVSDVPLLESGSSFGYDLSSADGIKLGEQSQSSIKKKRSNIGQSYDSLSKKDKHHPLSLLCEDSEVSGTYYHWDPSGQSCSQYPGGQIPNLVESSRRAKTIFPTDVNNCSYSSGTSSLDTLLDTSHINHKRSLNAVTPKNADPCTARFLNDDCPDCDGFLDAVTLEEDVLEEGKSHLDTYGSCASIKDQISKLGNQSTGCGIGGTSSTRHNRNSKKNITAVNFLIPKGSHKRDTNSLLQHEGIIKSEGTVFRPAELEDNAHVTPEHDESSETISNLSNYEKNTTSFPNYVPLQLLPPPGQRPDPKPPGCPVTNPTRRARADYRLYDVEVTVQRSYKGHHAPLISLMSKWTGKPIVGYPVTLEVLKDSRHTTSRDEHRPVMGSLDSLLKSRVSEPRQARSSHASRSKFKSSGRKKATEHDLDRSWWPHTKKPASSPRKMRRLSSFAGSRRESADQKPVVAKTGGPAVACVPLRLVFSRINEALSFPLRQEKTT

SEQ ID NO: 226447 - protein, 229 aa, Zea Mays
MEDDNEVTGESPVADEWDMLSLTSSIYASPLFRRGFDPINLPGYGNVINIQEGTQTGLVMSDGFVFPPSEHENLPIEPEHEDLPIEPGHDESNTNSVEKESSCAGNNDDDWCHVSPEEIDDVSNENLADNSDLPTASEATVPDSQPTEINAKREKDHRTCKADHTCERWWKKKTTYLFHHIKGVTTLCSVVAAGAVVGFVVMGQRWQQDHWHLHQFKFSVSGETNHMVH

SEQ ID NO: 226448 - protein, 297 aa, Zea Mays
MLERSRDGRIVFAGDSIGRNQWESMVCMLAAAVPAASSSRVYERSGKPISRHKGYLAMVFADYNLSVEYYRAPMIVMVHRFPAANNATAGSVRGGVRLDALPRHADRWAAADVLVLNSGHWWNQHKTVKAGNYFMVGDRLNKTMDIKEAFQRSLQTVKDWELSSAQLSESYFFFRSFSPSHYSNGTWNTGGSCAGQREPPTTNNGRSEEEYSWMNAMIAKMTEDIKSHGRKARFLNITHMTELRPDGHPAGHREPGTPPDAPEDCSHWCLPGVPDVWNQILYAHLLSAGYGTRRNQR

SEQ ID NO: 226449 - protein, 310 aa, Zea Mays
MSFRKRQPSSNGASINLAPLGFPSQELEKVNPVNSVMSTDFESMDGVDIDMREVYFLIMHFLSHGPFKRTFGELCNELLEHQLLPRRYHAWYSRGGFHSGEENDDGISLPLDYVKLAERYPHIGKDHLVKLLKQLMASSYHPHNLIGRVSPNAADVPTLLGSNSFSLLPSDRQDKGTPRLPSYLRWPHIQTDQVHGLSLREIGGFTKHCRAPSVRASCYAIAKPSTLVEKMQIIKRLRGHQNAVYCATFDRTGRYVITGSDDRLVKIWAMETAFCLASCRGHEGDITDLAVSSNNSVVASSSNDFIIRVW

SEQ ID NO: 226450 - protein, 390 aa, Zea Mays
MLAPGGRAGWRILAVLYSRRTLRGWAAGVQFSAFSDPPIEFQFQAADGIEAAAVAAGGGRGGRRRSLPGGRPRGEHAAAGTPGRRPRRGVLQREVPAGGGPGARRDADPRRQRRDHRPGAAALHVPRLPRPGLRRVDHARLAERDCGEGRLPELRPPGLRRDRAHQGQAGGRVPADRVVRGHHRHGGPGRRVPEQRAAVRRGDRPPRRQGVGGVRRRQRPPAALLQNRRPQDLLQLQGVGLEGPRRAVSAGSHTIGRAQCTTFASDRLYNYSGHVGQDPSLNKAYAAQLREMCEPGLADDTTMVEMDPRSPYTFDLSYYRNVRANRGLFTSDQALLDDPWTSAYVERMADAASPDEFFADYAAAITNMGRIEVLTGDNGEIRSACAAYVD

SEQ ID NO: 226451 - protein, 1676 aa, Zea Mays
MTGSKPAPAASQNPSAVPHRRPPPPPPPPPPPPVTAVARVREEGELSSGADDDETLQTQLGAASILGKFVEAGSQVPSASLLGKGSNTLIVSNALNHKASAPSYKKIMRVNQGQFKPGTNRNLSWQKPVSSDNLLITFSDDDSGADSGKTGRDKVRKASSQGTQRTGNSMQTRIMREEVSQQKNLGSKVGPAHLPAFPFTHRNVGAGRASGNTFFRKELPVRQVNPLKSKQKVQNGVGVHSEDHRLEILRHKIAAKENELKGQKRPLSAVATKNADFSSNQPRLPSEKIRLEASSIGEYSRFNSLSEHSGGPNKRLKLNQQYNQFCSDLTPLAPIGSISGKTNVQSSEVTNRSENGITMNLNVNETDTTDTTELADQIQQGGATKSLRHHKDSGGAENHVMLESHDGLAAQPPFTDTQTIPEDTSALAPVTSAQARQQVLAVGTSPVLDGTPQLQPGKENDECLNSSGQIGVETQNTILFSLLEMEELQDKELEDAQEHRQKCEAEEREALRAYRKAQRALLEANERCAILRRKREICSSQVHGLIAENSSLVQSLSIRNPEDGLAMPSLLNSQIHAVSQIPENQGGRHRLCPEEPSQQQIDKHEDEARPHYCDKLAASTADPSSVSAVNADSILSDYMEDDLLFPTRQARSECALDVENQMEETIHVYAEENRQVSGDGGEDYELLEASLRSRLVERFGKKSCLNGTIDEGTEGLAVGKVAAEHGKQSAYVGHQLQEAEQNIMTTTLEGTMELENDGAEKTVGLSNSCSGPSMGNCDPEDNISSLKELCMPLVMDSLIFPSSAPLNAARQIKRAFPGICKELSDYKNDHLTSDAVSEVTGSVQDMIHDLVGENMKMLPTTQNDNNMVHSVIDPFWPFCMFELRGKCNDEECQWQHFEHHDWRKLELTKHSMISVSGQIPYGLSQYILPVPVYRVGSNLIKADLNLTQSVLASSLWQYWQRGFCASFPLPLSVQRVLPSDAPFFQAGDGRIADFDRNRQLLKFRMLDSRKGSVDIEFFLEAALDLYCGKVNKPDRIKALSFLARSIEADPSTVILWVFYLHIYYQKDEGLGKDDMFSDAVQHNVYSYELWLMYINSRLRVDDRLDAYNDALSMLCQMTAETDKDLQERSAFILDIFLQMIYFLCMSGNIDKAVSRIIGILPTAMPDNSGDKLLADVISCLTMSDRCIFWISCLYVLIYRNLPEEIIDQLEFQKALPRALIWPSIDPSVDNRDKITDLLNFAACKMAEDISECVKNGDPSYLMLSQFLAVNHISCLAAIGGLKSSVDMLVTYMKEYPMCPQILLISARLDRKHGTCPGLKSFDELILNWPKEAQGIQYMWNQYVEHALATDAELAEKVLTCWFEEHGKDCDIQSNAAICIELSSEEPGTSSLVSPQAVGSGPSISEDLVFRLLNLSLYKILENNLQEAQMAASKALKLAHGEWYEHCIREHAAIHALELEKSSSSTDAQTRATFSLIIGYLADHCNLPTRELLSRRFCQNIKKHRLRQLIDDTIGSVPADSSLINSVLEVCFGPSLLPKSISDVKYLVDFVETVMEALPANYRLGLAVGGFVAKHFTGYGAASTGTRFWASSVLINAIFRAVPVAPESVWLEGAGLLEKLHATEILKRFYQQAASVYPFSFKLWHAHLNYCKASGSNTESILESARQRGIELNLTPT

SEQ ID NO: 226452 - protein, 407 aa, Zea Mays
MSSDVNGENVMDTKSVLPVTPEQAPLWSTAADEELIYAKKEITNAPLTSDDPDLYAPLFRNVSIFKRSYELMERLLKVFIYHDGAKPIFHSPELKGIYASEGWFMKLMETNQNFVVRDPNTAHLFYLPYSSRQLEHNLYVPGSNTIEPLSIFVKNYIDLISAKYPYWNRTKGADHFFVACHDWGPYTTKLHDELRKNTIKALCNADLSEGFFIRGKDVSLPETFLRSPRRPLRDIGGRPAAQRTILAFFAGQMHGRVRPVLLKYWGNKDDDMRIYSRLPHRITRKRNYVQHMKSSKYCICPMGYEVNSPRIVEAIYYECVPVIIADHFVLPFDAALNWSTFSVVVPESDVPKLKQILLAIPESRYITLQANVKRVQKHFMWHPNPVKYDIFHMILHSVWFSRVNQIR

SEQ ID NO: 226453 - protein, 500 aa, Zea Mays
MIRCKDIVSDNCNITCQLNEASIDSSDHTSNSTGQLTQSIQDAAGSMESDKDQCDANKTDLTISQECTGLEGMNLDESGPDKMDSSHSGIVVHENQLSEQNNDEPAAYNEGYIITHQSTSDMLTLAIPSGTETQPVNDTQMADNPYSCESLLDDQSSGYCTQNSVHEPHLYWTGAVEGSAVSYTPQTLPGALQSQLMPCNKLSEPKDYVPTEQNALSQHLRGMRRRSLFNEKAGISNKGVDKTSDHHPVNSTTPKCKTISGDNSKPLRTPPCALPGIGLHLNALATIPKEKIVPREIQSTINESSNLIGPAGSSPAPFEQNIINDDFTQTTDVATAEASSQGSPKKKRHKFDNGDGTSCKRCSCKKSKCLKLYCECFAAGVYCSEPCSCIGCQNNQSHMETVLSTRQQIESRNPLAFAPKVIHTSEPGMDLGDFSNKTPASARHKRGCNCKKSSCLKKYCECFQGGVGCSVSCRCEGCKNAFGKREGEENIEETWDSYQT

SEQ ID NO: 226454 - protein, 232 aa, Zea Mays
MLDYDYLVVALGATVSTFNTPGVLEHCCFLKEVEDAQKIRKGVIDCFEKASLPNISEEEKRKILHFVVIGGGPTGVEFAAEMHDFLVEDLVKLYPAIQDLVKITIIQSAEHILTMFDERIASFAEQKFKRDGIEVCTGFRVIKVSDDLITMKRKSDGEELSVPYGMAVWSAGIGTRPVVMDFMQQIGQTNRRALATNEWLRVRECEGVYAIGDCATVSQRKIMVLLLDNFIC

SEQ ID NO: 226455 - protein, 230 aa, Zea Mays
MEIGDLVQEPSNSSPGPISPSARSALPARTPQIPNGHAYRRLQVGAGCTASCGPEHRAELKRHLMAGVYKWKLASYKQMERTKVASERLSLRSNSTKHHDTVHLGLGHFGKDGNLICRSLKSILKPKARQYAIVKVHNKDVDEGCSSKDNEIISSPSDRKEGSQLRALESYFSKFNPSQQLYSLPQKKHKSGPSSSNEVDAIIADEDANLKNRADSLQVQIDRGHTGKVT

SEQ ID NO: 226456 - protein, 59 aa, Zea Mays
MDPPQQPEPVTYVCGDCGAENTVKLVDVVQCRECGHRILYKKRTRRKAVLCCGGVDDKV

SEQ ID NO: 226457 - protein, 267 aa, Zea Mays
MLYTVQGAGSIGGKPLLELNRVLRPGGYFIWSATPVYRQEQRDQDDWNAMVTLTKSICWRTVVKSQDVNGIGVVIYQKPVSNSCYAERKTNEPPLCSERDGSHFPWYAPLDSCLFTTAITTSDEGYNWPVPWPERLDVSVPDDSASNKEKFEADTKYLATYFQQRFDWSSHDWCRSFSTYPRTYDLLHMSNLIGNLTNRCDLIDVVVEIDRILRPGRWFVLKDTLEMIKKIRPILKSRHYETVIVKHQFLVATKSFWRPGKPASTSG

SEQ ID NO: 226458 - protein, 283 aa, Zea Mays
MAQKDLYLPFLALSIIACCLMNLQTVLSSSSRMRNSTDDISDDKCPPQPHPLGMCRSRVAAYGYPCEEYHVTTEDGYILSLKRIPYGLSGATEMTRTPVLLFHGLLVDGFCWVLSTPKQSLGFILADGGFDVWIANSRGTESSRRHTTLSPQDPAFWDWTWDQLADYDLPAVLEFVYNRTGGMKVHYVGHSLGTLIILAAFSENRLTDIVRSAALLCPIAYLNSMESRLILLATRIFLAETIHMLGYHEFNPVGWVCRASLLQLLVFVSVLLARKKKNTDYMP

SEQ ID NO: 226459 - protein, 285 aa, Zea Mays
MAQKDLYLPFLALSIIACCLMNLQTVLSSSSRMRNSTDDISDDKCPPQPHPLGMCRSRVAAYGYPCEEYHVTTEDGYILSLKRIPYGLSGATEMTRTPVLLFHGLLVDGFCWVLSTPKQSLGFILADGGFDVWIANSRGTESSRRHTTLSPQDPAFWDWTWDQLADYDLPAVLEFVYNRTGGMKVHYVGHSLGTLIILAAFSENRLTDIVRSAALLCPIAYLNSMESRLILLATRIFLAETIHMLGYHEFNPVGPVAKEVLGKVCVDPEVDCYDLFSAVAGNSAT

SEQ ID NO: 226460 - protein, 118 aa, Zea Mays
MKDTGSKNDLLNFTIAGRLLAQSAALYGLYSAGHISNSSYELMERLLKVFIYHDGEQTYFPFPRVERFYVSQGSFMKLETNQNFVVIKLLVLVHVLIETETTVGGDDMMLRFTLETAC

SEQ ID NO: 226461 - protein, 472 aa, Zea Mays
MRSYSEWHARWVERATERGWFLGRIVATVRVACRLRPREKIGSEIHMTAPLPTRTACLAAAKLPRAAAAAKPPCPVIPRARRGDTAQPGYTQEEFEFYLSDSKPCLLVTNADGNVAAQAAAAKLRLAHAATSLHDAVDPVHLAGLPVPALQNGSHVGGVAGSLSPGAIALAYSLYATSAARPSARSLTPVTSPSSPIAPLPTSTWARSLPVRVPTLRSHMRQRTMVLSNYLHGKGCFRRPSMEIEYGLCAVSLDHEAVKTWIYPTNVEGREYQKYMVEKAMFTNTLIALPTGLGKTFIAAVVMYNYFRWFPEGKIIFTCPSRPLVTQQIEACHNTVGIPQSLQHDHLILYFHFSKTSNILHMIFSYPREALKAYIQTIKEAKNIILSSTSYHRCRAKQWACYNLLKEHRDIQVLYHDDGVKDNPSTNGSKEQQGRRPTLDCKRAQFAMKDTGRNRGVDQMAKWRGRKTHIEF

SEQ ID NO: 226462 - protein, 97 aa, Zea Mays
MTPVAGCCSEASKRARGFASTYRACASKWLGARRCQERSCEGQRIMALELVDAQGVRRRALKSTEALASFLHTPKFVVVPLQRGSTSLRSRCRSLQR

SEQ ID NO: 226463 - protein, 394 aa, Zea Mays
MDLAHQRISSFPRRAPSSIFSPGQPAIVPHRAPRHHTTSLSPNKEETRKKKTSRGGGARGIAGAGGAATGEGGARGGCPSVTTFFRGCWIAFSGNQEREANKEMVVYLVDASPKMFTPTTTQIREPNKRTRLWLGSFATAEEAALAYDEAARRLYGPDAFLNLPHLRASAVSSTAAHQRLRWLAASARGAAAVPAYDLLNLNAQHNIYNLLAHVPLMDFQKESTFDMWSTVGLISVLTLDFWFCTSDEGLSSKGENDSFKVLALIHQNVIPSMSNPSILCDFLTRSYDIGGVISVMALSGLFILMTQHGLEYRKFYEKLYALLTPVVFMAKHRSVFLQDKQLKSHPPKNVESEILCEHIKKEREAAKAGKRPYYLKKSELRERKLMNKYNELKR

SEQ ID NO: 226464 - protein, 135 aa, Zea Mays
MDLAHQRISSFPRRAPSSIFSPGQPAIVPHRAPRHHTTSLSPNKEETRKKKTSRGGGARGIAGAGGAATGEGGARGGCPSVTTFFRGCWIAFSGNQEREANKEMVVYLVDASPKMFTPTTTQVFLLLLPAHQSPA

SEQ ID NO: 226465 - protein, 336 aa, Zea Mays
MKTKTVSNVTTFFRGCWIAFSGNQEREANKEMVVYLVDASPKMFTPTTTQIREPNKRTRLWLGSFATAEEAALAYDEAARRLYGPDAFLNLPHLRASAVSSTAAHQRLRWLAASARGAAAVPAYDLLNLNAQHNIYNLLAHVPLMDFQKESTFDMWSTVGLISVLTLDFWFCTSDEGLSSKGENDSFKVLALIHQNVIPSMSNPSILCDFLTRSYDIGGVISVMALSGLFILMTQHGLEYRKFYEKLYALLTPVVFMAKHRSVFLQDKQLKSHPPKNVESEILCEHIKKEREAAKAGKRPYYLKKSELRERKLMNKYNELKLYDSAIEFVILSIDL

SEQ ID NO: 226466 - protein, 1124 aa, Zea Mays
MARQTSVTEADLEFMLIDENAKPKPLPYSLLEKITNGFSGAHIIGYGGSADVYEGFIGNHKIAVKRLRIPYQHEKEFSQEIECLMKVKHINVVRFIGYCSDTQGQAEKYEDNHVMADSQERLICFEFLPACLDKYIKDPSCSLEWRQRYQIINGVCQGLHQLHEHEILHLDLNPRNILLDDDMVPKISDFGISKCLKKNQGHFYTETISGTPIYMSPERGKHGPITTKSDLFSLGVTVIEIMTGNKENIDQATVEDVFASCIKIFNDKSLTAAQVRQIMVCAEIGIKCRNSEPDKRPSNTKEIIDKLEEEARTEESQESGKLLKVLPTLLLFDLHPGKLIPCSLQLTNDTDEHMAYKLSITESVDWSKYFTTKLPLYGIVQARSTYTVILTVLLECDAPSCTLAYEYIWKFNNTLEFEDFLEQTRPRVKLLSIVKPQTPLLSLDAHPTKPWVITGHAFGHVRIWNHETQKLLYSFKLSLGPVYSVKFIARKQWFVSSSAEGLIHVYSMETKMQKVKSYRAHDGVSISLAVHPTLPYVLSWPCSGPHEKKLWNWEKGWDCTQTFEREYVARNFVCQVAFDPKETNRFASASNYRVKVWSVDLPKCNYNLPGFFNEVNFLEFFTRDDQQYLIITVSHDKTAKIWDMRNKKYVYDSMEQNLMSPVSSVFSHPNLPILLTRSIDGTSHFWSPKDFRFEAVLDCRYGGHVWGIACLMGSKRRFVIGQETALTILDVGDQECQDMRQEGTSSEVITPGSSELLLDVHPLTLHFPFHAHKLIPCTLHLTNKTDEHVAFNLSIEDGMESWQQIFVRMPLSGIVPPKSTYTLVVTMRELTYLPTQNFNLTLQSNICEDRYIYSFMSLSESDQFFEDLKEIRNVAPPQVKLKAVFSLQGQTTFENGSSTGENLVQPLINIWTLFNPAKDFSSMLISLDADPTESWVITGHRHGDVALWKHGMQKMMSLINISGEASLPRNSLNTQHDVYSVKFIARKRWFVAGTCDGFIHVYKYETRIMDCIKRFRAYSSGIIDWGICSSRALIVHPTQPYLLSTCEEMKLWDWDDDWKCIQKFGREHTDSILQVAFSPNDSFASVSSDHTIKVVFNGEPPSLARLQRSFLDELVCWVMVGAKM

SEQ ID NO: 226467 - protein, 639 aa, Zea Mays
MSNAKAVLEPAFQGAGHKPGTEIWRIEDFKPVPLPKSDYGKFYCGDSYIVLQTTCKGGAYLFDIHFWIGKDSSQDEAGTAAIKTVELDSMLGGRAVQHREPQCYESDKFLSYFKPCIIPMEGGFASGFKKPEVDKFETRLYICKGKRAIRVKEVPFARSSLNHDDVFILDTENKIYQFNGANSNIQERAKALEVIQHLKEKYHDGVCAVAIVDDGKLQAESDSGEFWVVFGGFAPIGKKAVSDDDVVLETTSPRLFSISNGQLKLEDTVLTKSILENTKCFLLDCGAELFVWVGRVTQVEDRKAASAAVEKFIIKENRPKTTRITQVIQGFENHTFKSKFESWPVSNTAGSASTEEGRGKVTALLKQKGVDVKGISKTSVPAVNDEIPPPLLDGGGKLEVWCINDSVKIALPKEELGKFYSGDCYVVLYTYHSVDKKEEFYLTYWIGKNSVQEDQESAFQIANTTWNSLKGRPVLGRIYQGKEPPQFVALFQPMVILKGGTSSGYKKYVEEKGLKDETYCSDGVALIQISGTAVHSNKTIQVDAVPASLSSTDCFVLQSKNSIFVWNGTSSSVEQQQWASKVAEFLKTGVAVKHCKEGTESSIFWSSLGGKQSYTSRNVVPDVVLREPHLYTFSLRNGY

SEQ ID NO: 226468 - protein, 231 aa, Zea Mays
MQMQPGLAPADWSFFHEHEPVFFMPDLAHAKFGAATATAAGAAGSNSAQAKGAATTTDVAQKIVKQVEYQFSDINLVANEFLLKIMNKDTEGYVPLSVIASWKKIKSLGATNQMLVKALRTSTKLNVSDDGKKVRRRQAFTEKHKEELQSRMIIAENLPEDSSRNSLEKIFGVVGSVKNIKICHPQEPNTARASKSDTLVSNKMHALVEYETSQQAEKALNDERNWRKGLR

SEQ ID NO: 226469 - protein, 617 aa, Zea Mays
MASSSGYADGGTGGLGDGDPPVPSMRKQPSRIASGMRRLASKVSAAVPEMRGLKRTQSGAQSGLRGLRFLDKTSAGKDGWKTVEKRFDEMSTDGRLQRENFAKCIGMADSKEFASEVFVALARRRHINPDDGVTKEQLKEFWEEMTDQNFDSRLRIFFDMCDKNGDGKLTEDEVKEVIVLSASANKLAKLKKHAATYASLIMEELDPDHRGYIEIWQLETLLRGMVTASGPTNMGASASLARTMVPSSHRTPLQRRMNKAVDLVHENWKRIWVLSLWGVLNMALFVFKFTQYRRRAVFEVMGYCVCIAKGAAETLKLNMALILLPVCRNTLTRLRSTALSKVVPFDDNINFHKVIALAIAIGSATHTLAHVLCDFPRLVACPKDKFMEKLGPFFNYAQPTWATLLSSIPGWTGILLILIMSFSFTLATHSFRRSVVKLPSPLHHLAGFNAFWYAHHLLVIAYVLLVMHSYFIFLTKQWYKRTTWMYLAVPVVFYASERSIRRIREKSYRVSIIKAAIYPGNVLSLYMKKPTSFKYKSGMYMFVKCPDVSPFEWHPFSITSAPGDDYLSVHIRTLGDWTSELRNLFGKACEAEVTSKKATLARLETTVVAHGLAEDTR

SEQ ID NO: 226470 - protein, 435 aa, Zea Mays
MIRVAIRTLTLNVYHVGDESVNRFVSRTPLSDYFSDMVQHFQKQCIDLDKLVARSSRKGNSSVPISSIEDAIVQIEDTLYYFSDVMSSGIPDLERFITENILRVLVFRFLLPSLQRQSTDLDLSVTTSMYLLCCILHIFKNKDMASTVAAALFHQPDGPDDRKQRTPNGYTSEHDSCKSENHCTTASGIEQSSEEPNSLSSVSWKHLPNNSSRSDCCQGNTPREHLLSYITEGDDSQALGSLCLFATLLQTKELDESMLDALGILPQRKQHKKLLLQALVGEDLAETQLFSSSSSLTDDSICSDFDIYVRKLQDKYGLQCHHPRQMTSKAHRYQVLDALVDLFCRSKVSADVRLVGGWLFRQLLPHGEEEFTAFHLRRLKDSHKDCSSKLSEESGGCWCDMLLPIVKEAWRNCKKGIFATKRIQIYYCTHGFVFI

SEQ ID NO: 226471 - protein, 495 aa, Zea Mays
MAPPSRDYWLGFFRGAGDNIFDAIEAAITVAASDHPAALRERRDGIAERLFTALLVTSAAAAAAGAAAAAPGGGAAGGTPVAGAPTPAQLHPEGAASVPSLCSSDRAEAIADDAAPRCDDPVLAETERIKAVLLSDQEKPEAELLELLRRLQELDLAFDTLDATAIGKAVANFRKHSSKQIRNLVRSLIEDWKHTVDVWIAHRRDAVVDQTPQSMGPSSLEQEDRGAASTHMDEGDLFATPSTTIRLSEENMDGDGSIMTNDSRDCGQRYPMMNQEPARRPPPMGQRYDPEPCWRQSRPQELSNGQTKEQFVAEMLARPSSVESGPGRPQARPRQQHQDTPAAQARPQPAASEKPAAQLDANSVRAKLELAKNAKLEATKRKPQARPRQQHQDTPAAQARPQPAASEKPAAQLDANSVRAKLELAKNAKLEATKRKLQEGYQESDNAKKQRNVQMVGPQNLPKQGNTNNNRSFQPSGSGRPRSSGNVNSNRNWSR

SEQ ID NO: 226472 - protein, 259 aa, Zea Mays
MTKTYAYAGPANCTALHLQGNGALPCLESGTRIVDTLMNTSPICQVLPPGFGIICTHPMFGPESGKHGWGKLPFVFDKVRVADDGDQAATCDRFLSIFEQEGCRMVEMSCAEHDRYAAGSQFITHTIGRVLSQLNLSSTPINTKGYETLLQLTQNTVSDSFDLYYGLFMYNINATEQLDRLEMAFEKVRQMLSGRLHDFIRKQIVERADPSGKLANGRSSSPAAHHLSTLTEENKTRMRGDDELEVQPLGQHLNYKVIS

SEQ ID NO: 226473 - protein, 249 aa, Zea Mays
MTKTYAYAGPANCTALHLQGNGALPCLESGTRIVDTLMNTSPICQVLPPGFGIICTHPMFGPESGKHGWGKLPFVFDKVRVADDGDQAATCDRFLSIFEQEGCRMVEMSCAEHDRYAAGSQFITHTIGRVLSQLNLSSTPINTKGYETLLQLTQNTVSDSFDLYYGLFMYNINATEQLDRLEMAFEKVRQMLSGRLHDFIRKQIVERADPSGKLANGRSSSPAAHHLSTLTEENKTRVSPALTLASPTL

SEQ ID NO: 226474 - protein, 792 aa, Zea Mays
MAPTKRLEKLKLSTLLTFMRCHGGSSDDHLRIGTVGFSRVVYVNEPDRLEEEGFSYLLNEVSTTKYNLATFLPKSLFEQFRRVANFYFLVSGILALTPLAPYTAVSALAPLCVVIVATMAKEGVEDWRRKQQDHELNNRIVKVHRGNGHFEESKWKNIKVGDVIKVEKDNFFPADMILLSSNYPDGICYVETMNLDGETNLKIKQALKVTLDLHEDIKFREVRQTIKCEDPNANLYSFVGSMEWRGQQYPLSSLQLLLRDSKLRNTDYIYGAVIFTGHDTKVMQNATDPPSKRSKVEKKMDQIIYLLMSSLLMIALLGSVFFGIWTKEDLRDGELKRWYLRPDATTIFYDPKRAALASFFHLLTSLMLYSYFIPISLYISIEMVKILQALFINQDIRMYHEESDKPTHARTSNLNEELGMVDTILSDKTGTLTCNMMEFIKCSIAGTAYGQGVTEVERAMAMRKGARLDDDIENGDHKDKKNDNSPHVKGFNFKDQRIMDGKWVHEPNRVMIRDFFRLLAICHTCIAEIDENEKVSYEAESPDEAAFVIAARELGFEFYKRSLATIIVRERNPSQNVVEKRKYELLNMLEFSSSRSRMSVIVKEPEGRILLLSKGADSVMFKRLAPIGRKFEEETRSHINQYSDSGLRTFVLAYRVLDEKEYKEFNEKLNAAKASVSADKDEKIEQVADSIERDLILLGATAVEDKLQQGVPECIDKLAQAGIKMWVLTGDKLETAINIGFACSLLRQGMTQIIVTLEQPDIIALEKNGDKPKIAKMMLSLSSWILLSSVHQ

SEQ ID NO: 226475 - protein, 506 aa, Zea Mays
MSARRAAKSQHAAATPRTINLNLARRPGGGRPSRGAGRAQTRPAPPQPARQVQVNLGALFEMERRVRGLESAPPSPAPASQSQEDAEEREEKWQFQAEILRAECNFLRMEREVALRKLDRHRGQMEAALKSAVETLVSGRKKVDGKGDVGVAAALDEGIEDLEEMMEELRVEKESGRRAMGGARELQRSRGRNFDRQASSLRRRLEKMPPANPDPLVKDIREIALPVPAPPPPPPAAEQSGDDERVHGANTSDVEMLRMKMEGMSKGMRERMAEYSRRLEAVASGDNAGCQSRKCGNRHSRKASAGSQRSWSGGSTASNGNAPSALDAGPHARSRQNVAAEKRQQQHVIMSGECKLVGSASCRDCREIMWKIMEQVNAESDQWTEMQDMLEQVRLEMQELQSSRDTWQHRAMASDISLRSLNSHYWSGKIGDRRTNSVRRSCTGRFQSSKASYTLPKPIYQPQLLFLTKISGQMRARWSTQEEILSTSHPRNPARRRSRSTSSSAA

SEQ ID NO: 226476 - protein, 269 aa, Zea Mays
MGPPPKPWERSGTEGTSGPAPFKPPSGGSTSDVVEASGTAKPSENVTAMEGNAAPNVNSTVSRPMPQRPWQQTGYGNTYGGYGGSNMYSSYGGFGNTYGTGGLGNSMYSSYGGGYGGGMYGGGMYGGGMYGGMGGYGGYGMGGMGGMGMGPYGNQDPNSMGPPASPPGFWVSFLRVMHGVVNFFGRISFLVEQNTQASYFFMTAMLQLFDRSGMLYGELARFVLRLLGVRRKPKKGGSIQGPEALAFEGPSRQSTEAPKTNNWDNVWGN

SEQ ID NO: 226477 - protein, 565 aa, Zea Mays
MKDVCSAGMNIDQSFHAPANEALHTGVSSRRTDKMSGKDKDAHSLRDDLYLKQGHQTDLLEALELRRRTMIDNGMSTSGVVSLEEDTHFEPRNATCKEIKAIGVQTDNTSDNEHLDCKKLLVERISGNLRAMWGMSPNSLSSRNLISKINVSCSEEILSLLQHTRLSDNCEPSSQAISSMNEAISQLYDTFIKMNSGKMSIQTFLEALLNLCAFDDAAIVSRTLRVFLKVLQHLLQHGAKSSERNNVSVEPYVNVLMENNHKDCSTLLRPVDAEDSLRLHNMFLPFTFWSSLFTGMLQIGVKYSQETIRTDALSIMILIVRTTDPIEERQKFGFTSVMTRLHLLLQKENGLLVKKHSVRLLFLLLNCPVMLKLLCSGGKDGSKQMGSEACESNRSQEVISSVLVDLSDCLTCGETCSLGIELCRLVIILLAYIASSGKLGYEVLLVPVSARGASFLEMIMEVLASQMQYETRELLKERCLVMREALILLNRLASHANYSKPTLEVLTRSKLCATWTIDVANRLPHTWMANDLAELAQKFRSRVYAFIEEKPLTSDGTNLGASNKR

SEQ ID NO: 226478 - protein, 173 aa, Zea Mays
MSAGELRLELDELRRLESLAKHPRVQILLANEIRNVEAKIYVSLEGVEQEKVETTFKPTSVDIKFHDVKGKNYRCAIPKLNKEIVPEKCKVVVKPTRVVVTLFKGSKGNWLDLHFKEDKFKPNMDKEKDPMSGIMDLMKNMYEEGDEDMKRTIAKAWSDARSGKTTDSMSGLR

SEQ ID NO: 226479 - protein, 250 aa, Zea Mays
MSFPHKMLPVTFVCSNQGQPGVKSHRYCKNIIGCDNWSISKTSWGNYQYNNVWTKENERQRKHFDDEVERIRAEAQCRIAEAERECKITLENKEAESTSNDTGEVHNLLQNEKMLRQSAEDEASDLKNQISHWKKLEATATAEIIKLQKMLDAEASQKEKLEEEIGVLRSQLLQMSMEADETRSLDKGDGPGKIFPGFRFIGCLRLEVSQPREQGQLDRSNRLPNSLNKLGYKRYCHCLNLKNLMSAFMQ

SEQ ID NO: 226480 - protein, 232 aa, Zea Mays
MFGQRAMKVENMVKLKEEFDYKSLCRKLDIELDKLIAENERQRKHFDDEVERIRAEAQCRIAEAERECKITLENKEAESTSNDTGEVHNLLQNEKMLRQSAEDEASDLKNQISHWKKLEATATAEIIKLQKMLDAEASQKEKLEEEIGVLRSQLLQMSMEADETRSLDKGDGPGKIFPGFRFIGCLRLEVSQPREQGQLDRSNRLPNSLNKLGYKRYCHCLNLKNLMSAFMQ

SEQ ID NO: 226481 - protein, 717 aa, Zea Mays
MEQISLGNRYKECRTQRTTSCQTKILVGKDVLNEIEQRRSSPSVIAKLMGIEVLPPSKVVNSRHQEFKDVFEVSEEPPEAVAKEKSQGLPSLKRRALSLKKLMPSKTLYRDDTHDCYVDCVAGLGRLNSVEINNPLFEKHLHDMNYSANYQYVKDTSSVCRTYPVGLANSSLSNFSLLSRGKNKDFNSIVVLEPPCLEKGHDPENIFSIPYLSPVNKNCSRGMKHKKFEFPVMENGRVREHILGTEANNVLRIRKERPLTSDSIDPLQIGQEASVHQFGNTDVSCSGSSQRYSCGNDSFRKTNRSSSSRICRHAESAVGSKTLAEMFALSDSERLKLNSDSNAPVLCNMIDRDNGHSKDGCFIVLPKHAPVLSIRSSMDMPSCLEGSSQGKNNLNISNIYNNAHLSSAHCFQNLTGDNFSTPDCLNDKVLLTTDEDVVRQSAESEPSRFNLQVSRKQRVTVLPFHCHEDESISVSDHTDGTKFCKGSKEVEQPSPVSILEPPINEDICFPRCFNYDLQGMANKQRGCHQYHNESEVNMSSDDEDHSFYQSLEAFQVEENWDFSYLLDILICSGIIVVDWQLICKSWYLPGYPVGPHVFDRLERKYNKIATWAKPERRLLFDLVNSILSEVLAPCVDVHPWVQPSRHCVAFWGPEGPVEKVWQTIVRLQEDCVTRHPDEMVLDTNWLEVGTDINMVGKQIARMLHGDLLEEVIVDFLG

SEQ ID NO: 226482 - protein, 387 aa, Zea Mays
MGGGGGGGNSRELDQTPTWAVASVCGVIVLISILLEKGLHHVGEFFSHRKKKAMVEALEKVKAELMVLGFISLLLVFGQNYIIKVCISNHAANTMLPCKLEAAAVEGKDGHGKEAAAVVAGKKKVAVAVPGKKKKKAAAAADHLGGVVDWPPPYYAHNARMLAEASMATKCPEGKVPLISINALHQLHIFIFFLAVFHVSYSAITMALGRAKIRAWKEWEKEAAGQDYEFSHDPTRFRFTHETSFVRQHMNVLNKFPASFYISNFFRQFFRSVRQADYCALRHSFVNVHLAPGSKFDFQKYIKRSLEDDFKVIVGISPPLWASALIFLFLNVNGWHTMLWISIMPVVIILSVGTKLQGIICRMAIDITERHAVIQGIPMVQVSDSYF

SEQ ID NO: 226483 - protein, 1107 aa, Zea Mays
MAATAGASDDGGSVGGGGGGERMKLLCSLGGRILPRPGDGTLRYAGGDTRIVSVPRGVSLPDLLGRLADAYGGATGPHFAVKYQLPDEGLDALISVSSPEDLDNMVEEYDKLSGASPKLRVFIFPILDAAGGSGAAGGEDLETGNFDSGLRYLEAVNGIVRKDSIASLSSTQCSDGGLPPPAPSGGGGPGSPAALSPTSTSSNDAARSNITGAGAAPPPLVDVFSNAAPAPVHVKPQEIGAEGRAPQANPHPHPEAATNTHPEAARYRQPLSQLPPLPPVFMNDHRDAIQGLNQQLPGNGARFDDCHMCLKALPHAHSDPVVNEYGNEVHGGAAPEPGPVFMSLRPEDVARMMIPERGVQPPMGAYGYTHMHPVPQERMYVPKMEGVTNSVFIDPTGLHQHVYVQQQQQQQQMPPQQLPSTYGFSHIPVISSEKDRVVSPSSAHNDVANSHHQFMQQSQQQLPSGHGMPQYPVKPTSPSNPLAGEGSVSGNSRHNEDGQVYRDNMPPVAPVAVPTYMANVDRMMDSLRMSPSEVSGSTEQRKHAMSPDSGLPQNAVPDYSQGHPENSISTWPDTRANDVHPSNTNTFFDVSEPKVLLQTESAPPPSVASSYLHNVQHVNMSHMPHMVSIGGPYSSYVVATVGPGGLPQSTYGIDMIYPNATVNPVTERRDVPPEVYHKEAPHEVVAPPNTVQLPTAALANHATNVDQAAAHALPPRPKRVASRENISPKDPHPHNSLLNCKGPDLNIPAEDVSLQKQSDHKDLLSMDDGLATSKAQSSEPQPPLVNEGVGAITNKVEGEVHPNEVSKSRPADWISGFPASDGRLQIIKNNDLEELQELGSGTFGTVYHGKWRGTDVAIKRINDRCFAGKPSEQEKMRYDFWNEASKLADLHHPNVVAFYGVVLDGPGGSIATVTEYMVNGSLRTALLKNAKTLDRRKRLIIAMDTAFGMEYLHSKNIVHFDLKSDNLLVNLRDPQRPICKVGDLGLSKVKCQTLISGGVRGTLPWMAPELLNGSSSLVSEKVDVFSFGIVLWELLTGEEPYADLHYGVIIGGIVSNTLRPPVPDSCDPEWRSLMEQCWSTEPSERPNFTEVVNRLRSMAASQKVQQH

SEQ ID NO: 226484 - protein, 1003 aa, Zea Mays
MDLLMMPSNCGNLMLVQWPLFLLTSKIMLANDYASDCKDSQYELWDRISKDEYMAYAVKECYYSTEKILHSLVDAEGQHWVVRLFRDLNDSIAQGSLLVTINLKKLQLVQSRLTGLTGLLIRDETAGRAAGVTKALLELYEVVTHEFLSQNLREQFDTWQLLLRARNDGRLFSKILWPKDPEMKEQLKRLHLLLTVKDSATNIPKNLEARRRLQFFTNSLFMDIPQAKPVSEMIPFSVFTPYYSETVLYSMSELCVENEDGISILFYLQKIYPDEWANFLERIGCGESSEDDFKESPSDTMELRFWVSYRGQTLARTVRGMMYYRRALMLQSYLERRCLGGIEDGNSAAEYIDTQGYELSPDARAQADIKFTYVVSCQIYGLQKQTKKQEAADIALLLQRNEALRVAFIHEEEIISRDGKATTREYYSKLVKADVHGKDQEIYCIKLPGNPKLGEGKPENQNHAIIFTRGDAVQTIDMNQDNYLEEAMKMRNLLEEFHNAHGKHGIRKPTILGVREHVFTGSVSSLASFMSKQETSFVTLGQRVLAYLKVRMHYGHPDVFDRIFHITRGGISKASRVINISEDIYAGFNSTLRQGNITHHEYIQVGKGRDVGLNQIALFEGKVAGGNGEQVLSRDVYRLGQLFDFFRMLTFFFTTVGYYVCTMMTVLTVYIFLYGRVYLALSGLDYSISRQARFLGNTALDAALNAQFLVQIGIFTAVPMIMGFILELGLMKAVFSFITMQLQFCSVFFTFSLGTRTHYFGRTILHGGAKYRATGRGFVVRHIKFAENYRLYSRSHFVKALEVALLLIVYIAYGYTKGGSSSFILITISSWFLVMSWLFAPYIFNPSGFEWQKTVEDFDDWTNWLLYKGGVGVKGDNSWESWWDEEQAHIQTFRGRILETILSLRFLMFQYGIVYKLKITDHNTSLAVYGFSWIVLFVMVLLFKLFTATPRKSTALPTFVRFLQGVLAIGIIAGIALLIVLTSFTVADLFASALAFIATGCWP

SEQ ID NO: 226485 - protein, 958 aa, Zea Mays
MDKQTIPLSPNQLLLRVMMNSMNVPSKRSTLEKKLDKLILALFATLFTMCVIGAIGSGIFINEKYFYLGLRGHVEDQFNPKNRFVVTILTMFTLITLYSTIIPISLYVSIEMIKFIQCTQFINNDLHMYHAESNTPALARTSNLNEELGQVEYIFSDKTGTLTRNLMEFFKCSIGGEMYGTGITEIEKGGAERAGIRIDDDEGKRSANAVHEKGFNFDDARIMRGAWRNEPNPEACKEFFRCLAICHTVLPEGEETPEKISYQAASPDEAALVSAAKNFGFFFYRRTPTTVMVRESHVERMGSIQDVPYEILNVLEFNSTRKRQSVVCRFTNGRLVLYCKGADNVVYERLADGNHDMKKISREHLEQFGSAGLRTLCLAYRDLSREQYESWNEKFVQAKSSLRDRDKKLDEVAELIEKDLILVGCTAIEDKLQEGVPTCIETLSAAGIKIWVLTGDKMETAINIAYACSLVNNDTKQFIISSETGAIREAEDRGDPVEIARVIKDSVKQNLKRFHEEARHSLISTPERKLALIIDGRCLMYALDPTLRVDLLGLSLSCHSVICCRVSPLQKAQVTSLVRKGAEKITLSIGDGANDVSMIQAAHVGIGISGQEGMQAVMASDFAIAQFRFLTDLLLVHGRWSYLRLCKVITYFFYKNLTFTLTQFWFTFQTGFSGQRFYDDWFQSLYNVIFTALPVIIVGLFDKDVSASLSKKYPQLYKEGIRNSFFKWRVIAVWGFFAFYQSIVFFYFTAAASRHGQGSSGKILGLWDVSTMAFTCVVVTVNLRLLMACNSITRWHYISVAGSIVAWFMFIFIYSAIMTSFDRQENVYFVIYVLMSTFFFYLTIVLVPIIALFGDFLYLSIQRWLFPYDYQIIQEQHKDEPHEYSRVPLPETSHLSPEEARSYMISMLPRESSKHTGFAFDSPGYESFFASQQGIGVPHKPWDVARRASMKPQRAGKS

SEQ ID NO: 226486 - protein, 154 aa, Zea Mays
MIDVSFETPGYKKPTQEHYLSYLSFAPPEVTFGRFQADEQGWVDTIKSVKLGGIVRMNTMDWLGQSQYATQTVYWSSLSSAISEVVFSKNATVRLLVAYWAHLIPNTEKYLKSLLYSNVLCASSAYNHCGGKVEIKYYVVPGHNETGPALSQGG

SEQ ID NO: 226487 - protein, 356 aa, Zea Mays
MRALAGGFEAVAGERAAAAYTALASRTISRHFRSLRDGVVAQLQAARRALGEKDVAVPGMTRGDTPRLRVLDQCIRQHKALTQAAGMMESHPWRPQRGLPERAVTILRAWLFEHFLHPYPSDVDKHILARQTGLSRSQVSNWFINARVRLWKPMVEEMYVEEMKAEGQDGGGQQQVGVAVANNPNPSSAGHASEAAEDDGRGDSGGGAVVDRKPTRAQLLHDAGSLASVVNIGGGSRAGFGIMDHLDFDAYGGHHAGAVSLTLGLQQHDSHADGGAGGVNIAFGAPPPAHHHGYLFAPTAAAAGHQMGGGVHPGLHHHVQFSGAGAGIDGEAAHGQEHYRGLQGGGGFHLLRDLAG

SEQ ID NO: 226488 - protein, 356 aa, Zea Mays; identical to SEQ ID NO: 226487

SEQ ID NO: 226489 - protein, 223 aa, Zea Mays
MDRLLTEGVDQDEKKSIVENMIKLVDLYYAALDGHKVDVDRHLRVKAYPHFMEKKGFESYHSSSILGRIYDETEEIIAQQCDEQIQITTLPCFSEVEATPECTSLWEHRYQEYLTKSRGLFDLGKEEKNDEFQKLYQHYKHLLYDADELEETSRDLSDVFMEACAIYRIVYERAWCTRSVSRCRFVWNVAGAALCHLHATKYAAQRGEKTALCPLSVIRQLYI

SEQ ID NO: 226490 - protein, 1623 aa, Zea Mays
MVSIILSLLHMDDCAKLSQSVPSECYVSHECHDINIESEGKNVVVYFVGLLLDILRHNLESKGSDTDHLSSTGLSPAGRQALEWRLKHAKHSIEDLDWRLSVLKRLPPLSERQWSWKEALVLLRAAPSKLLNLCMQRENYDIGEEAVQRFSLPAEDKASLELAEWVAGAYKRALVEDAVNRVTDNTNAAHELDILSLRTQLGSLTTILLCVDVAATSAKSVHMCRFLLDEATSMLSEIFPGRSPKVGPTYWDQIQELATISVIKRILQRLHDILDLDTLPSLQVFFTEMSISSSTECSRVGQKQRPLGLLHQMIDDAFKGKRQFLSGKLHNVARAIVDEDFDTVYSKEGVNLEKKDILSSEKGILLGHGLRILKQASRSDLASSNVVDSGPEHKGSANRYLGPLSTKPSTYLSNFIIYTATIGDIVDGTDTTHDFNYFSLVYEWPKDLLTRLVFERGSTDAAAKVADTMSVDFVHEIISACVPPVLPPRTGQGWACIPVIPTICNISSENRLCTKSSPAQGWSAHDSSLSSRQEPLYPLQLNLVKHLAQLSSVRAVLACVFGSSILSGDNESSFTHVKDSTQAPETERSFFEFALEQSERYPTLNRWIQMQSNLHRVSESSITDKSEVSLHQSKGKFCMKRTRESDSDGESELEENVISGNTSSSSLESTKHEDARLEPTTFISFDWENEAPYEKAVERLISEGKLSDALAVSDRCLRNGASDNLLQLLIEQKEEKGPGTGQIHPYGSHSLGNDTSQYCLRLRDKKVAAQLALKYLHSWDLDAATNVLTMCMCHLPENDPMRSEVLHMKQSLQRYGHIMSADEHYTRWQEVEADCEDDPEGLALRLAAKGAVSAALEVAESASLSIDLRRELQGRQLVKLLITDPLNGGGPAAASRFLSTLRDSNDALPVAIGAMNLLPDLRSKQLLVHFFLKRTVGNLSDAEIARLNLWALGLRVLSLLPLPSQQRCSSLHEHPQLIVEVLLMMKQLQSASLILKEFSSLRDDKLIIAYAKKAISINREARKAFSWVPRDSGTKTPPKDILRKRKSSGSGGDRSSWEAMPGLQEERTPVYPSEAQERLPFVSAPDEWVLTGDPDKDDATRSSHKYETSPDITLFKALISLCTNESVAAKGALELCMTQMKVVLSSQQLPLDASMDNIARAYHATETYVQALSYAKNLFKKLVGSSDLSSGSERSKEVDDVSVDTGSSSTGSQYLDELSDFLTQADMWLGRAELLQSLLGSGIIASLDDIADKESSSRLRDRLVNDERYSMAVYTCRKCKIDAVPVWVAWGHALVRMEHYAQARVKFKQALQQYKGDATSVVTEIINTIEGGPPVDVSSVRSMYEHLAKSAATIFDDSLSADAYLNVLYMPSTFPRSERSRQSRGHVDSQFRTASSYLEDGPRSNLDSVRYAECIHYLQDYARPQMLAFMFRHGHYTEACSLFFPFSQPTTEGETSLSSAPWSDPLTTDYGTIDDLCDLCLGYGAMAVLENTIRTITQSPTYHEAHMIQYMNTIITRICNYCETHRHFNYLYNFLVLKDDHVASGLCCIQLFMNSMSQEEALRHLGHAKTHFEEALSVRDRTIEATKLVLRSARNKGAPGKMTRETIMKYSTRVSYQAKVHGC

SEQ ID NO: 226491 - protein, 1390 aa, Zea Mays
MLSEIFPGRSPKVGPTYWDQIQELATISVIKRILQRLHDILDLDTLPSLQVFFTEMSISSSTECSRVGQKQRPLGLLHQMIDDAFKGKRQFLSGKLHNVARAIVDEDFDTVYSKEGVNLEKKDILSSEKGILLGHGLRILKQASRSDLASSNVVDSGPEHKGSANRYLGPLSTKPSTYLSNFIIYTATIGDIVDGTDTTHDFNYFSLVYEWPKDLLTRLVFERGSTDAAAKVADTMSVDFVHEIISACVPPVLPPRTGQGWACIPVIPTICNISSENRLCTKSSPAQGWSAHDSSLSSRQEPLYPLQLNLVKHLAQLSSVRAVLACVFGSSILSGDNESSFTHVKDSTQAPETERSFFEFALEQSERYPTLNRWIQMQSNLHRVSESSITDKSEVSLHQSKGKFCMKRTRESDSDGESELEENVISGNTSSSSLESTKHEDARLEPTTFISFDWENEAPYEKAVERLISEGKLSDALAVSDRCLRNGASDNLLQLLIEQKEEKGPGTGQIHPYGSHSLGNDTSQYCLRLRDKKVAAQLALKYLHSWDLDAATNVLTMCMCHLPENDPMRSEVLHMKQSLQRYGHIMSADEHYTRWQEVEADCEDDPEGLALRLAAKGAVSAALEVAESASLSIDLRRELQGRQLVKLLITDPLNGGGPAAASRFLSTLRDSNDALPVAIGAMNLLPDLRSKQLLVHFFLKRTVGNLSDAEIARLNLWALGLRVLSLLPLPSQQRCSSLHEHPQLIVEVLLMMKQLQSASLILKEFSSLRDDKLIIAYAKKAISINREARKAFSWVPRDSGTKTPPKDILRKRKSSGSGGDRSSWEAMPGLQEERTPVYPSEAQERLPFVSAPDEWVLTGDPDKDDATRSSHKYETSPDITLFKALISLCTNESVAAKGALELCMTQMKVVLSSQQLPLDASMDNIARAYHATETYVQALSYAKNLFKKLVGSSDLSSGSERSKEVDDVSVDTGSSSTGSQYLDELSDFLTQADMWLGRAELLQSLLGSGIIASLDDIADKESSSRLRDRLVNDERYSMAVYTCRKCKIDAVPVWVAWGHALVRMEHYAQARVKFKQALQQYKGDATSVVTEIINTIEGGPPVDVSSVRSMYEHLAKSAATIFDDSLSADAYLNVLYMPSTFPRSERSRQSRGHVDSQFRTASSYLEDGPRSNLDSVRYAECIHYLQDYARPQMLAFMFRHGHYTEACSLFFPFSQPTTEGETSLSSAPWSDPLTTDYGTIDDLCDLCLGYGAMAVLENTIRTITQSPTYHEAHMIQYMNTIITRICNYCETHRHFNYLYNFLVLKDDHVASGLCCIQLFMNSMSQEEALRHLGHAKTHFEEALSVRDRTIEATKLVLRSARNKGAPGKMTRETIMKYSTRVSYQAKVHGC

SEQ ID NO: 226492 - protein, 1449 aa, Zea Mays
MLSEIFPGRSPKVGPTYWDQIQELATISVIKRILQRLHDILDLDTLPSLQVFFTEMSISSSTECSRVGQKQRPLGLLHQMIDDAFKGKRQFLSGKLHNVARAIVDEDFDTVYSKEGVNLEKKDILSSEKGILLGHGLRILKQASRSDLASSNVVDSGPEHKGSANRYLGPLSTKPSTYLSNFIIYTATIGDIVDGTDTTHDFNYFSLVYEWPKDNTCGLVSLAPMSAFGKLGTKQLLTRLVFERGSTDAAAKVADTMSVDFVHEIISACVPPVLPPRTGQGWACIPVIPTICNISSENRLCTKSSPAQGWSAHDSSLSSRQEPLYPLQLNLVKHLAQLSSVRAVLACVFGSSILSGDNESSFTHVKDSTQAPETERSFFEFALEQSERYPTLNRWIQMQSNLHRVSESSITDKSEVSLHQSKGKFCMKRTRESDSDGESELEENVISGNTSSSSLESTKHEDARLEPTTFISFDWENEAPYEKAVERLISEGKLSDALAVSDRCLRNGASDNLLQLLIEQKEEKGPGTGQIHPYGSHSLGNDTSQYCLRLRDKKVAAQLALKYLHSWDLDAATNVLTMCMCHLPENDPMRSEVLHMKQSLQRYGHIMSADEHYTRWQEVEADCEDDPEGLALRLAAKGAVSAALEVAESASLSIDLRRELQGRQLVKLLITDPLNGGGPAAASRFLSTLRDSNDALPVAIGAMNLLPDLRSKQLLVHFFLKRTVGNLSDAEIARLNLWALGLRVLSLLPLPSQQRCSSLHEHPQLIVEVLLMMKQLQSASLILKEFSSLRDDKLIIAYAKKAISINVSSAPRERRSNISASRAKQKKATTPAKTNFVQSFGNFQREARKAFSWVPRDSGTKTPPKDILRKRKSSGSGGDRSSWEAMPGLQEERTPVYPSEAQERLPFVSAPDEWVLTGDPDKDDATRSSHKYETSPDITLFKALISLCTNESVAAKGALELCMTQMKVVLSSQQLPLDASMDNIARAYHATETYVQALSYAKNLFKKLVGSSDLSSGSERSKEVDDVSVDTGSSSTGSQYLDELSDFLTQADMWLGRAELLQSLLGSGIIASLDDIADKESSSRLRDRLVNDERYSMAVYTCRKCKIDAVPVWVAWGHALVRMEHYAQARVKFKQALQQYKGDATSVVTEIINTIEGGPPVDVSSVRSMYEHLAKSAATIFDDSLSADAYLNVLYMPSTFPRSERSRQSRGHVDSQFRTASSYLEDGPRSNLDSVRYAECIHYLQDYARPQMLAFMFRHGHYTEACSLFFPFSQPTTEGETSLSSAPWSDPLTTDYGTIDDLCDLCLGYGAMAVLENTIRTITQSPTYHEAHMIQYMNTIITRICNYCETHRHFNYLYNFLVLKDDHVASGLCCIQLFMNSMSQEEALRHLGHAKTHFEEALSVRDRTIEATKLVLRSARNKGAPGKMTRETIMKYSTRVSYQAKVHGC

SEQ ID NO: 226493 - protein, 1449 aa, Zea Mays; identical to SEQ ID NO: 226492

SEQ ID NO: 226494 - protein, 657 aa, Zea Mays
MAKFSNSAIVLLMLLIAAWRTTPAMSHFRMGKPPAEPELDYGGRVKNEKKTGPYDPEFKKAAGEAALLIRAKQEMTKRMVKHIETIASSAKIAIHLKLVLLIKSAEFMRAMAGEVADQMFVVSQQHASVAAADIVAALRFQQEILKKAAERCKAISSDVAMAQKMKHEMLKGVAHDLCNVAGNIAISMSSMAEMAMSVSGRVVVGVDVKVHTDMESRALAKVEAEAVAEAQALDKAEGEAVAGAEGEAKKGKSGGVSAGGDAGGYAGGKTDADATASGGKIDAGAGAGGASGGAKVGSDVGGSVGGGADVNAGAGAGAGADAGVYTVAKGNKAGGSDAKADISGGAKAGGDAGADASAGTGAGVGISKSFTIGGGVAGKAGGSGNAEAGVDAGVGGKAGESGKAYTGADAVVSKDAKVGGGAGGSVGGSGNAYTGADAGTSVSSGGSAGADAGTGATVGAGVSKDAKVGGGVGGSVGGSGNAYTGTGAGVSSGGSSGGADAGAGATVGAGVSGGAKVGGGVGGNAGGSGKAYTGTGADAGVSGGGSGGASAGTSATVGAGVSGGAKVGGGVGGNAGGSGNVYTGTGADAGVSGGGSGGADGGIGANIGAGVFGGVKFGGGAGGSVGGSGSAAAGASGGSKSSGGGSDFGYGSASKEL

SEQ ID NO: 226495 - protein, 730 aa, Zea Mays
MIKADAPLNVKYLRTLVQCLSMLGKVAAAGAVICQRVRPTIHDVITSKIKACSEDASKSSMGKAAKTNDVLHSNGPTPRFQMFTQKTKSGASVMAAQLVVSPISPTMAPTGDAQRAATQLLRSIFECLVEILENHIIVGELLEQKSTSEVDNVNTPHIANGDASWNPDSESFQATGGFSVAFSLSVVQSECQQLLCEILRATPEAATADAAVQTARLANKDPVKEKRDGSEGLSFAFRITDAATPASNEGQGWRRNSNVPQEGYGTASVIPDQGIFLAASVYRPVFEFMNKIGLMLPQKYSQLGSDGLLAFVNNFLKEHFLPAIFVDYRKCVQQAISSPAAFRPRVHATSAYSSSVELGRPVLQGLLAIDIIAKEVLGWVQLMPNYATELVEYVRTFLERAHERCRASYMEAVLEKQSYILLSRNDIESLMRLEPANISLQNSTGEHDNNATGAEAVEVEIELSDLLLDMCPIKQENLIHDDQKLILLASLSDSLEYLADSVERLGESFISPPTTSESINHSHGRHARSSSAIPKSLASLANEYRRLAVDCVRVLRLEMQLEAIYHMQEMTKREYVEDQDAEDPDDFIISLTTQIARRDEEMAPYITESERNYIFGGISSVAANASIKALAQMKSINLLGVQQICRNSIALEQALAAIPSIDSEAVQQRLDRVRTFYELLNLPFESLLGFIAEHEYLFSAKEYLSVLKVNVPGREIPADAERRISQILGH

SEQ ID NO: 226496 - protein, 442 aa, Zea Mays
MNKIGLMLPQKYSQLGSDGLLAFVNNFLKEHFLPAIFVDYRKCVQQAISSPAAFRPRVHATSAYSSSVELGRPVLQGLLAIDIIAKEVLGWVQLMPNYATELVEYVRTFLERAHERCRASYMEAVLEKQSYILLSRNDIESLMRLEPANISLQNSTGEHDNNATGAEAVEVEIELSDLLLDMCPIKQENLIHDDQKLILLASLSDSLEYLADSVERLGESFISPPTTSESINHSHGRHARSSSAIPKSLASLANEYRRLAVDCVRVLRLEMQLEAIYHMQEMTKREYVEDQDAEDPDDFIISLTTQIARRDEEMAPYITESERNYIFGGISSVAANASIKALAQMKSINLLGVQQICRNSIALEQALAAIPSIDSEAVQQRLDRVRTFYELLNLPFESLLGFIAEHEYLFSAKEYLSVLKVNVPGREIPADAERRISQILGH

SEQ ID NO: 226497 - protein, 72 aa, Zea Mays
MSLELCEARDPKGLYKLARAGKIKGFTGIDDPYEAPLNCEIEIKEIDGVCPSPSDMAGQVVTYLEEKGFLHE

SEQ ID NO: 226498 - protein, 149 aa, Zea Mays
MLDADFQPRISDFGLYLLLNPAAAQEMLETSAMQGYKAPELIKIRDGTRESDIYSLGVIMLEMLAQKEAANDESPNARDIHLPVSFRDLVLERKISEAFSSELIIQSKNSGKEGNLNAYFELATACCNPSSSLRPDTKKILKRLEDIAR

SEQ ID NO: 226499 - protein, 651 aa, Zea Mays
MKISELSPEYRQPPPPPQSALLTDLNRVVADVEALDASDSSSPEKLAADLRCLLTNLASAASSSSSGLNGAFRLKVWNLAFRLWNACVDRANHFAARGAEAAVAETEIRQAAPELLLVAGLPEGVPNAAAKAASLFHRTGLFWLDLGRADLASACFEKATPLVCAADTEEDRDILLDLNLARARAASSEGKQALAVALLSRSKPLAAASSVGVKALAEGYLLLGKAALATKSPDPAIDASSLLTEALDLCERAAASPCCTTPTSPRSSPATPNLQVIKDQCLRCLAAERLQANDYEGTLRCIMVSRASPGLGKEHSSIAFMALRACLSSGKLLEAERELDRLMANAEAPEFVCVSAAELYVASVGLDAALKVLVALAARCRASASAVAVRVLKTVVQGAGGEAGHARAIAELVSDERVVALFNGPANAHERGTMHALLWTCGTVHFHAKNYEISADLIERSMLYVSRDEESRSRRANCFRVLCLCHMALRHLDRAQEFIIEAEKVEPSIHCAFLKFKILLQKKEEEDAIKLMKAMMGYVDFNPQFLILSIHEAIGCKSFCVAVALLTFLLGLYSAGKPMPMSEATVLRNLITLLLREPGSEAEILKYSRRAKLRMGELGLEAFFGKETVGLRELNWFAVSSWNMALKYAPG

SEQ ID NO: 226500 - protein, 81 aa, Zea Mays
MAKGEVPAIGIDLGTMYSCVGVWQHNRVKIITNDQGNHTTPSYVAFTDTERLIGDAAKNQVAMNPTNTVFDSLLTDVALPG

SEQ ID NO: 226501 - protein, 618 aa, Zea Mays
MITATHAWSSLPRPLGMSDTTPAATALNHWNRSIQLAAASGSYGHCLRLYAGPLLAAGLRGDASTFPSLAKSCAALRLPGLGRAVHALAFLSGAAVSRDAFVRTSLVDMYAKCGRLPDAHRLFDETPCSSRTLVAWNCMISAYGRSSQVEEAVGVFNAMRRAEVRPSGSTVVGLLSGCADSVSARYPGVSVYGLTIKSGLDADLLVSNSVLTMLVRGGQLDSARLLFDRVENKSVVTWSAMASAYLQTGDWMEVFALFSSMRETEQPMDSVVLANLITAAMLFGNNLVAKGVHALAIKVGFDRQEDLAASLVNLYSKCGNLLAAREVFDSLQWKSVIMWTSMLNGYVECGYPDEALATFDAMLCAKVEPNKATVLAVLSAGANLGSANVAQKVEEHVKAMELQSDLQVCTRLIDMYCKCGSIQRARKIFDSVPNRDLAIWSAMINGHACNGEGSEAVVLFNEMQSKGVRPDAIVFTHILTACSHSGSVDEGLRCFHSMTAEHGIEPSVEHYMCMIDLLCKAGHLSSAIKFFGEMPVRLRNQVLAPLISAHRVNGADSSVEFMSEGLLNLGSQDSGHCVLISNMLSCLGQWKKARSYRTLISKQGLVKKPGWSYIELGG

SEQ ID NO: 226502 - protein, 711 aa, Zea Mays
MMRSDRSLMERLFGDGLLKVLVCTATLAWGVNLPAHTVVIKGTQLYDPKAGGWRDLGMLDVMQIFGRAGRPQFDKSGEGIIITTHDKLAYYLRLLTSQLPIESQFLGSLKDNLNAEVALGTVTNVREACTWLGYTYLFIRMKTNPLVYGITWEEVMGDPSMGAKQRTFIIDAARALDKAKMMRFDEKSGNFYCTELGRIASHFYLQYSSVETYNEMLRRHMSESELITMVAHSSEFENIVVREEEQDELEALARKACPLEIKGGPTDKHGKISILIQVYISRAPIDSSSLHSDAQYISQSLARIMRALFEICLRRGWSEMSSLLLQYCKAVDRKIWPHLHPLRQFDKDLSPQVLWKLEERNVDLDHLYEMEENEIGALIRFSHQGKLVKQYVGYFPYVNLSATVSPITRTVLKVDLHITPEFVWKDRYHGMSERWWIIVEDSENDTIYHSELFTLTKKMARGTPTKISFNVPIFEPHPPQYYIHAISDSWLHAETLFTVSFHNLTLPQTQITHTELLDLKPLPLSALGNKTYEDLYRFSHFNPIQTQAFHVLYHTDNNVLLGAPTGSGKTISAELAMLHLFSTQPDMKVVYIAPLKAIVRERMNDWRKRLVIQLGKKMVEMTGDFTPDLMALLSADIIISTPEKWDGISRNWHSRSYVMKVGLMILDEIHLLGADRGPILEVIVSRMRYISSQTERSIRFVGLSTALANAR

SEQ ID NO: 226503 - protein, 713 aa, Zea Mays
MIFISFFAGLILCLPPLLLPKPAIFISAFNWHSKFKIACCRPSAAQMIDDEVNFGNIFDASEEVQVTAKFGPKQRPKTRKTALSSRSAAPNPTEETGDRKVGTFSQVNSSKELTSQERTSLMCPSTESVDIIAGSHSILDTPLEDALTVPQGSLSGASAADRTSQYGEHNDDPSKLATHQENLVVSDINVPPNSSCSKAIDDIVEFGDMCDVQIEEERVTKFQPKVQTKLLKEIAKSRKTNQKVETSTVDVVTQNGKGNNIQTRLHGDPVQDPKSHESVQIPDSEGLLATDNSKGCNLANLNNLLEESVQEETIAKFRSDLQPNLGKASSQVAAIKINVVAVAPIVGVCDSNNDMYKEPKDQETITGPVAWSPQAVHADVDLDNHNEPINPPIDGTQSMFGEVPGTAFTGREKGKSKSVSFALSDVSGIASPIDTNSEMGNIGDSCSDKLTDENLSNSSRHIAEKHSITKDQYSNEQDHEREPLDHAVQQQPKSDVGERASSMKRRCRKKVQKVGTPNHTVDDYFGEDCVEPSLAEEDNDTGDHYTTGNKHKARKKSRGGVEESQQQKAQKNKSKVSSRGRKRTLKDESTEKPEKKLTHRIRQRIPKEVKALLETPREQIKPMKLCASHLRLLQEARERVDPKGIPSGPSSNTRNFQLDDMDDLGYRDEEARFFDNDITEEHVQNATKLNYHSYMNKPARGKWSKSDTDLFYE

SEQ ID NO: 226504 - protein, 278 aa, Zea Mays
MNKSFHSGYGTAPWGGSGRGFGGGLDFTLPPHKTIFDIDVETTFEDKPWKYPGADISDFFNFGLDEEKWKDFCKQLDQLRLESTMQSRIRVYESGRSEQDYDPDLPPELAAVTGHPDISADNRNKMDNGHTDFSAQGRGPANVRTPVMTGRPIQVETNYTDRFPSIDSRSHRMRESYSVIEIVCQGRDSMDDETVDQTEKDSQRGYKGVHDVEEGKPYPTDKINNSGHNSNLVIKTEHKRQPPVSPECDMLSTDVNAPSPPSYKTRGSPREARLKQKK

SEQ ID NO: 226505 - protein, 94 aa, Zea Mays
MVMVPPGEWVPHVEAYVDVSRPAVQHSASVDALAALVNKDKLTLFDLVSKMDLYLTTTDHIVRSRVRLASNTRSPCWLPGFIAQETWCWLYCDC

SEQ ID NO: 226506 - protein, 90 aa, Zea Mays
MHFSCCHINRIITTNKQPDKVVNKVANVMDPIISSSKVEYCDLKFVFFNSSLISFYRSSIKLSLICKKFEPLESPPKRIKRILRTKVPHE

SEQ ID NO: 226507 - protein, 198 aa, Zea Mays
MPNKPLSALTLQDRDIEIQIEVHRKWEFRGAIDNGPILHIDMILTDCIGNAIHCQIPSFPAAKRGDEFQVGKIYKMSRFPVARAKSSYKPVDGDLMFLTSYDKIDPNEPNARNFHDVISIITEISAIKPVGNARIPSSYNRHVLIKNLSDSILKITLWGKRAQEFYLTNTYDPQKQTLVIVLFVGCLPKEFQGLNLRR

SEQ ID NO: 226508 - protein, 586 aa, Zea Mays
MQVPLVLLHIKVTVLLHQAMDILVVLHLHLYVCLRQKEREKEILLMLQTIPINTIQRHILQVIINHNHFGKYDVLYVLYQGLPPSPPAASMNNGLSNVNGPSLHPLAADVGNYRERKGRHVIIIIILSSVCAFILCAGAALVLYFKLRNHIHLTEASLVPTKPTGPVSAMVGNRLESRPISASPSFSSSLVAYKGSAKTFNLVEMERATLGFDESRIIGEGGFGRVYEGILEDGERVAIKVLKRDDQQGTREFLAEVEMLSRLHHRNLVKLIGICTEGHSRCLVYELVPNGSVESHLHGSDKGAAQFDWNARLKIALGAARALAYLHEDSSPRVIHRDFKSSNILLEHDFTPKVSDFGLARTALGEGNEHISTRVMGTFGYLAPEYAMTGHLLVKSDVYSYGVVLLELLTGRKPVDMLRPPGQENLVAWAGSLLTSRDGLESIIDHSLGRSIPFDSIAKVAAIASMCVQPEVDQRPFMGEVVQALKLVCNEGGEFNESTFSQDLHIQDVEVMSRASTDVDVDPTLSAELFTSSARYDAIDAPGSFRRYSSSGPLRVGRTGLNKERGLSTGSSSEHVGLQRFRIDGE

SEQ ID NO: 226509 - protein, 330 aa, Zea Mays
MPFIEALGQFSYRVGPGNFCLVHVSLVPVLNVVGEQKTKPTQHSVRGLRGLGLAPDVLACRSTEPLEEHVKAKLSQFCHVPDQKAHEAILKGADGVLVPGGFGDRGVQGKILAAKYARENNVPYLGICLGMQIAVIEFARSVMKLRGANSTEFDPATTSPCVIFMPEGSKTQMGATMRLGSRRTYFHVSGCKSAKLYGNASSVDERHRHRYEVNPDMVPDFEKAGLQFVGKDESGKRMGIVELPSHKFFIGAQFHPEFKSRPGKPSPLFLGLIAAASGQLEPLLQRSNPTTKACSISKVPKLKLYPTGPVNNPLNSLVNGYYPNGTGIHT

SEQ ID NO: 226510 - protein, 497 aa, Zea Mays
MSPFEHGEVFVLDDGGEVDLDLGNYERFLDIKLTRDNNITTGKIFQAVINKERRGDYLGKTVQVVPHITDEIQDWIERVAVVPVDGKEGPPDVCVIELGGTIGDKIFSPHNDSGILDAGDIESMPFIEALGQFSYRVGPGNFCLVHVSLVPVLNVVGEQKTKPTQHSVRGLRGLGLAPDVLACRSTEPLEEHVKAKLSQFCHVPVSNIVNLHDVTNIWHIPLLLRDQKAHEAILKGADGVLVPGGFGDRGVQGKILAAKYARENNVPYLGICLGMQIAVIEFARSVMKLRGANSTEFDPATTSPCVIFMPEGSKTQMGATMRLGSRRTYFHVSGCKSAKLYGNASSVDERHRHRYEVNPDMVPDFEKAGLQFVGKDESGKRMGIVELPSHKFFIGAQFHPEFKSRPGKPSPLFLGLIAAASGQLEPLLQRSNPTTKACSISKVPKLKLYPTGPVNNPLNSLVNGYYPNEKRRLRFSKPPAPATHGSDIFNEERLPVR

SEQ ID NO: 226511 - protein, 582 aa, Zea Mays
MKYVLVTGGVVSGLGKGVTASSIGVVLKACGLRVTTIKIDPYLNTDAGTMSPFEHGEVFVLDDGGEVDLDLGNYERFLDIKLTRDNNITTGKIFQAVINKERRGDYLGKTVQVVPHITDEIQDWIERVAVVPVDGKEGPPDVCVIELGGTIGDIESMPFIEALGQFSYRVGPGNFCLVHVSLVPVLNVVGEQKTKPTQHSVRGLRGLGLAPDVLACRSTEPLEEHVKAKLSQFCHVPDQKAHEAILKVLDLQYDGKVPREPELTKWTKRATKFDKLKTPVKIAMVGKYTGLSDSYLSVIKALLHASVAMERKLVVEWVPSCDLEDSSAKETPEAHKKAWKLLKGADGVLVPGGFGDRGVQGKILAAKYARENNVPYLGICLGMQIAVIEFARSVMKLRGANSTEFDPATTSPCVIFMPEGSKTQMGATMRLGSRRTYFHVSGCKSAKLYGNASSVDERHRHRYEVNPDMVPDFEKAGLQFVGKDESGKRMGIVELPSHKFFIGAQFHPEFKSRPGKPSPLFLGLIAAASGQLEPLLQRSNPTTKACSISKVPKLKLYPTGPVNNPLNSLVNGYYPNGTGIHT

SEQ ID NO: 226512 - protein, 180 aa, Zea Mays
MMAGIRPLPVLTCALLVSPVVSSLRFSVFSKGVGFHIYNSKSIDRAEFRAFFNIWNHGGPNWIHEYMNFINEEKANWWTIRGKKSISYADIVKLLLSGANTVPILNKKFSYIIGNPVQERISVFRRLGSSIRYSGSQGYRYSSYPRNSGSRGFRNPMTAKNKEFPMNVLHHRAPSSIAIS

SEQ ID NO: 226513 - protein, 174 aa, Zea Mays
MPPPRLPLRATARPARTPPLLPLRAQATNPRKCTHKFGSRGNGARFGYGVHDLETAQSTLPIWKARSRYCNHNNYPPNVAPIDDQDPQIWQCTIPPNNRARSGNCVHHLRRRFGKRTIYDADLESALPNDSSTNPPNRAPTIVKKVTIVILLQPSYNDGNPALTLLQMIFVYLH

SEQ ID NO: 226514 - protein, 433 aa, Zea Mays
MSSGGEKMLLFGSFTEDETKLLQGQPLKSPTKSVSKECERTEIQFGTLNLSVLNLEKISTSSVVLPAKSAKGETSAITKENACNNEKKAAGSSLSNGGPVLANGCPPVNVPANNGLFENVKTEAVVPPVIPVKIISNPTPQMTLETHKDGTKPTESRKLNKEREITENGSPIVDKHIVAAPAEEAVTSLNKKASQNMPLLPHGLRNTGNICFLNATLQALLSCSPFVYLLQDLRNRRIPKVGYPTLSAFVELISQLDVPDESVIKKNEKVITVAAKPLNPAMFDAVLRNFTPDVPAGITARPRQEDAQEFLSFAMDRMHDELLKLNGDGLNSKEGMVVSSADDDAWETVGRKNKSAIVRTQSFVPSELSAIFGGQLQSVVKAAATVQPFLLLHLDIFPDAVQTLNDALRLFSTPESLEGYRTAAGKVSTLSPL

SEQ ID NO: 226515 - protein, 837 aa, Zea Mays
MGLLPIHRIILLCFCSSSLLLPPPVSSDSRILPNKPLTVGSTLTSDDGTFALGFFSPSNPDKKHYYYVGIWYANIPKDNVVWVANRGTPIITDPSSATLALTNTSDLVLSSADGQTLWMANTSAAASSEPETTAGEATLDNTGNFILWSSQGAVLWQSFDYPADTLLPGMKFRVTHRRHALQQLVSWKGPQDPAPGSFSYGADPDELLQRFVRNGSRPYWRSPVLNSYLVARSYIGILKSTIYLTISKYDDGEVYMSFGVPGGSSSSTAMKIKMDYSGKIEILIWNTNILEWYVLEAQPMNECSTYGYCGPFGYCDNTELNATCKCLDSFEPISNEGRSNGSFTEGCRRKETLRCGEEDTSFLTLADMKIPDEFVHVKNRSFDGCTAECASNCSCTGYAYANFSTTAFTGDDTRCLLWMGDLIDTAKRTGDGENLYLRVNRSSDKKRRSNILKITLPAVSSLLILVFMWFVWICYSRVKERNKKTWKKVVSGVLGTSDELEDANLPCISFREIVLATNNFSSSNMLGHGGFGHVYKGTLECGKAIAVKRLSKGSGQGVLEFRNEVILIAKLQHRNLVKLLGFCIHGDEKLLIYEYLSNKSLDAFLFNSTRKPSLDWSKRFNIILGIARGLLYLHQDSRLKIIHRDLKANNILLDDEMNPRISDFGMARIFYGNQQQGNTNRVVGTYGYMSPEYALEGVFSVKSDVYSFGVLVLEIVSGSKITSTHMTEHYPNLIACAWSLWKDGNTKEFVDSSIVADSCSLDETSQCIHIGLLCVQDNPNARPLMSSVVSILENGDTSLPPPKQPIYFAERNYGTDGAAEAVVNSANTMSVTALEGR

SEQ ID NO: 226516 - protein, 237 aa, Zea Mays
MAKAARPTAQHGNMVWSARMASASGSGCASTGASLAAANTLVVVVQETTPVNRGGEGEDGERTTDIGVKESDTKKRKPKRPTSGVWDYFIKSTVTEKGDKGKTEEQIWAKCKKCKFKTRGESSRGTTVFWNHLKSRHYIHKGRQELQVQKGEGNNDIVQNFKYDPEASLRKFHMAIVMHEYPFKMVEHEYFVDFMKSLHPHFTFLCRTTTRNEIMTMYMDEKKKLFEQLKSLSCRFS

SEQ ID NO: 226517 - protein, 199 aa, Zea Mays
MKCGKTIELDDVTFHQCVNLTRFNSEKTVSFVPPDGEFELMKYRITEGVNLPFRVLPTIKELGRTRMEINVKVKSVFGAKMFALGVVVKVPVPKQTAKTSFQTTSGKAKYNASIDSLVWKIRKFPGQTEATMSAEVELISTMGEKKSWNRPPIQMEFQVPMFTASGLRVRFLKVWEKSGYNTVEWVRYITRAGSYEIRC

SEQ ID NO: 226518 - protein, 4171 aa, Zea Mays
MLEDQVAFLLQKYLGNYVRGLSKEALKISVWRGDVELTNMQLKPEALNSLKLPVRVKAGFLGSVKLKVPWSRLGQEPVLVYLDRIFILAEPATQVEGCSEDAVQEAKRSRVREMEIKLLERQQQLKSELSSSWLGSFIGTVIGNIKLSIGNIHIRYEDVESNPGHPFAAGLVLSKLSAVTVDDLGKETFATGGDLDRVKKSVELESLAVYFDSDSSSWIVDKPWEDLLPSEWSQVFEFQEQDGSRSASKKHAYILQPVSGKAKYTKIQLTEAKKTGQALQNTAVDLDDVTLSLSKDGYRDMLKLADNFSTFNQRLRYAHLRPSSPLKSDPRAWWKYAYKVVTQEMKKASGRLSWEQLLRNARLRKTYVSLYASLLKSDMSRLVVDDHEEIKRLDRELDMEVILQWRMLAHKFVEQSVETYQYAQQNKKSWWSFGWTGSSKDEEDSKSFTDEDWERLNRIIGYKETNEYVTDQQDMKLMQFDFEIRMKHNASKLTIDDSECLADLSCQDFCCNLKMYPEAKIFDLKLGSYRLLSPYGLLAESASVIDSFVGLFSYKPFDEQLDWSLTAKASPCYITYLKDSVDQIVGFFKSSPTISQNLALETAAAVQMTLDEVKRTAQQQMTRVLKDQSRFSLNMDIAAPKITVPTKFRPDDVHETKLLLDLGNLVLRTEEIWDAYTSEEQDIYLNFNLVLSDVSAFLVDGDYHWNETSDEKNLLPVIDKCGIALKLQQIQLESPLYPSTRMAIRVPSLGFHFSPARYHRLMEILKFFQDGASDNSNSDHEHLWDHADFEGWSSLLTWKGVGNREAVWQHRYLRLVGPFLYVFENLMSTTYKQWFSLRGKQVHQILEDTGALILLFDNDEGRKIWQNRLQGAIYRASGSAISSFPGVALPSEAHSFKGNFLDVADTEKLFVAGILDELKICFSCGYESNHKLKKILLAKESSLFEFRAVGGQVELSMKGGNLLIGTILGSLEIEDQYYYPGSPVPRFLARSFINSMQTQELPSLSRKNSAGPRNTPLMKNDSEENFFEASDDFDEFETPMHQKRTISDYFSTQKFLPTSVPSLQPPTFKRIPDLIPDTELQTGKFTLEGSGTFNSFVKAQIVIYDQHSPQYNSLDNRVVVTVATLSFFCHRPTVIAIMEFMNAINLANGSDTDKDKSTYPATVEDSAIEESKSDLESEPSIKPLLAKGKSRIVFHLTSSMAEAQILLMNENGDRLATLSQNNLSTDIKVFTSSFSIKAALGNLKISDDSLLSSHPYFWVCDMRNPGGRSFVEIDFSSYNVGDEDYCGYDYSLVGQLSEVRIVYLNRFVQEIISYFMGLVPKSSDAVVKLKDNKTNSEKWVSKTDMEGSPALKLDVSFSRPIIVMPRETNSNDFLELDVLYITVQNEFQWIGGDKNEMSTVHLDILTVTVRDINLVIGMNMVRGETIIQDVEGLSFELRRSLRDLRHQLPVVEAAIKVDVLKATLSNREYEIISECALSNFSETPHPVPTLDDPRYGTSTTPSHVSASSSESIHVLSEGAETWIANKFSVSINLVELSLHSGSTRDSPLASVQASGAWLFYKSNTRGENFMYATLKGFSVFDDREGTKDELRLAIGKSASVRDTSSVDGYDNPNELDSGERRIQKDLGLEPIPSMLILDAIFRKSSSSVSVCVQRPKFLVALDFLLAVIEFFVPSAQSLLSNDEDKDLLHMITPVVLNDQIYFQEHSTFSLSPQKPLIVDNERFDHFVYDGKGGKLYLLDSEGKILSSPCTESFIHVLGCKRLQFRNVTIVNGEYLDSCISLGDDSCYSASRNDHVYLVREDDGSLSTPSKEIRGDSVKNGSADISTEFIMELQAIGPELTFYSTSRNAGENLALSTKVIHAHTDAFCRLIMKGDSMEMNGNILGLKMESNGIRVIEPFDMVVKYSNASGKTNLHLLVSEIYMNFSFSILRLFLAVEEEISAFLRMSSKKISLVCYQFDKVATMQGNANDQVLSFWRPRAPSGYAIFGDYLTPMNEPPTKGVLALNTNIVRVKRPLSYKLVWQSGSPRTNIFHQKDLEDKISNIDQLCSVWLPVAPAGYVAMGCVASSGTAEPPLSSAFCLTASLVSSCNLRDCIALRDNTNMIFWRVDNAFGSFLPGDPASMSVDGNAYDLRHMLFDSADSSSKTVSRRQDSRNDFSQLERSELTSGRLFDAVASFKLIWSNSGTSSPKKLSIWRPMLSEGMFYFGDIAVNGYEPPNSTVVLRDTGEDTFLRAPEGFDLVGRIKKHRGTEGVSFWFPKAPSGFVALGCVASKSSPTKEDFSLLRCIRNDMVAGGQFSEESLWDSSNARTSEPFSLWTVDNDAGTFLVRSGYRKPPKRLALKLAGPPTSSSSDSIIVDAKIKTFSAVSFDDYGGMMVPLFGVSFDSVGLSYHGGPHHLNATVSLSFVARSYNDKYSSWEPFIEPTDAFLRYQFDMNTPGSPRQLRITSTQDLNLNISVSNTNMLSQAYASWNNISCGDELYKKETFSSTERPVLDVHQRRSYYVVPQNKLGQDIYVRTTENRGSLVTLLPSGDDRSIKVPALRDLSDSHLNGRSVKPYRLMITAILADAEVKDDEGLETGEYMTAVRLFSENHSISVQQQSARTCAAIGEHLSQNTRKVNWNEMFFFKVERVDSYTLELLVLDAGKGQPVGIYSAPLEQVVQKLPPTSNPDSVKFDLALGDLMSTKTVEQETVKPSGKIRFAVLVSGRASVQQGNRASPESKTGYIQISPSKEGPWTSMKLNYAVPAACWRFGNCVIASEATVKEGNRYVSIRSLVSVTNTTNFIVDLRLKGRISQSARADEQGDSFGKEDQILIGTLEPNSTIPVPLSGLSHPLMPYMLQLRPAKHHDHENYSWSDVQERRSQTEFRKEEILDLCISDLYESENLLFCSQVDGTSNSCHGLWFCLSIEGKEIGKDVQMEPIYDWCIIIKSPLCLTYYLPIAAHYTVSSSHLDNEDSSCSLGTLSPGEAVKVHNVDPRNPLYLSLVPHGGWELMHEPVVISHPTQAPSKFINLRSSLSGRVVQILLEQSSDSDYLMARLIRIYVPYWISFSRLPTLTLRLIDISGRKEKRRLLSRSHLERGEKQLYDIKHDELVEGYTIASGLNFKGLGLLSSVGHGGRFGSVKELSPLGDMDGAVDLSAYDDDGKCMHILLCSKPSSYQAVPTKVIHVRPYITFTNRAGQDLYLKLSIEDEPKVLHAYDWRVSFMYSKGTTDKLQVRLVDTEWCQPLEIVKEDTIVIAMRKQGGTQKFVKAEIRGYEEGSRFLIVFRLGPAYGPIRIENRTSHTTISTCQSGLGEESWIQVKPHATRKYSWDDPYGQKVIDVSIDKGDDTCVLCVDLENPIGSSTSFREHGLMFTVDTSDIKILKFADYIRKEEVYGLPGSELTDHQGSSLKENETEPGAGPLELIVELGVVGISLIDHKPRELLYLHLQKVFVSYLTGYDFGTTSRFKLILGELQLDNQLPLSTMPVVLSTESRPDSNRSVFKANVAVSNVTSNGIQVYPHVYIRVTDQTWRLNIHEPIIWALFDFYSNLRFVTTINSTTVTEVDPEIRIELIDISEIRLKISLETAPSQRPRGVLGIWSPILSAVGNALKIQVHLRKVMHRSRFMRKSSIIPAITNRIKRDLIHNPLHLIFSVDFLGVTKSTLSSLSKGFAELSTDGQFLQLRSKQVWSRRITGVGDGLVQGTEAFAQGLAFGVSGVLRKPVESARQYGVIGIAPGIGRAFVGFIVQPLSGALDFFSLTVDGISASFMRCVNILSNKSVPQRIRDPRAIHRDGIVRDYDKFEAAGQMALYLAEASRYFACTDLFREPSKYAWSDYYEDHFILPSQRIALVTNKRVMLLQCLDLDKMDKKPSKILWDVPWEEVLSLELAKAGYQRPSHVIIHLKNFRRSENFVRLIKCNIDNEREPQALSLCCSIRKMWRSHQAAMKVIPLKVPSGQRHVYFVSDDDKKESHSLSRPLLSSGGTSTDVEQQFINNTVHFQKMWSSEPEIQSRCKLVAKQIADDGRVFSIWRPLCPNGYVSIGDIAHVGIHPPHFAAVYKNINGNFALPLGYDLVWRNCAEDYKSPVSIWLPRPPGGYVALGCVAVPSFKEPTLDCAFCVDERLAEDAAYEEQIIWASSDAYPWGCYIYQVQSASMQFMALRVPKEQSELRPKKILESFLQQASETQTSRA

SEQ ID NO: 226519 - protein, 3787 aa, Zea Mays
MSRLVVDDHEEIKRLDRELDMEVILQWRMLAHKFVEQSVETYQYAQQNKKSWWTGSSKDEEDSKSFTDEDWERLNRIIGYKETNEYVTDQQDMKLMQFDFEIRMKHNASKLTIDDSECLADLSCQDFCCNLKMYPEAKIFDLKLGSYRLLSPYGLLAESASVIDSFVGLFSYKPFDEQLDWSLTAKASPCYITYLKDSVDQIVGFFKSSPTISQNLALETAAAVQMTLDEVKRTAQQQMTRVLKDQSRFSLNMDIAAPKITVPTKFRPDDVHETKLLLDLGNLVLRTEEIWDAYTSEEQDIYLNFNLVLSDVSAFLVDGDYHWNETSDEKNLLPVIDKCGIALKLQQIQLESPLYPSTRMAIRVPSLGFHFSPARYHRLMEILKFFQDGASDNSNSDHEHLWDHADFEGWSSLLTWKGVGNREAVWQHRYLRLVGPFLYVFENLMSTTYKQWFSLRGKQVHQILEDTGALILLFDNDEGRKIWQNRLQGAIYRASGSAISSFPGVALPSEAHSFKGNFLDVADTEKLFVAGILDELKICFSCGYESNHKLKKILLAKESSLFEFRAVGGQVELSMKGGNLLIGTILGSLEIEDQYYYPGSPVPRFLARSFINSMQTQELPSLSRKNSAGPRNTPLMKNDSEENFFEASDDFDEFETPMHQKRTISDYFSTQKFLPTSVPSLQPPTFKRIPDLIPDTELQTGKFTLEGSGTFNSFVKAQIVIYDQHSPQYNSLDNRVVVTVATLSFFCHRPTVIAIMEFMNAINLANGSDTDKDKSTYPATVEDSAIEESKSDLESEPSIKPLLAKGKSRIVFHLTSSMAEAQILLMNENGDRLATLSQNNLSTDIKVFTSSFSIKAALGNLKISDDSLLSSHPYFWVCDMRNPGGRSFVEIDFSSYNVGDEDYCGYDYSLVGQLSEVRIVYLNRFVQEIISYFMGLVPKSSDAVVKLKDNKTNSEKWVSKTDMEGSPALKLDVSFSRPIIVMPRETNSNDFLELDVLYITVQNEFQWIGGDKNEMSTVHLDILTVTVRDINLVIGMNMVRGETIIQDVEGLSFELRRSLRDLRHQLPVVEAAIKVDVLKATLSNREYEIISECALSNFSETPHPVPTLDDPRYGTSTTPSHVSASSSESIHVLSEGAETWIANKFSVSINLVELSLHSGSTRDSPLASVQASGAWLFYKSNTRGENFMYATLKGFSVFDDREGTKDELRLAIGKSASVRDTSSVDGYDNPNELDSGERRIQKDLGLEPIPSMLILDAIFRKSSSSVSVCVQRPKFLVALDFLLAVIEFFVPSAQSLLSNDEDKDLLHMITPVVLNDQIYFQEHSTFSLSPQKPLIVDNERFDHFVYDGKGGKLYLLDSEGKILSSPCTESFIHVLGCKRLQFRNVTIVNGEYLDSCISLGDDSCYSASRNDHVYLVREDDGSLSTPSKEIRGDSVKNGSADISTEFIMELQAIGPELTFYSTSRNAGENLALSTKVIHAHTDAFCRLIMKGDSMEMNGNILGLKMESNGIRVIEPFDMVVKYSNASGKTNLHLLVSEIYMNFSFSILRLFLAVEEEISAFLRMSSKKISLVCYQFDKVATMQGNANDQVLSFWRPRAPSGYAIFGDYLTPMNEPPTKGVLALNTNIVRVKRPLSYKLVWQSGSPRTNIFHQKDLEDKISNIDQLCSVWLPVAPAGYVAMGCVASSGTAEPPLSSAFCLTASLVSSCNLRDCIALRDNTNMIFWRVDNAFGSFLPGDPASMSVDGNAYDLRHMLFDSADSSSKTVSRRQDSRNDFSQLERSELTSGRLFDAVASFKLIWSNSGTSSPKKLSIWRPMLSEGMFYFGDIAVNGYEPPNSTVVLRDTGEDTFLRAPEGFDLVGRIKKHRGTEGVSFWFPKAPSGFVALGCVASKSSPTKEDFSLLRCIRNDMVAGGQFSEESLWDSSNARTSEPFSLWTVDNDAGTFLVRSGYRKPPKRLALKLAGPPTSSSSDSIIVDAKIKTFSAVSFDDYGGMMVPLFGVSFDSVGLSYHGGPHHLNATVSLSFVARSYNDKYSSWEPFIEPTDAFLRYQFDMNTPGSPRQLRITSTQDLNLNISVSNTNMLSQAYASWNNISCGDELYKKETFSSTERPVLDVHQRRSYYVVPQNKLGQDIYVRTTENRGSLVTLLPSGDDRSIKVPALRDLSDSHLNGRSVKPYRLMITAILADAEVKDDEGLETGEYMTAVRLFSENHSISVQQQSARTCAAIGEHLSQNTRKVNWNEMFFFKVERVDSYTLELLVLDAGKGQPVGIYSAPLEQVVQKLPPTSNPDSVKFDLALGDLMSTKTVETVKPSGKIRFAVLVSGRASVQQGNRASPESKTGYIQISPSKEGPWTSMKLNYAVPAACWRFGNCVIASEATVKEGNRYVSIRSLVSVTNTTNFIVDLRLKGRISQSARADEQGDSFGKEDQILIGTLEPNSTIPVPLSGLSHPLMPYMLQLRPAKHHDHENYSWSDVQERRSQTEFRKEEILDLCISDLYESENLLFCSQVDGTSNSCHGLWFCLSIEGKEIGKDVQMEPIYDWCIIIKSPLCLTYYLPIAAHYTVSSSHLDNEDSSCSLGTLSPGEAVKVHNVDPRNPLYLSLVPHGGWELMHEPVVISHPTQAPSKFINLRSSLSGRVVQILLEQSSDSDYLMARLIRIYVPYWISFSRLPTLTLRLIDISGRKEKRRLLSRSHLERGEKQLYDIKHDELVEGYTIASGLNFKGLGLLSSVGHGGRFGSVKELSPLGDMDGAVDLSAYDDDGKCMHILLCSKPSSYQAVPTKVIHVRPYITFTNRAGQDLYLKLSIEDEPKVLHAYDWRVSFMYSKGTTDKLQVRLVDTEWCQPLEIVKEDTIVIAMRKQGGTQKFVKAEIRGYEEGSRFLIVFRLGPAYGPIRIENRTSHTTISTCQSGLGEESWIQVKPHATRKYSWDDPYGQKVIDVSIDKGDDTCVLCVDLENPIGSSTSFREHGLMFTVDTSDIKILKFADYIRKEEVYGLPGSELTDHQGSSLKENETEPGAGPLELIVELGVVGISLIDHKPRELLYLHLQKVFVSYLTGYDFGTTSRFKLILGELQLDNQLPLSTMPVVLSTESRPDSNRSVFKANVAVSNVTSNGIQVYPHVYIRVTDQTWRLNIHEPIIWALFDFYSNLRFVTTINSTTVTEVDPEIRIELIDISEIRLKISLETAPSQRPRGVLGIWSPILSAVGNALKIQVHLRKVMHRSRFMRKSSIIPAITNRIKRDLIHNPLHLIFSVDFLGVTKSTLSSLSKGFAELSTDGQFLQLRSKQVWSRRITGVGDGLVQGTEAFAQGLAFGVSGVLRKPVESARQYGVIGIAPGIGRAFVGFIVQPLSGALDFFSLTVDGISASFMRCVNILSNKSVPQRIRDPRAIHRDGIVRDYDKFEAAGQMALYLAEASRYFACTDLFREPSKYAWSDYYEDHFILPSQRIALVTNKRVMLLQCLDLDKMDKKPSKILWDVPWEEVLSLELAKAGYQRPSHVIIHLKNFRRSENFVRLIKCNIDNEREPQALSLCCSIRKMWRSHQAAMKVIPLKVPSGQRHVYFVSDDDKKESHSLSRPLLSSGGTSTDVEQQFINNTVHFQKMWSSEPEIQSRCKLVAKQIADDGRVFSIWRPLCPNGYVSIGDIAHVGIHPPHFAAVYKNINGNFALPLGYDLVWRNCAEDYKSPVSIWLPRPPGGYVALGCVAVPSFKEPTLDCAFCVDERLAEDAAYEEQIIWASSDAYPWGCYIYQVQSASMQFMALRVPKEQSELRPKKILESFLQQASETQTSRA

SEQ ID NO: 226520 - protein, 3465 aa, Zea Mays
MDIAAPKITVPTKFRPDDVHETKLLLDLGNLVLRTEEIWDAYTSEEQDIYLNFNLVLSDVSAFLVDGDYHWNETSDEKNLLPVIDKCGIALKLQQGVGNREAVWQHRYLRLVGPFLYVFENLMSTTYKQWFSLRGKQVHQILEDTGALILLFDNDEGRKIWQNRLQGAIYRASGSAISSFPGVALPSEAHSFKGNFLDVADTEKLFVAGILDELKICFSCGYESNHKLKKILLAKESSLFEFRAVGGQVELSMKGGNLLIGTILGSLEIEDQYYYPGSPVPRFLARSFINSMQTQELPSLSRKNSAGPRNTPLMKNDSEENFFEASDDFDEFETPMHQKRTISDYFSTQKFLPTSVPSLQPPTFKRIPDLIPDTELQTGKFTLEGSGTFNSFVKAQIVIYDQHSPQYNSLDNRVVVTVATLSFFCHRPTVIAIMEFMNAINLANGSDTDKDKSTYPATVEDSAIEESKSDLESEPSIKPLLAKGKSRIVFHLTSSMAEAQILLMNENGDRLATLSQNNLSTDIKVFTSSFSIKAALGNLKISDDSLLSSHPYFWVCDMRNPGGRSFVEIDFSSYNVGDEDYCGYDYSLVGQLSEVRIVYLNRFVQEIISYFMGLVPKSSDAVVKLKDNKTNSEKWVSKTDMEGSPALKLDVSFSRPIIVMPRETNSNDFLELDVLYITVQNEFQWIGGDKNEMSTVHLDILTVTVRDINLVIGMNMVRGETIIQDVEGLSFELRRSLRDLRHQLPVVEAAIKVDVLKATLSNREYEIISECALSNFSETPHPVPTLDDPRYGTSTTPSHVSASSSESIHVLSEGAETWIANKFSVSINLVELSLHSGSTRDSPLASVQASGAWLFYKSNTRGENFMYATLKGFSVFDDREGTKDELRLAIGKSASVRDTSSVDGYDNPNELDSGERRIQKDLGLEPIPSMLILDAIFRKSSSSVSVCVQRPKFLVALDFLLAVIEFFVPSAQSLLSNDEDKDLLHMITPVVLNDQIYFQEHSTFSLSPQKPLIVDNERFDHFVYDGKGGKLYLLDSEGKILSSPCTESFIHVLGCKRLQFRNVTIVNGEYLDSCISLGDDSCYSASRNDHVYLVREDDGSLSTPSKEIRGDSVKNGSADISTEFIMELQAIGPELTFYSTSRNAGENLALSTKVIHAHTDAFCRLIMKGDSMEMNGNILGLKMESNGIRVIEPFDMVVKYSNASGKTNLHLLVSEIYMNFSFSILRLFLAVEEEISAFLRMSSKKISLVCYQFDKVATMQGNANDQVLSFWRPRAPSGYAIFGDYLTPMNEPPTKGVLALNTNIVRVKRPLSYKLVWQSGSPRTNIFHQKDLEDKISNIDQLCSVWLPVAPAGYVAMGCVASSGTAEPPLSSAFCLTASLVSSCNLRDCIALRDNTNMIFWRVDNAFGSFLPGDPASMSVDGNAYDLRHMLFDSADSSSKTVSRRQDSRNDFSQLERSELTSGRLFDAVASFKLIWSNSGTSSPKKLSIWRPMLSEGMFYFGDIAVNGYEPPNSTVVLRDTGEDTFLRAPEGFDLVGRIKKHRGTEGVSFWFPKAPSGFVALGCVASKSSPTKEDFSLLRCIRNDMVAGGQFSEESLWDSSNARTSEPFSLWTVDNDAGTFLVRSGYRKPPKRLALKLAGPPTSSSSDSIIVDAKIKTFSAVSFDDYGGMMVPLFGVSFDSVGLSYHGGPHHLNATVSLSFVARSYNDKYSSWEPFIEPTDAFLRYQFDMNTPGSPRQLRITSTQDLNLNISVSNTNMLSQAYASWNNISCGDELYKKETFSSTERPVLDVHQRRSYYVVPQNKLGQDIYVRTTENRGSLVTLLPSGDDRSIKVPALRDLSDSHLNGRSVKPYRLMITAILADAEVKDDEGLETGEYMTAVRLFSENHSISVQQQSARTCAAIGEHLSQNTRKVNWNEMFFFKVERVDSYTLELLVLDAGQPVGIYSAPLEQVVQKLPPTSNPDSVKFDLALGDLMSTKTVEQETVKPSGKIRFAVLVSGRASVQQGNRASPESKTGYIQISPSKEGPWTSMKLNYAVPAACWRFGNCVIASEATVKEGNRYVSIRSLVSVTNTTNFIVDLRLKGRISQSARADEQGDSFGKEDQILIGTLEPNSTIPVPLSGLSHPLMPYMLQLRPAKHHDHENYSWSDVQERRSQTEFRKEEILDLCISDLYESENLLFCSQVDGTSNSCHGLWFCLSIEGKEIGKDVQMEPIYDWCIIIKSPLCLTYYLPIAAHYTVSSSHLDNEDSSCSLGTLSPGEAVKVHNVDPRNPLYLSLVPHGGWELMHEPVVISHPTQAPSKFINLRSSLSGRVVQILLEQSSDSDYLMARLIRIYVPYWISFSRLPTLTLRLIDISGRKEKRRLLSRSHLERGEKQLYDIKHDELVEGYTIASGLNFKGLGLLSSVGHGGRFGSVKELSPLGDMDGAVDLSAYDDDGKCMHILLCSKPSSYQAVPTKVIHVRPYITFTNRAGQDLYLKLSIEDEPKVLHAYDWRVSFMYSKGTTDKLQVRLVDTEWCQPLEIVKEDTIVIAMRKQGGTQKFVKAEIRGYEEGSRFLIVFRLGPAYGPIRIENRTSHTTISTCQSGLGEESWIQVKPHATRKYSWDDPYGQKVIDVSIDKGDDTCVLCVDLENPIGSSTSFREHGLMFTVDTSDIKILKFADYIRKEEVYGLPGSELTDHQGSSLKENETEPGAGPLELIVELGVVGISLIDHKPRELLYLHLQKVFVSYLTGYDFGTTSRFKLILGELQLDNQLPLSTMPVVLSTESRPDSNRSVFKANVAVSNVTSNGIQVYPHVYIRVTDQTWRLNIHEPIIWALFDFYSNLRFVTTINSTTVTEVDPEIRIELIDISEIRLKISLETAPSQRPRGVLGIWSPILSAVGNALKIQVHLRKVMHRSRFMRKSSIIPAITNRIKRDLIHNPLHLIFSVDFLGVTKSTLSSLSKGFAELSTDGQFLQLRSKQVWSRRITGVGDGLVQGTEAFAQGLAFGVSGVLRKPVESARQYGVIGIAPGIGRAFVGFIVQPLSGALDFFSLTVDGISASFMRCVNILSNKSVPQRIRDPRAIHRDGIVRDYDKFEAAGQMALYLAEASRYFACTDLFREPSKYAWSDYYEDHFILPSQRIALVTNKRVMLLQCLDLDKMDKKPSKILWDVPWEEVLSLELAKAGYQRPSHVIIHLKNFRRSENFVRLIKCNIDNEREPQALSLCCSIRKMWRSHQAAMKVIPLKVPSGQRHVYFVSDDDKKESHSLSRPLLSSGGTSTDVEQQFINNTVHFQKMWSSEPEIQSRCKLVAKQIADDGRVFSIWRPLCPNGYVSIGDIAHVGIHPPHFAAVYKNINGNFALPLGYDLVWRNCAEDYKSPVSIWLPRPPGGYVALGCVAVPSFKEPTLDCAFCVDERLAEDAAYEEQIIWASSDAYPWGCYIYQVQSASMQFMALRVPKEQSELRPKKILESFLQQASETQTSRA

SEQ ID NO: 226521 - protein, 455 aa, Zea Mays
MEGGGRARGGYGESYSLGKCTERRAGDGEHSTSSCIPCGHVYGRHCLEMWLLQYGKKKAPCPQCGKRYTQNNIINLYVPEIVVPNNDLEKQVLSLRERNEYLEKQQAKLLEEIKEHKNEFLVDGARVMGIDASSQIILTSGRAHGVSAEHILTKVSMFHGHGMEKIHLPPDTKAIRDICVLPGGHVVFASLGRKLSIFSMATNNVVLQYDLPAPGWSCSGDYTTSSHIYAGLQNGMLLVFDIRQTSAPLHSSMGLSTHPVHTIHCAVDGSGSRKVFSASSIGPCVWDASENRPSLVSGMENQGVCISLACSSPSSDVLVASYRPRVELPDAIATSQASTPQSPAPTGSGKLGCHTLLRRTTATSFARDHICSGSVSELRMSKSAIIPCRDNQHLFAYGDESLYGVRTWRLPSFQRYTDLKPHRQPVLDLRYAESSTGERYLGCLSAEKLQVFTIR

SEQ ID NO: 226522 - protein, 90 aa, Zea Mays
MDAEDMEDVQAPTAVQVVKPVDSFSINQKYFKMCPRKQKRHVKATYEMGLTDICRNLKGYELQFWPFFGYGEKILVVFSYVFLKNGPRLR

SEQ ID NO: 226523 - protein, 90 aa, Zea Mays; identical to SEQ ID NO: 226522

SEQ ID NO: 226524 - protein, 55 aa, Zea Mays
MLSPICEHQKGMQLRTVRNFPHTTLTLSGAMGYHTHTVILLPVDLNKFHSRTRAC

SEQ ID NO: 226525 - protein, 272 aa, Zea Mays
MSFCYSTIAVGLALGQTISGPTGKTTLYGTQVGVDVGSAEEKIWLTFQALGNIAFAYSYTIVLIEIQDTLRSPPAENKTMRQASVLGVATTTAFYMLCGCLGYSAFGNAAPGDILSGFYEPYWLVDFANVCIVIHLVGGFQVFLQPLFAAVEADVAARWPACSARERRGGVDVFRLLWRTAFVALITLCAVLLPFFNSILGILGSIGFWPLTVFFPVEMYIRQQQIPRFSATWLALQALSIFCFVITVAAGAASVQGVRDSLKTYVPFQTRS

SEQ ID NO: 226526 - protein, 512 aa, Zea Mays
MQKRIYVGRGMHESQVSLFKYTFFWILLLCSKFSFSYFVQIQPLIKPTKDVMGVHNIHYEWHEFFPNASYNIGAIMSLWAPVLLVYLMDTQIWYAIFSTIFGGMTGALGRLGEIRTLGMLRSRFHSLPGAFNTYLVPSDKSKNRRFSLSKRFAEVSPNKRTEAAKFAQLWNEVICSFREEDLISDGEMDLLVVPYSSDPSLKLMQWPLFLLASKIPIALDMAAQFRPRDSDLWKRICADEYMKCAVLECYESFKLVLNLLVVGENEKRIIGIIIKEIEGNIGKNTFLANFRMSALPVLCKKFVELVSTLKERDASKFDNVVLLLQDMLEVITRDMMVNEIRELAEFGHGNKDSVPRRQLFAGSGTKPAIVFPPPVSAQWEEQIKRLYLLLTVKESAMDVPTNLEARRRIAFFTNSLFMDMPRAPRVRKMLSFSVMTPYYSEETVYSKSDLDLENEDGVSIIFYLQKIFPDEWNNFMERNNCKRESEVWGNDENVLQLRHWASLRGQTLCRTG

SEQ ID NO: 226527 - protein, 352 aa, Zea Mays
MGEELTSCLVRKYYSCSAAENFLLHREMDLLVVPYSSDPSLKLMQWPLFLLASKIPIALDMAAQFRPRDSDLWKRICADEYMKCAVLECYESFKLVLNLLVVGENEKRIIGIIIKEIEGNIGKNTFLANFRMSALPVLCKKFVELVSTLKERDASKFDNVVLLLQDMLEVITRDMMVNEIRELAEFGHGNKDSVPRRQLFAGSGTKPAIVFPPPVSAQWEEQIKRLYLLLTVKESAMDVPTNLEARRRIAFFTNSLFMDMPRAPRVRKMLSFSVMTPYYSEETVYSKSDLDLENEDGVSIIFYLQKIFPDEWNNFMERNNCKRESEVWGNDENVLQLRHWASLRGQTLCRTG

SEQ ID NO: 226528 - protein, 455 aa, Zea Mays
MGVHNIHYEWHEFFPNASYNIGAIMSLWAPVLLVYLMDTQIWYAIFSTIFGGMTGALGRLGEGFEGFLDLCEKVFFLIQCPGAILPLQVSPNKRTEAAKFAQLWNEVICSFREEDLISDGAAENFLLHREMDLLVVPYSSDPSLKLMQWPLFLLASKIPIALDMAAQFRPRDSDLWKRICADEYMKCAVLECYESFKLVLNLLVVGENEKRIIGIIIKEIEGNIGKNTFLANFRMSALPVLCKKFVELVSTLKERDASKFDNVVLLLQDMLEVITRDMMVNEIRELAEFGHGNKDSVPRRQLFAGSGTKPAIVFPPPVSAQWEEQIKRLYLLLTVKESAMDVPTNLEARRRIAFFTNSLFMDMPRAPRVRKMLSFSVMTPYYSEETVYSKSDLDLENEDGVSIIFYLQKIFPDEWNNFMERNNCKRESEVWGNDENVLQLRHWASLRGQTLCRTG

SEQ ID NO: 226529 - protein, 494 aa, Zea Mays
MAWLMRGARAGTVARLVRGRVLGKAARFVGEARALTRVRARGGSSARGWGAGWDVGRGARSGAFGRVYLMDTQIWYAIFSTIFGGMTGALGRLGEIRTLGMLRSRFHSLPGAFNTYLVPSDKSKNRRFSLSKRFAEVSPNKRTEAAKFAQLWNEVICSFREEDLISDGEMDLLVVPYSSDPSLKLMQWPLFLLASKIPIALDMAAQFRPRDSDLWKRICADEYMKCAVLECYESFKLVLNLLVVGENEKRIIGIIIKEIEGNIGKNTFLANFRMSALPVLCKKFVELVSTLKERDASKFDNVVLLLQDMLEVITRDMMVNEIRELAEFGHGNKDSVPRRQLFAGSGTKPAIVFPPPVSAQWEEQIKRLYLLLTVKESAMDVPTNLEARRRIAFFTNSLFMDMPRAPRVRKMLSFSVMTPYYSEETVYSKSDLDLENEDGVSIIFYLQKIFPDEWNNFMERNNCKRESEVWGNDENVLQLRHWASLRGQTLCRTG

SEQ ID NO: 226530 - protein, 3453 aa, Zea Mays
MAAAAAAMAAHRASFPLRLQQILAGSRAVSPAIKIESEPPANIKAFIDRVVNIPLHDIAIPLSGFCWEFNKGNFHHWRPLFIHFDTYFKTYISSRKDLLLSDDMTEADPMPKNAILKILRVMQIILENCQNRSSFTGLAHLKLLLASSDPEIVVAALETLVALVKINPSKLHMNGKLISCGPINTHLLSLAQGWGSKEEGLGIYSCVVANEGNHQGGLSLFPVDLENKYGGTQHRLGSTLHFEYNLGPAQYPGQTSDKGKSSNLCVIHIPDMHLQKEDDLSILKQCVDKFNVPPEHRFALLTRIRYARAFNSARTCRIYSRISLLSFIVLVQSSDAHDELTYFFTNEPEYINELIRLVRSEDSVPGSIRALAMLALGAQLAAYASSHERARILSGSSIISAGGNRMVLLSVLQKAISSLNSLNDTSSPLIVDALLQFFLLHVLSSSSSGTTVRGSGMVPPLLPLLRDNDPSHMHLVCLAVKTLQKLMEYSSPAVSLFKDLGGVELLSQRLHVEVQRVIGTADGHNSMVTDAVKSDDNHMYSQKRLIKALLKALGSATYSPGNPARSQSSQDNSLPVSLSLIFQNVDKFGGDIYFSAVTVMSEIIHKDPTCFITLKELGVPDAFISSVTAGVIPSCKALICVPNGLGAICLNNQGLEAVRETSALRFLVDTFTSRKYLIPMNEGVVLLANAVEELLRHVQSLRSIGVDIIIEIINKLSSSQEYKNNETATLQEKTDMETDVEGRDLVSAMDSSVDGSNDEQFSHLSIFHVMVLVHRTMENSETCRLFVEKGGLHALLTLLLRPSITQSSGGMPIALHSTMVFKGFTQHHSTPLARAFCSSLKEHLKSALKELDKVSNSFDMTKIEKGAIPSLFVVEFLLFLAASKDNRWMNALLSEFGDASREVLEDVGQVHREVLWKISLFEKNKIVAETSSSSSTSEAQQPDMSASDIGDSRYTSFRQYLDPILRRRGSGWNIESQVSDLINMYRDIGRAASDSQRVGSDRYSSLGLPSSSQDQFSSSSDANASTRSEEDKKKSEHSSCFDMMRSLSYHINHLFLELGKAMLFASRRENSPVNLSPAVISVANNIASIVLEHLNFEGHSVSFERDMTVTTKCRYLGKVVEFVDGMLLDRPESCNSIMVNSFYCRGVIQAILTTFQATSELLFTMSRPPSSPMETDSKTGKDGKEMDSSWIYGPLTSYGAIMDHLVTSSFILSSSTRQLLEQPIFNGSVRFPQDAETFMKLLQSKVLKTVLPIWAHPQFPECNIELISSVMSIMRHVCSGVEVKDTVGNGGARLAGPPPDESAISLIVEMGFSRARAEEALRQVGTNSVEIATDWLFAHPEEPQEEDDELARALAMSLGNSVTPAQEGDSRSNDLELEEATVQPPPIDEMLRSCLQLLQRKEALAFSVRDMLVTISSQNDGQNRVKVLTYLIDNLKQCVVASEPSNDTALSALLHVLALILHGDTAAREVASKAGLVKVALDLLCSWEVQIRESSMIEVPNWVISCFLSVDQMLQLEPKLPDVTELHVLKRDNSNIKTSLVIDDSKRKDSESLPNVGLLDMEDQFQLLKICCKCIGKQLPSASMHAILQLSATLTKVHAAAICFLESGGLNALLSLPTSSLFSGFNNMASTIIRHILEDPHTLQQAMELEIRHSLVTAANRHANPRVTPRNFIQNLAFVVYRDPVIFMKAAQSVCQIEMVGDRPYVVLLKDREKERIKEKDKDKSVDKDKATVAVTKVVSGDTAAGSPANSHGKQSDLNSRNVKSHRKPPQSFVTVIEHLLDLLMSFVPPPRPEDQVDVSGTALSSDMDIDCSSAKGKGKAVSVPPEESKHAIQESTASLAKTAFFLKLLTDVLLTYASSIHVVLRHDAELSNMHGPNRTSARLTSGGIFNHILQHFLPHATRQKKERKNDGDWMYKLATRANQFLVASSIRSAEARKRIFSEICSIFLDFTDSSAGYNAPVPRMNVYVDLLNDILSARSPTGSSLSAESAVIFVEAGLVHSLSTMLQVLDLDHPDSAKIVTAVVKALELVSKEHIHSADNAKGVNSSKIASDSNNVNSSSNRFQALDMTSQPTEMVTDHRETFNAVRTSQISDSVADEMDHDRDMDGGFARDGEDDFMHEMAEDGTGDGSTMEIRIEIPRNREDDMAPAADDTDEDISAEDGEDDEDEDEENNNLEEDDAHRMSHPDTDQEDREMDEEEFDEDLLEEDDEDEDEEGVILRLEEGINGINVLDHVEVFGGSNNLSGDTLRVMPLDIFGTRRQGRSTSIYNLLGRASDHGVLDHPLLEEPSSTTNFSDQGHPENLVEMAFSDRNHESSSSRLDAIFRSLRSGRNGHRFNMWLDDGPQRNGSAAPAVPEGIEELLISHLRRPTPQPDGQRTPVGGAQENDQPNHGSDAEAREVAPAQQNENSESTLNPLDLSECAGPAPPDSDALQRDVSNASELATEMQYERSDAITRDVEAVSQASSGSGATLGESLRSLEVEIGSVEGHDDGDRHGTSGTSERLPLGDIQAAARSRRPSGNAVPVSSRDMSLESVSEVPQNPDQEPDQNASEGNQEPTRAAGADSIDPTFLEALPEDLRAEVLSSRQNQVTQTSNDQPQDDGDIDPEFLAALPPDIREEVLAQQRTQRMQQQSQELEGQPVEMDAVSIIATFPSEIREEVLLTSPDTLLATLTPALVAEANMLRERFAHRYHSSSLFGMNSRNRRGESSRRDIMAAGLDRNTGDPSRSTSKPIETEGAPLVDEDGLKALIRLLRVVQPLYKGQLQKLLVNLCTHRGSRQALVQILVDMLMLDLQGFSKKSIDAPEPPFRLYGCHANIAYSRPQSSDGLPPLVSRRVLETLTNLARSHPNVAKLLLFLEFPCPSRCFPEAHDHRHGKAVLLDDGEEQKTFALVLLLNLLDQPLYMRSVAHLEQLLNLLDVVMHNAENEIKQAKLEASSEKPSAPDNAVQDGKNNSDISVSYGSELNPEDGSKAPAVDNRSNLQAVLRSLPQPELRLLCSLLAHDGLSDSAYLLVGEVLKKIVALAPFFCCHFINELARSMQNLTLRAMKELHLYENSEKALLSSSSANGTAVLRVVQALSSLVNTLQERKDPEQPAEKDHSDAVSQISEINTALDSLWLELSNCISKIESSSEYASNLSPASASAAMLTTGVAPPLPAGTQNLLPYIESFFVTCEKLRPGQPDAVQDASTSDMEDASTSSGGQRSSACQASLDEKQNAFVKFSEKHRRLLNAFIRQNSGLLEKSFSLMLKIPRLIDFDNKRAYFRSKIKHQYDHHHHSPVRISVRRPYILEDSYNQLRMRSPQDLKGRLTVQFQGEEGIDAGGLTREWYQSISRVIVDKSALLFTTVGNDLTFQPNPNSVYQTEHLSYFKFVGRVVGKALFDGQLLDAHFTRSFYKHILGVKVTYHDIEAIDPSYYKNLKWMLENDISDVLDLTFSMDADEEKLILYEKAEGY

SEQ ID NO: 226531 - protein, 1670 aa, Zea Mays
MVSPPAFAAAVAVVAVLLCASAAANPAGGPHMADLSVLLPPRMTKPVEYRLIGGDGCFSWSWDHHDLISVKPEYNDSSRCSTSARLASIAPYSGRRETSVYATDIISGITIHCKVFVDKISRISIFHHAVKIDLDEIATLRIHAFDDEENVFSTLVGLQFLWHLTPRLVDNSSHHLIRIPLKETHLSDCGGFCGDMNIRFELEDKNLGSDFSVVKGIEIGQEVVKAQLFEPQFEHVIDTITLTVAESMSLEPSSPVLVTVGVLVKFKLKVFRQKVAQVVKLPSQYHRWYATNSSVAQVDSLGILHALSLGFTKVVVEDTRVSGHEQVSSLHVVIPRTLFLYLVPIMDDSAHLHGITNIPSSKVWYVYPGRKYMVLAKAFAEGFDAREIYITEENELKLESSTMEFWNLSQVPDSSTSSYEVQTSRLLSPIFQGQGHLDASLTYLTGASGPTKVLKLVQEVNVCSKVKAFWDEGLENSNVIYLPWVPGVHQEVEMMAIGGCGKTLDDYKLFSSDEDVASVSDSRIVRAKKPGQAVIRVVSAFDFLNFDEVIVEVSIPSVLSILPIFPVEVPVGTRLHSAAVLKTSAGHPFSQCTHFNAFIRWSLLSEDEAFHILNTAEASSIDDIKHNSGYWGQNGNPCAWVSLSAFAAGRSTIVATFAVDSDSDIETFGGPISLEATSKISAYYPLVVLQGGNGNHFGGYWFDLSGIHSRIKNMDNNSPKELYLVPGSTMDVLIFGGPERWDQVIDFVETVDVIDPSKNHIISSTAVKKLSSGLYRVSCLSKVSYKLLFSRGNMVGKDHPVPAISKSEFTVICDFPSEITLIANENENRLDILEAARKADRGPDRLQASPIVISNGRNIRLAAASIHVNGRFFANSSSLRLKWEATGCEGLAYFEETKSVEMLDESAWERSLVLQNSTGVCTVRATVDDFSTKYAGQTHEEEYTFHSLTDAIQLQIVSSLRVTPEYVLLVFHPEAQENLIVSGGTCSLDASTNDTHVVQIVTHPGKALCSQLILAAKGLGEAIIIIQDVGLSPRATTHSLVRVANVDWIKITAEEQISLMEGSTKDFQILAGTQDGQIFGDSQFKYMDIELHLDDEILELIGPSESMDGPEFSIKAAKIGITSLYVSTKQSSGHRVLSQVVKVEVYGPLQIHPEYIYLTPGASFVLSVKGGPKTGVSIEYSSLNMGIVEVQNTTGKLSAKSVGNSTVRAAVLANGGILVCEAFGRVEVDIPVAMTLNTQSERLCIGCSMPVYPSLPKGDLFSFYETCQSYSWMIADEKVVTFQSAKSWRYRLDQGLYSDGKKSPWFSNGSSKFFISHMLGRSAGKTKISISVVCDFLLPGTSGSVVSYNASKIILVVPDPPLALALPMTWLFPPFYTTMSLLPRSANSLGEPNSLDLESSVGYSLLRGNGRIIDGSKIQTGESNTVDCIQAKDHSAGRTEIAACLRVAQVAQVRVAAAESSIQIVYLSVNDKVELDIKYADELGYIFNEAHGVVPVKIETNYPDVVSVLMPRDFNGTYDTRERFVLQARSHGTALVRLHTNNVPNKVDFIMVSVGAQIYPRDVILHSGQHLNFTVIGDSMDMCGHGHWLSSNGKIVHINRVTGEAQARSEGVAEVIFKGSNFKLQTTITVLKVNQIVVDAPAETLTNAAGLPDGYMFSVRFRSRHKFVVY

SEQ ID NO: 226532 - protein, 563 aa, Zea Mays
MQVPLLPQGLAVAGSCNFFFGNEIWSLASFHPLFLPAQICPCRRTRTPARQLLFFNGCCSELIVRGISFLPQTVAVEDWVRERDVSAGLSRNPEFTSVARMSVSHAQDIEISLCDGNSEDERRRRKIGSLRRKAIHALKKRGRRRVDSRFPPPAISIEDVRDAEEERAVASFRERLAAHGLLPEKHDDYHMMLRFLKARKFEAEKAMQMWSEMLKWRKEFGTDTILEDFDFEELDDVLRYYPQGYHGVDRQGRPVYIERLGKVDPNNLMQITSVDRYIKYHVQEFERAFRERFPACTLAAKRHIDSTTTILDVQGVGFKNFSRTARELVNRMQKIDSDYYPETLHQMFVVNAGSGFKWIWNSVKGFLDPKTSSKIHVLGSNYQSRLLEVIDSSELPEFLGGSCTCSDKGGCLGSNKGPWNDPYILKLIHNLEAGCMRETTKPVSEGGERSSSSFRLEQMKWQGMLSDTSNAESGSDVDDFGPSFVHKVSGYGCLTPVREEVKGTDCATYLSCDDQSHPDMVPEFYHGVQRTTEMVQKQMADFRQYSTNRRPRELGILFSYRSG

SEQ ID NO: 226533 - protein, 398 aa, Zea Mays
MRSHLFSRSKLRRMQFMSSTELLSLARSSICQQPLCSHQGKITSYGWLMGDTFGQWGRIALQASVVINNVGVLIVYMIIIGDVLSGTSSTGVHHSGVLEGWFGPHMWNSRPIVLLATTLLVFAPLVSFKRLDSLRYTSALSVALAVVFVVITAGVAIVRLIQGTVEIPKLFPEIDGVSSVWKLFTAVPVLVTAYICHYNVHSIDNELEDKTQIKPIVQTSLGLCSSVYIATSFFAYLLFGEATLADVLANFDSDLRIPLSSAFNDIVRVSYVVHIMLVFPIVFFALRLNLDGLLFPTARHISGDNKRFTIITISLIAVIYLAAIFIPSIWDAFQFTGATAAVLIGFIFPAMIILRDPYGVSTKRDKVLAVTMIVLAVVSNCVALYSDAFNIFYRKQEA

SEQ ID NO: 226534 - protein, 502 aa, Zea Mays
MGGCYSAFACSRKLRGRISFILPVTERDRDDRSSDGGASSVASHSPSPSPSPRKDDAGPLVVRTTAAEFARRYVLGRELGRGEFGVTRRCRDAATGEALACKTIRRNRRPRGPAARRLGAGPPHHGPGAPPAAAGQDPAAAAHAADVQREVAIMRRMSSRGGGAVVRLREACCEDSAGAVHLVMELCEGGELFDRIVARGHYSERAAAAVFGTIVDVVRLCHSNGVIHRDLKPENFLFANKSEDSQLKVIDFGLSVFFSPGDRFTEVVGSAYYMAPEVLKRNYGPEVDVWSAGVILYILLCGVPPFWGDNDEKIAQAVLRGNIDFNREPWPRVSANAKDLIRRMLDPNPSTRLTARAPVVEERGHGAERVAGRGRARPAAAVLRHEQVQEEGAGRGGAEPAGGGAGQVRADVPPHGQGPQRQPHAGGAHGRPPHQRPARAGVGDQDAARGRRHGRQRHPGLRRVRDGVPAPQEDEQRRVPGVGVQVLRQGRQRLHRARGAAG

SEQ ID NO: 226535 - protein, 361 aa, Zea Mays
MGGCYSAFACSRKLRGRISFILPVTERDRDDRSSDGGASSVASHSPSPSPSPRKDDAGPLVVRTTAAEFARRYVLGRELGRGEFGVTRRCRDAATGEALACKTIRRNRRPRGPAARRLGAGPPHHGPGAPPAAAGQDPAAAAHAADVQREVAIMRRMSSRGGGAVVRLREACCEDSAGAVHLVMELCEGGELFDRIVARGHYSERAAAAVFGTIVDVVRLCHSNGVIHRDLKPENFLFANKSEDSQLKVIDFGLSVFFSPGDRFTEVVGSAYYMAPEVLKRNYGPEVDVWSAGVILYILLCGVPPFWGDNDEKIAQAVLRGNIDFNREPWPRVSANAKDLIRRMLDPNPSTRLTARQSTRG

SEQ ID NO: 226536 - protein, 740 aa, Zea Mays
MSDEPYDADGDVGRFLHCPSPEAHMFPLSEPERTGVGLRHTTDHVQGHQLAAPQTLSNAAPDLSGRGQGLPAPPQTLTVAPDLGLQQAPVTGFHGHPALHQSLTTTVAPDFGVHALTTTEFQGHPALETTLNAAPDFGLPVPAAPIVDAAAGNYQPSSAMLDVEYHQPMAIDNNDIQQPSHQMLPPEMHRRHAYGGGGFAEPTTMLCDGGADEASLVERNMQMLLADGGVIPHPHRPSPSLYEQLVNNGQAELAAVVRNLERGESSGGAAALINDVYPVKEDVWFRPIVRGQLDCSRCHSVREVVRQDERWRMHFTVHASEPGMVFQHAIVDRMSIGADGHFHTDQLLHHDLRRRNHVWVHNFIARSVEMMKRNSGQMHSSYDSAAAAEYTTTNAVVTPAPPPASHHHHAHMGLEVNMLNSILSAAPAATTVAQPPGITPQEQQQTTVAEAAAPEAVTQQEQAENTDAPRVAEAAIPVPAVTAPQEQEATDAPAEGAERAAAPRSAVISRKQDGSKDAGAVFAAFKWEGFQPEILESSLVEPYDPESGANVLLYPSLVEQLRQTELERKESKSLSKMPAAAAQEDTTSTYLQMSGEASANEPKLGSSSAFRRLCQKDATYRLYSRRVNCINRKITKLQQTAARVGPRGLFAVKQKMEMYKREKAELYDVINKGMQENERGGNSGAGPSNRAAAGPSSHEAAASSPSNTAIPSDGADTSKDDDASPYSVPSSNCAGPSGSK

SEQ ID NO: 226537 - protein, 529 aa, Zea Mays
MAKVKQKVATEDILEGDDERTSSENNSVPPVILDLNEGFGEGNEAGEASDDGDDNQEEDGDDGGSTSEVAGGRNSSNNSSTNHTSMSNKDYDMNSSSNGEGREERELAVRQYNRSKLPRLRWTPDLHMAFVHAVERLGGQERATPKLVLQTMNVRGITIAHVKSHLQMYRSKKLDQESAGHERAATSSVFSPMDFHMMRTGDHHRYHDMFLHRPAAGSAISSRLLHGGEFFGSRNAAVSPEARRLYELLQRRQPTMQTFDFKGYSSGSGLRDQEWSFSQHAAAAAARAGAINGHGPTKGLIHDMGLRKNSRPMSHLFDVRDRDAIASNRTSSDATGAASHGVTITRSADRNGTSSSWPQPRTMSAAASTAPALGSHHLLSMGRGSANLTSSSDHPVVTNEALGSRLQTFQELNKVTGDMCAGTRKTKRMKTPMEGNSGTPDLHLSLSPNDDDMGGAADKQIKKMKIQGIGLSEQQEVDGDKMLPLSLSLSLRGGEDARRLEAATGGSSGNKAALGRCTLDLTMSIKATE

SEQ ID NO: 226538 - protein, 238 aa, Zea Mays
MDKSGKVIAKWDSRATKIYTEICVEEGYRSWSRPSYCSISAPDEWWAKQNEDYELVQAMPGCIMFKTAPLENEDELKVMFGPIVCTNERTLVPGVEDANSSSDDHLEYTLGGGENSTPDPCTNATGKRKLRHDSPKPKKKKDSREEYMKRLVAAFESRSVTTNKSITSSDNDPVRLEIKKQLMQVKEDGSPEGSEIHLFATHLLIHKKYRDVFANLETKEGRIAWLRNAYELETKKSN

SEQ ID NO: 226539 - protein, 95 aa, Zea Mays
MATLTKVKELLISHVCQAGKCKSWSVTPQMPLTTAEKIMDSHDVDHLPVVSEDANLQDRGLLIGFVDRECIAIARRAMATKEIFSSMYGIRKEER

SEQ ID NO: 226540 - protein, 385 aa, Zea Mays
MDKCGDTDDCVSTSEAAEQAAKLPEVNINNLPVPGEVEFINGGPPCQGFSGMNRFNQSPWSKVQCEMILAFLSFAEYFRPRFFLLENVRNFVSFNKGQTFRLAVASLLEMGYQVRFGILEAGAFGVAQSRKRAFIWAAAPGEMLPDWPEPMHVFASPELKITLPDGQYYAAARSTAGGAPFRAITVRDTIGDLPKVGNGASKLTLEYGGEPVSWFQKKIRGNMMVLNDHISKEMNELNLIRCQHIPKRPGCDWHDLPDEKVKLSNGQMADLIPWCLPNTAKRHNQWKGLYGRLDWEGNFPTSVTDPQPMGKVGMCFHPDQDRIITVRECARSQGFPDSYEFAGNIQNKHRQIGNAVPPPLAYALGRKLKEAVDKRQEASAGVPAP

SEQ ID NO: 226541 - protein, 77 aa, Zea Mays
MGKVGMCFHPDQDRIITVRECARSQGFPDSYEFAGNIQNKHRQIGNAVPPPLAYALGRKLKEAVDKRQEASAGVPAP

SEQ ID NO: 226542 - protein, 388 aa, Zea Mays
MSICIPGSPLQFACNLGGDRLHSIMGRVKLQIKRIENNTNRQVTFSKRRNGLIKKAYELSVLCDIDIALIMFSPSNRLSHFSGRRRIEDVITRYINLPEHDRGGVVRNREYLMKMLAKLKCEGNIAEQLTPNKEPINSNVEELQQEIKTYQHQMEVLKEQLRMFEPDLTTLMSMNDFETCEKFLMDTLTCVEERKKYLLCNHVAPFDPSASDMQQHVDMFALPPAPPHQQEQQGDDLGGAASAFGGDVSWFADGMPTSSIFAASDPILYFRDQVMFDSTSTMRRDSMVAGVDPGMTSVCQMEQQAPSVDWQQAYTSAEFFSTLIPSTPYPLDDQNDMAQVLTSPMVPPHEHDKVEVPMSSSNVPTDGDCGTTLAAAQEDGLPGVVNIG

SEQ ID NO: 226543 - protein, 188 aa, Zea Mays
MSICIPGSPLQFACNLGGDRLHSIMGRVKLQIKRIENNTNRQVTFSKRRNGLIKKAYELSVLCDIDIALIMFSPSNRLSHFSGRRRIEDVITRYINLPEHDRGGVVRNREYLMKMLAKLKCEGNIAEQLTPNKEPINSNVEELQQEIKTYQHQMEVLKEQLSLKNHSSFLSLTSEKSGIEDGYTWIAI

SEQ ID NO: 226544 - protein, 271 aa, Zea Mays
MSLTWRAKTIGPTLPSLYLDDDRLPLNKAYGFNLFSSSDSCLPWLDKQRPRSVVLVSYGTVSDYDETQLEELGNGLYSSGKPFIWVVRSNEEHKLSDELRDKCKERGLVVSWCPQLEVLAHKATGCFYTHCGWNSTLEAIVNGVPMVAVPHWADQPTISKYMESVWALGVKVRKDENGLVTRDEVERCIKDVMDGDRKDEYRMNATVWMKKAKEAAQYGGSSDKNIVELVMCPCVATAYKLFDTKLVYNNYMKTINIYYKQLQTYLLARTL

SEQ ID NO: 226545 - protein, 395 aa, Zea Mays
MYVTMDRYENDWDVVKRDWDAQVLEEAPYKFKSALEAVKTLRAQPKANDQYLPPFVIVDDSGKAVGPVLDGDAVVTINFRADRMVMLAKALEYADFNNFDRVPVPEIRYAGMLQYDGELKLPNRYLVSTPEINRTSGEYLVKNGIRTFACRQPGKTTRSSSHALPPPYFSLLDTPPATDIPYRQVPFPRLALVACFRPAHLPPVLAMGAGANNHEESSPLIPAAVAAPAYEKPVSAHAFGGVPRESWNSGILSCLGRNDEFCSSDVEVCLLGTVAPCVLYGSNVERLAAGQGTFANSCLPYTGLYLLGNSLFGWNCLAPWFSHPTRTAPQGSPPWIQQWALRLCHDAAHGADHGAWHVSYSTTFPTLVLSVLPVVYHLLLLALMCDVSPSVNTSL

SEQ ID NO: 226546 - protein, 574 aa, Zea Mays
MIYGRVGVIALDNARQSAKIIDQSLTPGKIYDGDGFNYIKESFENGTLHLIGLLSDGGVQLSYKRTTRFTFICSIQLLLKGVSERGAKKIRVHNLTDGRDVLDGSRVGFVETLENDLLELRGKGIDAQIASGGGRMYVTMDRYENDWDVVKRDWDAQVLEEAPYKFKSALEAVKTLRAQPKANDQYLPPFVIVDDSGKAVGPVLDGDAVVTINFRADRMVMLAKALEYADFNNFDRVPVPEIRYAGMLQYDGELKLPNRYLVSTPEINRTSGEYLVKNGIRTFACRQPGKTTRSSSHALPPPYFSLLDTPPATDIPYRQVPFPRLALVACFRPAHLPPVLAMGAGANNHEESSPLIPAAVAAPAYEKPPQAPAPEAANYYADGVPVVMGEPVSAHAFGGVPRESWNSGILSCLGRNDEFCSSDVEVCLLGTVAPCVLYGSNVERLAAGQGTFANSCLPYTGLYLLGNSLFGWNCLAPWFSHPTRTAIRQRYNLEGSFEAFTRQCGCCGDLVEDEERREHLEAACDLATHYLCHPCALCQEGRELRRRVPHPGFNNGHSVFVMMPPMEQTMGRGM

SEQ ID NO: 226547 - protein, 464 aa, Zea Mays
MLVLFETPAGFALFKVLDEGKLDKVEDLWKEFTTSDSARKVVELKAFNKFENTSDALSAATLIIDSKPSKGLRKFLQKHCEGETLAVADSKLGNAIKEKLKIDCLHNSAVMELMRGLRNQLTELITGLGAQDLGPMSLGLSHSLSRYKLKFSPEKHFPELTKIVIDNIQYAKVVKMMGNRVNAVNLDFSEILSDEELETQLKEAAVISMGTEVSDLDLSNIRELCDQVLALSEYRAQLYDYLRSRMNTIAPNLTALVGELVGARLIAHGGSLLNLAKQPGSTIQILGAEKLSEVICDQAILLDLIAKSRCVAAAKKYFLDLPETSKTYFRYHALLNSYSKVLMIEKAESLVEKMEELNFPFIFYMKRKVVVAETRRPLKPPPGWNQTAKMISTASTKAEPLKPPPPQRRLGDLLREAQDDDNDNDTAVDGLSRDDSLRMGAEANRCCVPRLAWAISCNGRTQRK

SEQ ID NO: 226548 - protein, 1114 aa, Zea Mays
MSMKEESDEVATKTRLLSLELLQGLLEGVSNAFTKNFHFIDSVKAYLSYALLRASVTSSPVVFQYACGIFSVLLLRFRESLKGEIGVFFPLIVLRSLDSSDSSLSQKASVLRMLEKVCKDPQMLADVFVNYDCDLEGPNLFERTVSALSRIAQGSQIADTNSIVSSQTVSVKGSSLQCLVSILKSLAVWEQLRRYSLKQGSIVESHEGDASRSVTTDEMKSQEDVRNQFERAKAHKSTLEAAISEFNRKPTKGIEYLLSNKLIENKASSVAQFLKSNPGLDKVMIGEYLGQHEEFPLAVMHAYVDSMKFSGLKFDAAIREFLKGFRLPGEAQKIDRIMEKFAERYCADNPELFKNADTAYVLAYAVIMLNTDAHNPMVWPKMSKSDFVRMNTASDAEECAPKELLEEIYDSIVKEEIKIKDDSHDTSKTTKRPETEETGRLVNILNLALPRLKSASDTKAESEKIIKQTQALFRNQGQKKGVFHVAQQVELVRPMLEAVGWPLLATFSVTMEEGDSKPRVVSCMEGFRAGIHLTRVLGMDTMRYAFLTSLVRFTFLHAPKEMRSKNVEALKTLLGLADTDMDALQDTWNAVLECVSRLEYITSNPSISATVMLGSNQISRDSVVQSLKELAGKPAEQIFVNSVKLPSDSIVEFFTALCGVSAEELKQTPARVFSLQKLVEISYYNMARIRLVWARIWSVLAQHFIAAGSHHEEKVAMYAIDSLRQLGMKYLERAELNNFTFQSDILKPFVILMRNSHNSKIRGLIVDCIVQLIKSKVGSIKSGWRCVFMIFTAAADDEDESIVESAFENVEQVILEHFDQVVGDCFMDCVNCLIGFANNKCTPRISLKAIALLRICEDRLAEGFIPGGAVKPIDVVPEANFDVSEHYWFPMLAGLSDLTLDSRPEVRHCALEVLFDLLNERGHKFSSPFWESIFHRVLFPIFDHVRHAGRDGLSSSGDDWLRDTSIHSLQLICNLFNTFYKEVSFMLPPLLSLLLECAKKTDQTVVSIALGALVHLIEVGGHQFSDGDWDTLLKSIRDASYTTQPLELLNSLRFQKSKHQQLLSREESNAQGNSYLDSQGEPSISDSNNGEHNHPEAGLQTILENSEDWNMKGL

SEQ ID NO: 226549 - protein, 885 aa, Zea Mays
MPAPDRATAGGGAGGHFRGHAHLTNCIHLRHHHAHAHAGAGGASSSGRRRSPASASLMRDLLALQRSRSLRDPSTRRSVESSRVAADPDDGTDDDDDDDADLPAKSRRSAGALKTLLDQLAENPHPKPGRRPPRRFKRRAGRRAAAASKPPDRAAALSVNSSSQEAVCGNKYLFHGGGGGDDDGDGVVELQQHLPQDSRNVCGIPWNWSRLHHRGKSILDMAGRSLSCGLSDSKSAAGRKSEAPAASGVRPLFPVKSERLASSTSSDSDALPLLVEEAATSGARKRIGVISSGSYSGELGIFSNQTSEMDSDLLSESQSGHKSLASRSQHGRGRHRSLTQKFAPKTFKDVVGQSLVVQALSNAILRRKIGLVYVFYGPHGTGKTSCARVFAKALNCLSSEHPRPCDSCTSCIAHNLGKSRSLMEIGPVGNIDMEGIVDVLDNVMLSPAPSHYRVFIFDDCDTLPADTWSAISKVVDRAPRRVVFILVSPNLELPHIILSRCQKFFFPKLRESDIVNTLQWICTSESLDVDKDAMKLIASRSDGSLRDAEMTLDQLSLLGQRISLSLVQELVGLVSDDKLVDLLDLALSADMVNTVKTLRDITETGVEPLALMSQLATIITDILAGSYAFTRERPRRKFFKRPTLSKEDMEKLRQALKTLSEAEKQLRVSSDKTTWLTAALLQLAPDKQYLLPSSSTSTSLNHGVLVGPFPDRGVGRAPAVENKGNLAGTSYGEKRTVEHTENGHVLSTSSVRANEGTKLRKAENEMVWQAVLESIQSDTLRKMMAKEARLNSISLGTEPTVQLIISSHISKSKAENYRAQILQAFESVLRSAIILEIRYESKNDAKPGHTPSMFPYPENDSTLRRSFTKHSPLSSGDGCNLIPTY

SEQ ID NO: 226550 - protein, 990 aa, Zea Mays
MPAPDRATAGGGAGGHFRGHAHLTNCIHLRHHHAHAHAGAGGASSSGRRRSPASASLMRDLLALQRSRSLRDPSTRRSVESSRVAADPDDGTDDDDDDDADLPAKSRRSAGALKTLLDQLAENPHPKPGRRPPRRFKRRAGRRAAAASKPPDRAAALSVNSSSQEAVCGNKYLFHGGGGGDDDGDGVVELQQHLPQDSRNVCGIPWNWSRLHHRGKSILDMAGRSLSCGLSDSKSAAGRKSEAPAASGVRPLFPVKSERLASSTSSDSDALPLLVEEAATSGARKRIGVISSGSYSGELGIFSNQTSEMDSDLLSESQSGHKSLASRSQHGRGRHRSLTQKFAPKTFKDVVGQSLVVQALSNAILRRKIGLVYVFYGPHGTGKTSCARVFAKALNCLSSEHPRPCDSCTSCIAHNLGKSRSLMEIGPVGNIDMEGIVDVLDNVMLSPAPSHYRVFIFDDCDTLPADTWSAISKVVDRAPRRVVFILVSPNLELPHIILSRCQKFFFPKLRESDIVNTLQWICTSESLDVDKDAMKLIASRSDGSLRDAEMTLDQLSLLGQRISLSLVQELVGLVSDDKLVDLLDLALSADMVNTVKTLRDITETGVEPLALMSQLATIITDILAGSYAFTRERPRRKFFKRPTLSKEDMEKLRQALKTLSEAEKQLRVSSDKTTWLTAALLQLAPDKQYLLPSSSTSTSLNHGVLVGPFPDRGVGRAPAVENKGNLAGTSYGEKRTVEHTENGHVLSTSSVRANEGTKLRKAENEMVWQAVLESIQSDTLRKMMAKEARLNSISLGTEPTVQLIISSHISHTPSMFPYPENDSTLRRSFTKHSPLSSGEGEIIEVGPSRMHWHAQTNNDVLDVNERRKENTWEEETSSSPNQESVTNPKGRNGNRQNRQNSIVRGKVSLAHVIGRAEACSQRGGWSRRKAISIAEKLEQENLRMEPKSSLLCWRTSRTRRKCHLQFCVPIFHTLLNRLNKCQGRGIFWDS

SEQ ID NO: 226551 - protein, 694 aa, Zea Mays
MYRLKYNLNLGSLGNFTSITEINLSNNNIGGTIPEDLPVTLQNLFLSDNQLTGSIPMSLSELHSLTAMSLNDNHLDGKLPDAFDSLTGLVNLGPLPPSLGSLTSLTTLHMQDNQLSGTLNVLQDLPLKDLNVENNMFSGPVPPKLLNIPNFKNDGNPFNTSIAPSTSPSSTPTGSRPTQTPSSSSSPSGSPPPSSAASNSSSGSTARNSNSPSSKKNKSSPLRTVGYVLLAIVLFIVLVLLVIFCLSKYQERQSRRDYSTSQLGRVHQRVEEPKSKQASVQSKHEAKKGSSEVPERKKPREINLAVPVAIEKPPEKRKERVINLERTESEIFAAAPPPPPPPPPPPPPPTPPPPPPPPRLPSPPPVEKVTVNPIVLPEKRVSTPPRTGPSTSATSFSVASLQQYTNSFQEQNLIRESRLGKVYLAELPEGKLLEVMKIDNANGRIPVDDFLELVARISDIRHPNILELVGYCAEYEQRLLVYNYFSRKTLHDVLHEGEDLDEPLSWNARLHIVLHAAKALEYLHDTCEPPVVHQNFEPANVLLDNRCSVRVAECGLAQLMASGSVTQLSGRMRALLNYEAPEIHESEPFTRQSDVYSLGVVMLELLTGRKPYDSSRPRDEQHLVRWANSQLHDMESLSKMVDPSIRGECSVILLSRFADIISQCIQPGPEFRPAMSQIVQDLARIVGASGAVSE

SEQ ID NO: 226552 - protein, 925 aa, Zea Mays
MIDDEESQGIKKVHFRDSFSQHPIVTYKRRRQQKPQTQQQLRQPPPSLQQHPEPQLQVKLEPKTEDVPEQQFPILRARDIGWEHAVDLDGNKRRWQCKFCSLCRSGGVTTLKAHLIDDSCPNVPKEISKKVSNFIEEKRATRLLLNNYVFNVDEDFNTILQEGTVEYVNEQQPSRKATYVQTLSKCAINEIAAGSKQCGAECSGQPVEHCDQPEEQCTMDYGRMDRLTSNKNQILDKNTENSKNTKVHNYPAVLRDSAWEHSLIYEKENGHWKCKWCSIEGDHGLTRLMWHLVGWQNRPQCPNIPKDVAEKMKDQMMSKKEQKARSGLFDGNGCCEVLCSSNSSQLDQNHLTARIHDRCSSQAFDHANSELKGCNMLSNTILSQQSSNPQVHHEDPQVCHEQERKEVATSSEPGCEQGQRMQWQSQNKPMMEGPHDNGLCGDTNQLEEQKSGFGISDCWRYVLDGQMHLPDVQEGAGIGTCIRDALLYGCAEFGTVPDKMEMDCDKTVDANTAKCQNILKDVLRSENFALLCSVLCRTVHQDGERTRYFDFGVIDSRMKNGNYGPEPELFVHDLKLLWEDLKVAGQDIVHLANNLSSLTEDSYEKLVGRERGSDDDELNEAVVARSEPKNLVQPNASVPLTSQGFNQLLDQPGPSDPSVVYKDSICNRCGKVAGAGSVLKCYRCMLPCHISCIEATGSPISTGRWCCKNCSAGTKEPVEGDMVLAHGNPNCLHESCVVCDRLAACRSPKCDNSRALVISSVDPEIDTCYSCKICGGTEEDEKRFLICGNVLCRYMYYHIGCLKSMQISTSVERGSPCWYCPSCLCRVCLCDKDDDLTILCDGCDEAYHIYCITPRHTSIPKGQWYCSSCSVERAEEGMRQYERRTLKLHRKEDAGLQSWNFDGVDLLLSAAEQLRIDEQLETRTD

SEQ ID NO: 226553 - protein, 522 aa, Zea Mays
MRILRCVMSKRGRRLPPLQNLAVSKPMMEGPHDNGLCGDTNQLEEQKSGFGISDCWRYVLDGQMHLPDVQEGAGIGTCIRDALLYGCAEFGTVPDKMEMDCDKTVDANTAKCQNILKDVLRSENFALLCSVLCRTVHQDGERTRYFDFGVIDSRMKNGNYGPEPELFVHDLKLLWEDLKVAGQDIVHLANNLSSLTEDSYEKLVGRERGSDDDELNEAVVARSEPKNLVQPNASVPLTSQGFNQLLDQPGPSDPSVVYKDSICNRCGKVAGAGSVLKCYRCMLPCHISCIEATGSPISTGRWCCKNCSAGTKEPVEGDMVLAHGNPNCLHESCVVCDRLAACRSPKCDNSRALVISSVDPEIDTCYSCKICGGTEEDEKRFLICGNVLCRYMYYHIGCLKSMQISTSVERGSPCWYCPSCLCRVCLCDKDDDLTILCDGCDEAYHIYCITPRHTSIPKGQWYCSSCSVERAEEGMRQYERRTLKLHRKEDAGLQSWNFDGVDLLLSAAEQLRIDEQLETRTD

SEQ ID NO: 226554 - protein, 148 aa, Zea Mays
MANDGDDGQSQDYLFKIVLIGDSSVGKSNLLARFARNEFYPNSKSTIGVEFQTQKLVIDGKEIKAQIWDTAGQERFRAVTSAYYRGAVGALLVYDISRRQTFDSVGRWLNELHNHSDMNVVTILVGNKTDLKHARELFKLWLRRSTAY

SEQ ID NO: 226555 - protein, 1254 aa, Zea Mays
MPTYGMPPPDFALPMPMLAPPPPPPPPSQFPMGFQTPPASVAAPGDGSGQDDTTHSWVNTIFNTQSPAGGAKKRVILFMAPTILGLVPPILSLACMSQSSMQVPVVSDRLLLSIISVDTGKTIARSSKAAARNGICQWPDSILESIWFSRDEVSKEYEDCRCRIVVSMGSTRGAILGEVFLNLNNYLSSDGSTAISLPLKKCNSGTILQLKIQCLGTKSKSRWSNVFQDSSFSPSQRNDSDGGLYIERQDTANSFIDYICVGRADLINRSNDSSFSSQTSGQNMLQESIDESSLSGFNHLSSGASGSSKDLLDAAEETIEELLIEAQMWESHYQKLKIDLEKLQKESDEKSKNQTEILLELSASQAEQESLRQEIEELKLSLKVATERQTVGGISKSGDAIDVQFELKDEVHFLRESNENLTMQLKKSQDANIELVSILQELEETIEAQRTTISNFTQMSNMIDQDIPTNALSAQEDAEWERKMSLKEDEIIALREKLDRVLSIENPGGVGSDAIYLELEKENDFLKVKMQDLENDCSELTEENLELIHKLKEVSGVEEQDSCLSDIEVMLNATGLSGTSKSRAKYLERKCADLEQKMLNFQSESRELEEKLKKSHEDLKGQTLELSELRENLSRFRAMELERGEINFSRGYQLRSEELGDIETELKLLKSTVQLKEKEIEGLQHSKLEMETFIDSVLGPKIHELEIYKVELELHISRLEDEKIELLESISGMEVELTNLTSEYESCIVQMDDSRTMIIDLKDKVERNQMELEAQKVELKKKQLEFQKIFLEAQDDSEALRRLNAKLQAKVHNLTEEYNSLQELTDDLKKEKLELHSFAKQLEQKLEHSKRRTTDFCTTVDLLEVKLSSIQKDISLKEQSFLLELDNIFHEHKDHEEKINRAHFLLNKIDKEKAIEIENLEREVISLTAQLSSTHGEQASSMVDTIREASILRADKAKLQANLHDVNEQLRHYESLLEDIHKESKRKIKSLTDSLNVSKQNEEMLKIDAEAVRRLMEAAKSNEENLRITSNELELKYKSSDYEKQQIMEENYGLKIQVRKIAGVQDELLEVQSSLDEAQFEKERLEGILRLISEECDELKVQNAMLTDKVSMMQDTSNNIIEEKQTKTSMQTKMSTINEGNNDLATDNRGCCLVNEEPDLQVKVQSLESGLAEVLEKNSMYMTQVKSPTTEQQAGSRNGEGNNDDKIAHLESELKYIQDKLLNMSLQYAEVEAQREELVMELKNVNAKKGGRWF

SEQ ID NO: 226556 - protein, 1254 aa, Zea Mays; identical to SEQ ID NO: 226555

SEQ ID NO: 226557 - protein, 145 aa, Zea Mays
MVWRFGCFGEEAKGIDALKRRRTTIERLFYKLIIDNVAELLHFVYTTTVGEACQKYGSIFGRPQGLYVSLKDKGKVLEVLRNWPHRNIQVICVTDGEQILGLGDLGWQGMGIHVGKLSLYSALGGFDPSVLSVHIFYLLFFGCIS

SEQ ID NO: 226558 - protein, 929 aa, Zea Mays
MAPALLLLRLLALIATAREACAARAFAAASNATAHGATVVAGKLNVHLVPHSHDDVGWLKTVDQYYVGSNNSIQGACVMNTLDSVVDALARDPARKFVVVEQAFFQRWWAEKIPNIQAVVRKLVDSGQLEFINGGWCMHDEAAVHYIDMIDQTTLGHRMIKKQFNKTPRAGWQIDPFGHSAVQAYLLGAELGFDSLHFARIDYQDKEKRKAGKGLEVIWRGSRTFGSSSQIFTNVFPVDYSPPDGFGFEVLDENILPVQDDMLMFDYNVEERVNDFVVAAIEQANFTRTNHIMWTMGDDFSYQYAESWFRNMDKLIYHVNKDGRVHALYSTPSIYTDAKHFSNISWPVKYDDDFPYADSKNSYWTGYYTSRPTFKRYVRVLSGYYLAARQIEFLVGRSFLGMFTTSLEDPMAIAQHHDAVSGTAKQHTTDDYSKRLALGASKVEKGVNVALTCLLSSNGTCAPSVQKFSQCPLLNISYCPSTEETVSGAKNLVVVVYNPLGRERSDFIQIPVNDENLVVKSSDGTIIESQLVEVDNVTRNLRKVYVKAYLGITTNKPPMYWLLFQASVPPMGWNSYYISRSTGSNSIRYVATMVSPRNDTVEVGPGSLKLSFSSASGQLERIFNSVSGVDLPIQQSFFWYSSNQGDIVDAQGSGAYVFRPNGTTPTIVSSSVRNYREDWDLEVTEPVAGNYYPVNLGVYVADGKYELSVLVDRAVGASSIQDGQLEIMLHRRVIRDDDKGVDEPLGEVVCLDGSCKGLTVRGTYYVKVDKIGHGAHWRRTYGQQVYSPYLLAFTHEDETSWKSYNVAKQSTMDENYSLPDNVAIITLQNLDDDTTLLRLAHLFQDLEDAQYSVIAKVELRRVFGKRTIKELAETNLSANQKKSEMKKLNWRVLGNDKSDPIPLKGGPVDSQALVVELGPMEIRTFLLKF

SEQ ID NO: 226559 - protein, 404 aa, Zea Mays
MWTMGDDFSYQYAESWFRNMDKLIYHVNKDGRVHALYSTPSIYTDAKHFSNISWPVKYDDDFPYADSKNSYWTGYYTSRPTFKRYVRVLSGYYLAARQIEFLVGRSFLGMFTTSLEDPMAIAQHHDAVSGTAKQHTTDDYSKRLALGASKVEKGVNVALTCLLSSNGTCAPSVQKFSQCPLLNISYCPSTEETVSGAKNLVVVVYNPLGRERSDFIQIPVNDENLVVKSSDGTIIESQLVEVDNVTRNLRKVYVKAYLGITTNKPPMYWLLFQASVPPMGWNSYYISRSTGSNSIRYVATMVSPRNDTVEVGPGSLKLSFSSASGQLERIFNSVSGVDLPIQQSFFWYSSNQGDIVDAQGSGAYVFRPNGTTPTIVSSSVRNYREDWDLEVTEPVAGNYYPACM

SEQ ID NO: 226560 - protein, 380 aa, Zea Mays
MKKGENAVFTIPPELAYGEDGSPPVIPPNATLQFDVELLSWVCIKDISKDGGILKKVVAKGDKWENPRDPDEVVVKYEARLEDGTVVSKSDGVEFTVRDGVFCPAISKAVKTMKKNEKAHLTVMPQYGFGVKGRQASGEEASVPPNATLHIDLQVVSWRTVTELGSDKKILKKILKEGEGYDCPNDCAVVRVKLIGKLEDGTLFVKKGHDGEEPFEFKTDEDQVIEGLDKAVLSMKKGEVSLVTIPPHHAFGTNETTKDLATVPPNSYVYYEMELVSFDKEKDSWDLKNVAEKIEAAAKKKEEGNVWFKIGKYARASKRYEKALSFVEYDSSFTEEEKQLSKPLQISCKLNNAACKLRLNDYKEAKELCTEKGTGTHASC

SEQ ID NO: 226561 - protein, 104 aa, Zea Mays
MRQTMSLKKKTPAAKKDNAEGQEVEAAAEETKKSNHVTRKLEKRKEGRTLDPHIEEQFGSGRLLACISSRPGQCGRADGYILEGKELEFYMKKLQRKKGKSAVA

SEQ ID NO: 226562 - protein, 874 aa, Zea Mays
MHDEAVVHYIDMIDQTTLGHRVIKKQFKKIPRAGWQIDPFGHSAVQAYLLGAELGFDSVHFARIDYQDRATRKANKGLEVIWRGSRPVGSSSQIFTNVFPVHYSAPVGFSFEVLAENVIPVQDDMSLFDYNVQERVDDFVAAAIAQANVTRTNHIMWTMGDDFNYQYAESWFRNMDKLIQYVNKDGRVHALYSTPSIYTDAKHASNESWPVKYDDYFPYADSTNAYWTGYFTSRPTFKRYIRVYSGYYLAARQIEFLMGRSSLGLFTSSLEDAMGIAQHHDAISGTAKQHTTDDYSKRIAIGASKVEKGVNAALTCLTNSNKTCVSSVPKFSQCPLLNISYCPSTEEAISATKHLVVVVYNPLGWKRSDFIRVPVNDEDLVVKSSDGNTVVSQIVVVDNVTNNLRKLYVKAYLGVTANKAPKYWLTFQASVPPMGWNSYFILKSTGSGYNNTEHVPVVVPPSNNTIEAGQGHLKMSFSSASGQLERIFNSASGGDLPIQQSFLWYRSSKGDALDPQASGAYIFRPDGNTPTIASSSVTLKVIRGPLFDEVHQQFSSWIYQITRLYKNKEHAEVEYTIGPIPVDDDVGKEVITQLTANMSTNSTFYTDSNGRDFLKRVRNYREDWNLQVTQPVAGNYYPVNLGVYIVDEKYELSVLVDRAAGASSIQDGQLEIMLHRRLLKDDGRGVAEPLDEVVCVDQDCQGLTARGTYYINVEKLGHGAHWRRTYGQQVYSPFLLAFTHEDATSSKPYSVAKDSMMDGNYSLPDNVAIVTLQNLDDGTTLLRLAHLFQAGEDPRYSEVAEVDLKKVFGKRTIKELTETNLSANQKKSEMKQLNWRVIEDAESGPAPVKGGPVDCRALVVALGPMEIRTFLLKF

SEQ ID NO: 226563 - protein, 141 aa, Zea Mays
MHSCLTLSHRFERLKGENVTLFQQFSDANQQFSTAVTDNRILKFDVEALRIKVKMAEDMVARSVVSCGLGDLGLAPYVNSRKMCQALNVLTGLDLLGSDAFSGPTAGTRVQKSPVQSTASLESLDNRKSNEVTSCAADICP

SEQ ID NO: 226564 - protein, 149 aa, Zea Mays
MLVRAVKLLKNLHFMAKPAAIDLIRSIIQAEGASTEQALSSALTSIMDALNSTDWNTRKAVSLALSSIAISSGYLVTSFRNSCLRSLECSKFDKVKPVRDTIIYMQFSCEKLFQGLILLNHEAGSSTKDNEVKICCENQKITLMVMRRM

SEQ ID NO: 226565 - protein, 149 aa, Zea Mays; identical to SEQ ID NO: 226564

SEQ ID NO: 226566 - protein, 150 aa, Zea Mays
MLVRAVKLLKNLHFMAKPAAIDLIRSIIQAEGASTEQALSSALTSIMDALNSTDWNTRKAVSLALSSIAISSGYLVTSFRNSCLRSLECSKFDKVKPVRDTIIYMQFSCEKLFQGLILLNHEAGSSTKDNEVKICCENQKITLMVMRTNP

SEQ ID NO: 226567 - protein, 161 aa, Zea Mays
MEAWSRRASGGGEARRRGPDGEWPWGMSTKCKGEGKDGRANGPTVPPVARARACLRIPRLAILARRHAKPSGRRNRSLKRQRTALAGAPCQGQRCRARVVATRDGDWTDAHRGAVGSQRNELNATTSLDRLLYLRQCPCTPIRVTGERCPWKVVWLGLFYP

SEQ ID NO: 226568 - protein, 365 aa, Zea Mays
MGQSYVTAGKHEETPEAFPLPSSVVIVRADAGWAHCVAITDEYDVYTWGWKECVPTGRVIGDQSSVGTMEKDERQMAMATDQVSPRSQVSRTSSGAAAGSSESRGTDDSTKRRKLSLAKHGPESSTSSDESLSAPPCVVTFSTGVKIVAVAAGGRHTLALSDLGQVWGWGYGGEGQLGLGSRIRTVSSPHPVPCIESALYTKDRPSAMKGNKAAEGHVSKVLGNCVRAIACGGRHSAVVTDSGALLTFGWGLYGQCGQGNTDDVLSPTCVSSILGIKMQDVAAGLWHTVCTSVDGDVYSFGGNQFGQLGTGSDQAETLPKLVDATSLENKNARSVSCGARHSAIITDEGEVFCWGWNKYGQVGAP

SEQ ID NO: 226569 - protein, 194 aa, Zea Mays
MKGNKAAEGHVSKVLGNCVRAIACGGRHSAVVTDSGALLTFGWGLYGQCGQGNTDDVLSPTCVSSILGIKMQDVAAGLWHTVCTSVDGDVYSFGGNQFGQLGTGSDQAETLPKLVDATSLENKNARSVSCGARHSAIITDEGEVFCWGWNKYGQLGLGDSMDRNVPCSVRVDAYHPLNVSCGWWHTLVLAESPA

SEQ ID NO: 226570 - protein, 260 aa, Zea Mays
MRTVECLRGRLLAERVASKAAKEDADQLTKRLDELEKKLAGEVRVRNRAERRLRRAIKKLESLKILDVELSEGSIGSLSSNGRSDHQAPEAEERNGPGSLTTRGSVLASGPSGDPDADADRESSEGSCTQVNSSSRDGSWCSVASEQSRPGSCMDLAGNTTNCGSEGSCGDHDSEREHLDASSGCGSAKSEEAFYESDDRLALSRGLVEPPPAAAGEGPRTQDNDTHAGEVRAMDHEEEEETNKLAIVLADPQPQSQGDV

SEQ ID NO: 226571 - protein, 206 aa, Zea Mays
MSYVCPYAQRAWITRNYKGLQEKIKLVPMNMADKPGWYKEVYPNNQVPSLEHNKRVIGESLDLIKYIDSNFDGPKLTITDDPERQRFAEELLGYSDAFNRAFLDALRSEGAMTTEAVAALDKIDSALLKFDDGPFFLGQLNLVDIAYAPFIEGFQIFFAGMKNCDITQGRVHIQKFIEEMNKIDACTQTKQDPQVLLALTKKKFGI

SEQ ID NO: 226572 - protein, 126 aa, Zea Mays
MLGITPPLAMVAPPNSLVSSSSLRTASWMWRGTMRVFLLSLAAFPASSRTCREVLEDGGEVHGGAGADALSVLARLEEPSNPADGELESGLGAPRRCLLRGASADSLATARHPFSRPDDEEEAACA

SEQ ID NO: 226573 - protein, 570 aa, Zea Mays
MGGNWSGKESGGRACPPPARPAANPKFEPAASTDYYPTIQNPTPASAVISSPRQSATISSSDRPRNPSPQTIPLATAMPDLPCDGDGVCMVCRVASPPEVDLLTCSTCTTPWHSPCLSKPPALADAASWSCPDCSPDSAAVAAPSGPANTLVAAIRAIEADHTLSDQEKARRRQALLTGDAPDGADDDDDEASDDALEIVGKNFSCVFCMKLPERPVTTPCGHNFCLKCFQKWIQNQKRTCGKCRAQIPAKMAEQPRINSALVEVIRMAKISKNPNSAGSAVPYHYLRNDDRPDKAFTTDRAKRAGKANASSGQIFVTIAPDHFGPILAENDPRRNMGVRVGETWEDRLECRQWGAHFPHVAGIAGQSTHGAQSVALSGGYEDDEDHGEWFLYTGSGGRDLSGNKRTNKEQSSDQKFEKLNAALRISCLKGYPVRVVRSHKEKRSSYAPESGVRYDGVYRIEKCWRKIGIQGKFKVCRYLFVRCDNEPAPWTSDDHGDRPRPLPKIKELQGATDITERKGRPSWDYDSAGSLFYLGILRPTSKSVEQQSVFICLLLKGCLKNLLVRYAGR

SEQ ID NO: 226574 - protein, 214 aa, Zea Mays
MGEVSDDNSNMSFLKRIATSDVPLLKEYGVNGVVVALLLAVVTPVLLSMMFGKKTKQRAVRADVGGEEGFAMRNNRFSSLVEVPWEGATTMSALFEMASKKYSRQRCLGTRKLIKREFMESSDGRKFEKLHLGEYEWDTYTEAFNRACNFSSGLIKMGHDLDSHAAIFSDTRAEWIIAAQGCFRQNLTVVTIYASLGEDALVHSLNETGFNSDM

SEQ ID NO: 226575 - protein, 362 aa, Zea Mays
MMFGKKTKQRAVRADVGGEEGFAMRNNRFSSLVEVPWEGATTMSALFEMASKKYSRQRCLGTRKLIKREFMESSDGRKFEKLHLGEYEWDTYTEAFNRACNFSSGLIKMGHDLDSHAAIFSDTRAEWIIAAQGCFRQNLTVVTIYASLGEDALVHSLNETQVSTLICDSKQLKKIPAISYKLQSLRRIIYIEDEPVEAETLNQVKHLTTLSFTEVEELGKTSHVDARLPSGSDTAVIMYTSGSTGLPKGVMITHGNMVATTAAVMTIVPNLGMNDVYLAYLPLAHVFELAGETVMLASGSAIGYGSALTMTDTSNKIKKGTKGDVSVLNPTLMISVPAILDRIKDAVFKKVGEKGGLTKKLS

SEQ ID NO: 226576 - protein, 571 aa, Zea Mays
MPKTPPVNASKNTEPQKQSAPNLTITNGHTSTKVVVKKEHPINDVKHISTWVCKNLACKAVRPAEDSFCKRCSCCICHKFDDNKDPSQWLVCSSDNDSKNCCGSSCHIECAFREKRAGCFDLEQIIHLDGSYSCASCGKISGILGLLEGTVHFKELHEIIEDAKAKLESEVGPLDGMSAKNAHGIVSRFSAGIAVQKLCSTAIQRADEWLSSPDLHLRDSLPVACRFKFVDITSSSLIVILKETSSSDTIKGYKLWYWKSREQPSMEKPVIVSKDERKILLYDLTPCTEYSFRVISFTDDGVLGHSESRCRTESREIFVMRAPKNAVGGGATHAQKKDRNQSCKSTGFKIRDIWKNFQEALDAEGCFEGFSEDVHEGSCSRSVTETELSGACRKLHFNSSSVPDLNAEVPVPVDYTENHYYSKKGLVRSNDSGDSETCAVGQTAEPPAVESRQVSKVNSVPVNKCEQNGASAICHEKMLSGSTRQLDGDYEHCVKVVRQLECDGHIENGFRMKFLTWYSLRSTDQERKAVSTFVRTLSNEPSSLAEQLVDSFGEILNSKKAKTGFCSKLWH

SEQ ID NO: 226577 - protein, 746 aa, Zea Mays
MIDMVSAVEELSGLSSKELNEMLKESDNFVLQSKAEGGGPKQTLVDMEKLVSSLPLHLIAVCLELRQGPDLTYVLRGMRFLHSLSDLASRHTRLEQVLLDDVKLSEQVMDLIFFLLSILAEQKKENNVGASPLVHASLVAASLHLLTSYFSSQWHELVHILLAHPKVDIFVDVAFDSLHEDVRLLNIRLSSMDFGIFPVGSLESRLAHFICQQCEASLQFLLLLCQQKLFRDRILRNKELSRNGGILSLSHTILKLAVPECLKQSTDLVASISRLKAKILSILLQLCEAESVSYLDEVATNSNSMRLGQTLALEVLNLLKIAFGKKKYITSDSHDKVKIYPMGSMLISALRLVDVFSDDSNFRSSFLTNTVPFLTQILATPHGEFVSSWCSVNLPAIEEDASLDYDPFVASEVALLASNNVLTEAKADYSCPFRPSLPSVAYAQTRTSCVVKIIANLHVFIPNICEEQERDLFLQNFQKYLVSGSSKLSADQPASSDFDATKVCRNLGSLSDYAKTLVPNLLNGEDLLLLSDFSDKLQSWCKSQVAVKVVQNDIPPESMEDMHPMQQPLPTRASTPDSKMNNFPKDVQNMEVSAPIPPINREGNDKDETPKNTVSRNGGFLQNAVGQDLVHLGVARTASGGSSAVTSVVSTGHQRSKMDLDPASGSVDNFKTPELTKENGLQGDDKGESSVYDERQPKRRKRNIMNSEQIDELEKALVDEPEMHRNPVLLQGWSEKLSLQAEQSES

SEQ ID NO: 226578 - protein, 667 aa, Zea Mays
MVAIVGFGDRWRLRLSHEIIFQAVWNLLSILRTGDREAYRQFFLDAMVAVEDTPGPFSELPASCRPKNGPGVLVDLTGDARWRPFATSLIKLVNKCLTDGTLYVDGLVTMPFVSAACSILCYGDGSLHKVCFDFARIVATVMTPEILPLESIIRSITCILSQEISELSDIRDADYDFSMGACLCALHSSCPDYIVESTAADIVNVLKRAVKTSKSAELQVALYTAYKRIIELCSVQVWKPEILLKLLSLPKPCSKLIQCIRAVIGKFGQTFFTLDDGNSQSSPQARSEKNELQKAGHKRIPQNEESNSAKRQKITESGFSAATGFEKEDYGYAFLQSLNSLINCLSPDNHESYPLDPDVAIEVISLLCISLCVYPKTSLFTRVSKQVLSWISWIHKQTVQRNLYSFDASLYFEALHTVMLLQFNLPGHTKLLEDDYQLIGDGTHFVNPIYADLISMLKLIWDVGHDVTETSSNYKIEYLLMQVFAKLGNRLNSGCDLEFFDLAICNGTAEIKNEAIISLPIIVLYSGPRILGAMFKKLESVDALGLENVGKHIAFSLGFLSCLNGTTYYTDNVGKGNHCKLFLDKHYEQPVSTLDLLLRGFCCPQCDIRNRTIHNEEQISIVNIAPLQVENADFNINISKAHTLLFKFLYAGTSEEFIVSLVEASST

SEQ ID NO: 226579 - protein, 249 aa, Zea Mays
MLLQFNLPGHTKLLEDDYQLIGDGTHFVNPIYADLISMLKLIWDVGHDVTETSSNYKIEYLLMQVFAKLGNRLNSGCDLEFFDLAICNGTAEIKNEAIISLPIIVLYSGPRILGAMFKKLESVDALGLENVGKHIAFSLGFLSCLNGTTYYTDNVGKGNHCKLFLDKHYEQPVSTLDLLLRGFCCPQCDIRNRTIHNEEQISIVNIAPLQVENADFNINISKAHTLLFKFLYAGTSEEFIVSLVEASST

SEQ ID NO: 226580 - protein, 402 aa, Zea Mays
MLVKHLEHKNVLKQPDMNLDIIEVTSRLAGHSKAQSSTALMASISDMVRHMGKSMQSLASDAGPGDNMVKWNSRYGKAVDECLVQLSRKVGDAGPILDTLAVVLENISSSMIVARSTIFAAYRTAQIVASLPNLSHQSKAFPEALFHQLLLAMVYPDCGTHLGAHRIFSVVLVPSAVAPCSFSDTSRTRKIDLRRTLSRTTSVFSSSAALFGKLKRDMLSFRESPLHDNTKLLPISEDADEISANDAKLFKSQTIQRMASTKDISLPSSTDASTLSEQTPNQEKDAVTLMLSVRQANLLLSSLWTQALSPENVPRNYEAISHTYSLMLLFSRAKGSGADVLVGSFQLAFSLRSVSLQAGFLPPSRRRSLFTLATSMLVFFSKAFNVPALIPVVKHVLTESTV

SEQ ID NO: 226581 - protein, 183 aa, Zea Mays
MDYDSHMQSTVKVEDAKPEDVLPVTDGVQKVEKEKLKNARDGSDKRTKDSLLRRLSAPRTPLNDAQKRAQNLRAYKADLQKLKKEQEEEQIKRLERLKLDRQKWIAARGNGKGPGNDAPRANGMNGLSKSVPTFTGMKRVENGTTESLSGRLKRLSEPKSIVGAEHSLNPKSAGAGRSRRSMA

SEQ ID NO: 226582 - protein, 553 aa, Zea Mays
MPNTIHPLIGGPANYDPNSATAIVVYKPGSNSIPPMQNETTAQEENSKKACSHFIELWKQKHETGQWIEVEPEAISTRSEFPPFNASGIVLMGDNMKQNLESGSINGEPNGEDGAKADQKSSQQMGSHAAYPPWAMHPASGAVLYPPYPMQGMPFYPGVNPYYPPYPPVDDPSSGGGNSHGHKSHRKGKRSGKKPSVVVIKNVNVTSKKCGSSESESQSSSEVESADSDNSHSKSRERKHKSSCSKEGRRTTFDPGDEYNKDETSNGHGVEQGNWSAFQNFLLRAEEKTRSSDADLFAGEKEPPSRRKQNVNTADPIILVERDGGNVCEQNKIGFDSANGRTRVIRVMSNDELVMSGEGRIYMDCEMKEIEAGGGRYRRGTGDDYMVYGQGCQIDRHCLLDPLAEAQYKNPVQQDNNRNGVTDESFMIPLRSSSQDNIGAESRTTMDIDVELPSSIHKASDKKAGHQLFYEPDELSTVKVEDAKPEDVLPVTDGVQKVEKEKLKNARDGSDKRTKDSLLRRLSAPRTPLNDAQKRAQNLRAYKADLQKLKKEQ

SEQ ID NO: 226583 - protein, 54 aa, Zea Mays
MTPVGSFRLLLWPLHPQPPNQPILHSWPERRLDGFLASLSGSPLSSPSTSSSRV

SEQ ID NO: 226584 - protein, 502 aa, Zea Mays
MPPPFQGNLPPYQSGTSLQSWNSAPMPSSANGTGLTMPPMYWPGYYTPPTGFSHLQPPLFLRPPHSLAVPQVLQLPVQYPGLGSLPAGFPNMPELPSFLQPGNSNSLNQTSGVPTSVSTPASLSTSQTESSRSQLPNKFSSDSASVFSVGFTPPSVTPSVSTVEPSIPVSAVLPSLVNSKPVALPDSTMPSLSTAKPVIVPDASVLTYLSSQPPSANDVSPVNAAEQVPLVTPGQLLSTTSSTIISSHALQTASAVDLSSKAAPSTVPSSQATLFEGSTTQVASSSILSQQVAMTNESKVAKQREWKAKQTVVGRPGNKEPLLPEPKSVFQKPVGVSSYVRYNSRGRGRGRGRGQSHPITKFTEDFDFMAMNEKFNKDEVWGHLGKRIGQLNDEPNGYEDDVIEDDEISPRKPEAKAVYVKDDFFDSLSCNQIDNGGRNGRVKFSEQRKIDTETFGDSARHRPMGIRGRGPRGGARGRGYYGIRGYGYTGRGRGYSYPNHQP

SEQ ID NO: 226585 - protein, 57 aa, Zea Mays
MPELVSPDRPALYCPMTFDDYRMYIRRKGPRGKSQVDSLKVADAVDADADADGRRCY

SEQ ID NO: 226586 - protein, 585 aa, Zea Mays
MQFEFIKDMPRVAQQEFPIDISFLVGKLVFVWMIMLYFPVILSNLVYEKEQKLRTIMKMHGLGDMAYWIISYCYFLLLSLLYMLFLVSFGSIFGIKLFRLSDYRVQFVVYFAYINLQVSFAFLMATFFSNCRTASGSWSTLMELFPPFCLYRIIYEFSPPPSPLYRTDFSGVHWEDLSDHKNGMLDILIIMAVEWATFLLLTFFVDEFGTFRNGIRKTVSIFRSNTDQSSHTCQMQTIQLEEFLPSVETDRTDVSRERETVQQLLRESDSNFSVICDNLKKVYHGKDGNAEKIAVAGLSLSVQRGQCFGILGPNGAGKTSLISMLTGFTKPTSGTAYIDGMDIRLDMNKIYTGIGVCPQFDLLWETLTGREHLMFYGRLKNLRGGALDVAVEHSLRSVRLFDGGIADKRVAKYSGGMKRRLSVAISLIGDPKVVYMDEPSSGLDPASRRALWNAVMSAKENRAIVLTTHSMEEAEALCDRIGIMVNGSLQCIGNSKEVRRHVHAHRNSCGGRGGGGGAACPVALPRGERSVPHLRDAEVRDAEAGAEDQRGVPGHGACQELAEHRCLGPVRCNAGRYLHQSRKRE

SEQ ID NO: 226587 - protein, 232 aa, Zea Mays
MQTQNQHLLQQLTDRDDFNIKLVSDSVKMKQACSSLLSDKLMLEKQLQQVNTSLESSKLKIARGEEQMKTCVAQAIKTSAENRHLTISLERIALELSNTDKELKWLRSSVGSSEKEYEQTQQKISELRALLEHERSERRRLEEQYEEVKNEVMELTSETEETTVRKLEDEIKECKGILKCGVCFDRPKEVVITKCFHLFCSLCIQRNLEIRHRKCPGCGTPFGQNDVREVKI

SEQ ID NO: 226588 - protein, 872 aa, Zea Mays
MSSDRVNAYGGSRRDVYGFIPMQKLRRNNSTWRFGNILIVLAMNMDSTALQYENQKLVQQLEVQKSEMHALERKFKELSDDQCSYDKTLISLNKLWNQLIDDLVLLGVRAGGDLDNLQALDHEELSEESLESCPSEEIFLLRLLKTNNIRDNSDTSLLKFVEEALAFRSSATVTLMKSLQETISSQQARNVIVALRNHNDCLKEVAENASQAISIINEKHKRYLDEIEAFKSNHSRELQEIKRISGELEESIAELEESQRKLVVLQLQRHGSVMDASGANAVNGGISTHKSSDKSMSWQDLKDAVDAAKTLAGNRLLELHQTQEDNLILSKELGDLEGQLKDEKYVLVSKPYMILNDKLQHLNAEIERYRGLVEVLQNDKDQLMQREKEISAKAESLDSVKQTIITYEKKIEELETQIQILFSEKNDLETKVEETLQDSGKKDFKNEIHVMAAALSNELGMMENQLSRSKDAASEALALREQAESLRSLVAKKIEEHKKISDKYNSQVIEIKSLKALVEELEQEKQELEFIADMYVKESSESRTIADIEESETRARNQAEYLRSNLEEHSLELRVKAANEAEAACQQRLSFAEVELEELRTKVDASERDVVELKEAIRIKEAEGDAYISDIETVGQAYEDMQTQNQHLLQQLTDRDDFNIKLVSDSVKMKQACSSLLSDKLMLEKQLQQVNTSLESSKLKIARGEEQMKTCVAQAIKTSAENRHLTISLERIALELSNTDKELKWLRSSVGSSEKEYEQTQQKISELRALLEHERSERRRLEEQYEEVKNEVMELTSETEETTVRKLEDEIKECKGILKCGVCFDRPKEVVITKCFHLFCSLCIQRNLEIRHRKCPGCGTPFGQNDVREVKI

SEQ ID NO: 226589 - protein, 492 aa, Zea Mays
MDSTALQYENQKLVQQLEVQKSEMHALERKFKELSDDQCSYDKTLISLNKLWNQLIDDLVLLGVRAGGDLDNLQALDHEELSEESLESCPSEEIFLLRLLKTNNIRDNSDTSLLKFVEEALAFRSSATVTLMKSLQETISSQQARNVIVALRNHNDCLKEVAENASQAISIINEKHKRYLDEIEAFKSNHSRELQEIKRISGELEESIAELEESQRKLVVLQLQRHGSVMDASGANAVNGGISTHKSSDKSMSWQDLKDAVDAAKTLAGNRLLELHQTQEDNLILSKELGDLEGQLKDEKYVLVSKPYMILNDKLQHLNAEIERYRGLVEVLQNDKDQLMQREKEISAKAESLDSVKQTIITYEKKIEELETQIQILFSEKNDLETKVEETLQDSGKKDFKNEIHVMAAALSNELGMMENQLSRSKDAASEALALREQAESLRSLVAKKIEEHKKISDKYNSQVIEIKSLKALVCCPNNFCLLKGGAKLLIA

SEQ ID NO: 226590 - protein, 277 aa, Zea Mays
MLVSESTAIPSSLSCSLELDPLLRDLVEKKLSLKRNVTAMATELRDARNRLASQELLLAQEIEARKVAELKTRNLEDEVSKLQKCLGDKDEQLRASLCSADQFRNELDGFRSQLPVMTTLLHCSYLLGKLNDRNNSMSEGEFPVNNLAEQLNHLEKCLESRDPTLRQFKDCYSLRTESDITDAFARVAFDNDDGVAKPGEDIRALSAHWVNRSKELESQLDQHRRTAQELKRRLRNQMAVQQPTCSGSGEKRNLWESSAFKLIASVSMLVLFTLANR

SEQ ID NO: 226591 - protein, 266 aa, Zea Mays
MMDLRKYDGALGLLNAVLEIDPNHSEAYRQRASVLRHKCRYEEAERDYNKHLELSPGSASVVKELSQLLQAQNSLQSAYGQFDSGDFSKVVEYINKIVLVFSPGCLKAKLLKAKALLALKDYSSVISETGFILKEDEDNLDALLLRGRAYYYLADHDVASRHYQKGLRLDPEHSELKKAYFGLKNLLKKTKSAEDNAAKGKLRVSVEDYKAALAMDPDHTAYNVHLYLGLCKTLVRLGRSKEAISTCTEALIIDSELVDALTQEVT

SEQ ID NO: 226592 - protein, 141 aa, Zea Mays
MMRQSCSKDWMISIPLLPIRLGSPSPLCPTGTKQPMELEQPMDDFHSPAANSPNCFDPSTQSACTQPIVAANSDWVRKPEGRGAWLTQNGRQDTAGGSLQPHAWWPVWEGAHCSSSDDFRNFSGQVVGREGSKESKQERSR

SEQ ID NO: 226593 - protein, 210 aa, Zea Mays
MMRQSCSKDWMISIPLLPIRLGSPSPLCPTGTKQPMELEQPMDDFHSPAANSPNCFDPSTQSACTQPIVAANSDWVRKPEGRGAWLTQNGRQDTAGGSLQPHAWWPVWEGAHCSSSDDFRNFSGQGHDEISVCYLASFTTKIILHNRFRQQKLMEFAEMPFQACSICATRVRMDLIGHLTIQHGSYFKISFFNYAVVADHLHFYIFHIIL

SEQ ID NO: 226594 - protein, 210 aa, Zea Mays; identical to SEQ ID NO: 226593

SEQ ID NO: 226595 - protein, 208 aa, Zea Mays
MFLPRRRSTRFGLRVVIKVLPPPHLLLAAVRLSADDVRAPAVPAWTGRAISYSFSTAFLMARNRAGADGDDRRRAEAAGKGQRRPRPKDQFPVGMRVLAVDDDPTCLKVLENLLFRCQYHGTSPDNNGPGSHCPELLREKKDQFDPVISNVHMPDMDGFKLLELVGLEMDLPGISKLSLAHSCSCLYCSCSRPMISKFWHCLKNHHCE

SEQ ID NO: 226596 - protein, 1010 aa, Zea Mays
MASAEARRLAVVPQLDIEQILKEAQHRWLRPAEICEILKNYRNFRIAPEPPNRPPMLRYFRKDGHNWRKKNDQKTVKEAHERLKSGSIDVLHCYYAHGEENINFQRRTYWMLEEDYMHIVLVHYLETKGGKSSRARGNNMIQEAAVDSPLSQLPSQTMEGESSLSGQASEYEEAESDIYSGGAGHDSFTWVQQHENGTGPMIASSVFSSYTPALSIGNYHGLHATQNTSFYPVNQLNSPVILNGSSAMLGTNGCANQTDLPSWNSVIELDHEPVQMPDLQFPVPPDQGTSTEGLGVDYLTFDEVYSDGLSLQDIGATGTHGESYLQFSSGTGDLAATVNSFPQENDGSLEAAIGYPFLKTQSSNLSDILKDSFKKTDSFTRWMSKELPEVEDSQIQSSSGAFWSSEEANNIIEASNHEALDQFTVSPMLSQDQLFSIVDFSPNWTYVGSKTKILVAGNILNDSQITERSKWSCMFGEVEVPANILADGTLICYSPQHKPGRVPFYITCSNRLACSEVREFEFRPTVSQYMDAPSPHGETNKVYFQIRLDKLLSLGPDEYQATVSNPTLEMVDLSRKISSLMASNDEWSNLLKLAVDNEPSTADQQDQFAENLIKGKLHIWLLNKVGMGGKGPSVLDDEGQGVLHLAAALGYDWAIRPTLAAGVNINFRDIHGWTALHWAAFCGRESTVVALIALGAAPGALTDPTPDFPGSTPADLASSNGQKGISGFLAECSLTSHLQVLNLKEANMAQISGLPGIGDVTERDSLQPPSGDSLGPVRNATQAAARIYQVFRVQSFQRKQAAQYEDKGGMSDERALSLLSVKPPKSGQLDPLHSAATRIQNKFRGWKGRKEFLLIRQRIVKIQAHVRGHQVRKHYRKIVWSVGIVEKVILRWRRRGAGLRGFRSQEGSVESSSGGTSSSSIQNKSSGDDYDFLQEGRKQTEERLQKALARVKSMAQYPEARDQYQRIFTVVSKMQESQAMQEKMPEESAEMDMSEFKELWDDDAPIPGYF

SEQ ID NO: 226597 - protein, 559 aa, Zea Mays
MASAEARRLAVVPQLDIEQILKEAQHRWLRPAEICEILKNYRNFRIAPEPPNRPPSGSLFLFDRKVLRYFRKDGHNWRKKNDQKTVKEAHERLKSGSIDVLHCYYAHGEENINFQRRTYWMLEEDYMHIVLVHYLETKGGKSSRARGNNMIQEAAVDSPLSQLPSQTMEGESSLSGQASEYEEAESDIYSGGAGHDSFTWVQQHENGTGPMIASSVFSSYTPALSIGNYHGLHATQNTSFYPVNQLNSPVILNGSSAMLGTNGCANQTDLPSWNSVIELDHEPVQMPDLQFPVPPDQGTSTEGLGVDYLTFDEVYSDGLSLQDIGATGTHGESYLQFSSGTGDLAATVNSFPQENDGSLEAAIGYPFLKTQSSNLSDILKDSFKKTDSFTRWMSKELPEVEDSQIQSSSGAFWSSEEANNIIEASNHEALDQFTVSPMLSQDQLFSIVDFSPNWTYVGSKTKILVAGNILNDSQITERSKWSCMFGEVEVPANILADGWPAVKCESLNFDQLSPSTWMLLVHMVKQTKFISRYALTSCYPLDRMSTRQLYLILLWRWLT

SEQ ID NO: 226598 - protein, 324 aa, Zea Mays
MWCLAGAAGLKDSGNQAIMKFPETDSVSNQREHLILLLANIHIRRNPKTDQQSKLDDNALNDVMKRLFKNYKKWCKYLGRKSSLWLPTIQQEMQQRKLLYMGLYLLIWGEAANLRFMPECICYIYHHMAFEMYGMLAGNVSALTGEYVKPAYGGEKEAFLKKVVTPIYHTIAKEAERSKREKGNHSEWRNYDDLNEYFWSADCFRLGWPMRADADFFCQPDERNESTRISKQKGKVNFVELRSFWHIFRSFDRLWSFFILALQVMIILAWDGGSLASIFDYAVFKKVLSIFITSAILNLGQATLDIIFNWKARRTMEFAVKLRY

SEQ ID NO: 226599 - protein, 431 aa, Zea Mays
MHGKYRPSIIAITRNIFKHSRMLLTNWIAYQTAAILFEVLKAVTQQHAVEVDHEILEAADKVKEKTKIYLPFNILPLDPDSGNQAIMKFPEIQAAASALRNTRGLPWPKTYEHKVNEDLLDWLQAMFGFQTDSVSNQREHLILLLANIHIRRNPKTDQQSKLDDNALNDVMKRLFKNYKKWCKYLGRKSSLWLPTIQQEMQQRKLLYMGLYLLIWGEAANLRFMPECICYIYHHMAFEMYGMLAGNVSALTGEYVKPAYGGEKEAFLKKVVTPIYHTIAKEAERSKREKGNHSEWRNYDDLNEYFWSADCFRLGWPMRADADFFCQPDERNESTRISKQKGKVNFVELRSFWHIFRSFDRLWSFFILALQVMIILAWDGGSLASIFDYAVFKKVLSIFITSAILNLGQATLDIIFNWKARRTMEFAVKLRY

SEQ ID NO: 226600 - protein, 751 aa, Zea Mays
MATPTANRRWGEGDTEAGNGSRSGGRWGEETNKAARCAGRHVDAMRGRGVDVVTTRHPPLLPARTAMAPPPPQCASKRPSAPAPALQVGDMAEEASPSPSPPKLLYIAIADGGVRRAFRYTRPVLQSTLHLMGCKPRHAFKISKRVFNVMKSEFLATSKSDGATKQENYPAFGLGDGTDTPKMLERSNSSVPFELYKNQTTVVVSREEFVSVVCDALSLYKYVGPNQKADLLLACRIKERKESVAILLCGTSGCGKSTLSSLLGSRLGITTVVSTDSIRHMMRSFADEKQSPLLYASTYHAVVSHPNTSGDKDVTSGDKSQHGSSELPPRAELIGNKQMAVEGYKAQSEMVIDSLDRLITSWEEQKESVIVEGVHLSLNFVMGLMKKHPSIIPFMVYITNEDKHMERFAVRAKYMTLDPAKNRYIKYIRNIRAIQEYLCNRADKHLVPKINNTNVDQSVAAIHATVFSCLRRRAAGEQLYDLNTNTVAVVDEEYRNQRAANTLGSKGMFQLIQRKGSSRNLMALLNTDGSVTKAWHVSASDGNGNLNGITNNKKSPENPMLDPSQIGKAEAVNLQFGPFGISAWMSDTGGTSHTGSVEDLRPDSVETGGRNYSSCCSSPKMSDSTSKELMEDYSVYGSDEEADDPRDAETDDDLTDEERDMHEIDAGSVDEHSTKSDEEYEDLAMRDVMENGDWSDDDQAVGKTKNSPALESIHGSGAAEDDGIKSRYHHNLDLFLKMSKEVAGTRMPCAS

SEQ ID NO: 226601 - protein, 599 aa, Zea Mays
MAEEASPSPSPPKLLYIAIADGGVRRAFRYTRPVLQSTLHLMGCKPRHAFKISKRVFNVMKSEFLATSKSDGATKQENYPAFGLGDGTDTPKMLERSNSSVPFELYKNQTTVVVSREEFVSVVCDALSLYKYVGPNQKADLLLACRIKERKESVAILLCGTSGCGKSTLSSLLGSRLGITTVVSTDSIRHMMRSFADEKQSPLLYASTYHAGEYLDPIAVAQAKAKRNANKPTVVSHPNTSGDKDVTSGDKSQHGSSELPPRAELIGNKQMAVEGYKAQSEMVIDSLDRLITSWEEQKESVIVEGVHLSLNFVMGLMKKHPSIIPFMVYITNEDKHMERFAVRAKYMTLDPAKNRYIKYIRNIRAIQEYLCNRADKHLVPKINNTNVDQSVAAIHATVFSCLRRRAAGEQLYDLNTNTVAVVDEEYRNQRAANTLGSKGMFQLIQRKGSSRNLMALLNTDGSVTKAWHVSASDGNGNLNGITNNKKSPENPMLDPSQIGKAEAVNLQFGPFGISAWMSDTGGTSHTGSVEDLRPDSVETGGRNYSSCCSSPKMSDSTSKELMEDYSVYGSDEEADDPRDAETDDDLTDEERDMHEMQAL

SEQ ID NO: 226602 - protein, 198 aa, Zea Mays
MESRNVVVCDNGTGYVKCGFAGENFPTSVFPCVVGRPLLRYEESLQEQELTDIVVGAACADLRHQLDVSYPVTNGIVQNWDDMGHIWDHAFYSELKVPVVDGYSYPHLTKRMNVAGRHITSYLVDLLSRRGYAMNKSADFETVREIKEKLCYISYDYKREYQLGLETTILVKSYTMLKVMGWRIWHSVAFRKWILTTG

SEQ ID NO: 226603 - protein, 198 aa, Zea Mays
MHPVAARGAPHWLRGLLSEEFFDACAAHPGERKNDKNHFCVDCAAPLCRHCLPHEHVHDVLQIWKYASCFVVRIDDLKLFDCTGIQSHTVSDHEVVFLNERTARKRSTSAENPCAACARPLLPGHDYCSLFCKVKHLGESEHELRRALRVSRQEVAPTPEPQTGRKRSSSSSDAGPSCSGSFRKRSRKQAEPAQAPFH

SEQ ID NO: 226604 - protein, 682 aa, Zea Mays
MLLFCTLPAYDFTSSDLKHYNMVLQYNPDESNVLRVPRLMNLASSAYLRLRGNDTNMRFVFVKDMPRDGHPMKAPDMSFIVGKMVFVWIIMLLFPVILSSLVYEKQQKLRAMMKMHGLGDMAYWTISYCYFLVISLLYMFLLVVFGAVVDIKLFAVNSYVLQFLLYFIYMNLQISFAFLMTTYFSTSATATVTGYLYVIGSGLIGEYLFRPFVEDTSVSRSLITLMEFFPPMSLYRIIYELSPPPSPSGPFSDFSGVRVGDLSDPENGILVLMVVMVLEWPTFLFLTLYLDGFGWLQTRVRKLPPAAAASSHQTLQKPSTTRPQERPEASIEIDGTTDIPGEVARACAEREIVDRFLQQPDQSYAVIVDNVRKVYPPRDGNAEVVAVNGFSLSIKRGQCFGLLGSNGAGKTSLIGMLTGFTKPTSGTAYIDGMDIRTDMSEIYTRIGVCPQFNLLWETLTGREHLMFYGRLKRLNGAALTEAAEQSMKVLKIFEGGVADTLVSQYSGGMKRRLSVAISLIGDPKVVYLDEPSTGLDPASRSALWDAVKLAKKDKAIILTTHSMEEAEALCDRIGITAHGRLRCTGTSKELKAKYGGTFVFTVTTAAAGEDEAVERLVRGSISPDAKRTYHIAGTQKFELPKQGVRIAEVFRAMEQAKRSLSIAAWGLVDTTLEDVFIKVAAC

SEQ ID NO: 226605 - protein, 502 aa, Zea Mays
MAAGTFYLPRAVTGYLYVIGSGLIGEYLFRPFVEDTSVSRSLITLMEFFPPMSLYRIIYELSPPPSPSGPFSDFSGVRVGDLSDPENGILVLMVVMVLEWPTFLFLTLYLDGFGWLQTRVRKLPPAAAASSHQTLQKPSTTRPQERPEASIEIDGTTDIPGEVARACAEREIVDRFLQQPDQSYAVIVDNVRKVYPPRDGNAEVVAVNGFSLSIKRGQCFGLLGSNGAGKTSLIGMLTGFTKPTSGTAYIDGMDIRTDMSEIYTRIGVCPQFNLLWETLTGREHLMFYGRLKRLNGAALTEAAEQSMKVLKIFEGGVADTLVSQYSGGMKRRLSVAISLIGDPKVVYLDEPSTGLDPASRSALWDAVKLAKKDKAIILTTHSMEEAEALCDRIGITAHGRLRCTGTSKELKAKYGGTFVFTVTTAAAGEDEAVERLVRGSISPDAKRTYHIAGTQKFELPKQGVRIAEVFRAMEQAKRSLSIAAWGLVDTTLEDVFIKVAAC

SEQ ID NO: 226606 - protein, 509 aa, Zea Mays
MAAGTFYLPRAVTGYLYVIGSGLIGEYLFRPFVEDTSVSRSLITLMEFFPPMSLYRIIYELSPPPSPSGPFSDFSGVRVGDLSDPENGILVLMVVMVLEWPTFLFLTLYLDGFGWLQTRVRKLPPAAAASSHQTLQKPSTTRPQERPEASIEIDGTTDIPGEVARACAEREIVDRFLQQPDQSYAVIVDNVRKVYPPRDGNAEVVAVNGFSLSIKRGQCFGLLGSNGAGKTSLIGMVWYGMVMLTGFTKPTSGTAYIDGMDIRTDMSEIYTRIGVCPQFNLLWETLTGREHLMFYGRLKRLNGAALTEAAEQSMKVLKIFEGGVADTLVSQYSGGMKRRLSVAISLIGDPKVVYLDEPSTGLDPASRSALWDAVKLAKKDKAIILTTHSMEEAEALCDRIGITAHGRLRCTGTSKELKAKYGGTFVFTVTTAAAGEDEAVERLVRGSISPDAKRTYHIAGTQKFELPKQGVRIAEVFRAMEQAKRSLSIAAWGLVDTTLEDVFIKVAAC

SEQ ID NO: 226607 - protein, 695 aa, Zea Mays
MLLFCTLPAYDFTSSDLKHYNMVLQYNPDESNVLRVPRLMNLASSAYLRLRGNDTNMRFVFVKDMPRDGHPMKAPDMSFIVGKMVFVWIIMLLFPVILSSLVYEKQQKLRAMMKMHGLGDMAYWTISYCYFLVISLLYMFLLVVFGAVVDIKLFAVNSYVLQFLLYFIYMNLQISFAFLMTTYFSTSATATEKMAAGTFYLPRAVTGYLYVIGSGLIGEYLFRPFVEDTSVSRSLITLMEFFPPMSLYRIIYELSPPPSPSGPFSDFSGVRVGDLSDPENGILVLMVVMVLEWPTFLFLTLYLDGFGWLQTRVRKLPPAAAASSHQTLQKPSTTRPQERPEASIEIDGTTDIPGEVARACAEREIVDRFLQQPDQSYAVIVDNVRKVYPPRDGNAEVVAVNGFSLSIKRGQCFGLLGSNGAGKTSLIGMLTGFTKPTSGTAYIDGMDIRTDMSEIYTRIGVCPQFNLLWETLTGREHLMFYGRLKRLNGAALTEAAEQSMKVLKIFEGGVADTLVSQYSGGMKRRLSVAISLIGDPKVVYLDEPSTGLDPASRSALWDAVKLAKKDKAIILTTHSMEEAEALCDRIGITAHGRLRCTGTSKELKAKYGGTFVFTVTTAAAGEDEAVERLVRGSISPDAKRTYHIAGTQKFELPKQGVRIAEVFRAMEQAKRSLSIAAWGLVDTTLEDVFIKVAAC

SEQ ID NO: 226608 - protein, 826 aa, Zea Mays
MVYLTSTQSRHPLHPWPLTHVGHGSCCMHLLNHLTNTASLCFISPHTTTGANAVMAALLAILMHLLVPALLLMRVVAVVAAGAPPFSCGGGPSLGLPFCNTKLPAAQRAADLVSRMTPAEKASQLGDVANGVPRLGVPSYKWWNEALHGVAISGKGIHMDRGAVRSATSFPQVLLTAASFNDNLWFRIGQATGKEARAFYNIGQAEGLTMWSPNVNIFRDPRWGRGQETPGEDPAVASRYAAAFVRGLQGSSSNTKSVPPVLLTSACCKHATAYDLEDWKGVTRYSFRATVTVQDLADTFNPPFRSCVVDGKASCVMCAYTSVNGVPSCANADLLTKTFRGSWGLDGRYVAADCDAVSIMRNSQFYRPTAEDTVATTLKADCGPYVQQHAMAAIQKGKLTQQDVDKAVKNLFTTRMRLGHFDGDPKAHVYGNLGAAHICTQEHKNLALEAALDGIVLLKNSAGVLPLKRGSVASAAVIGHNANDVLALLGNYWGPPCAPTTPLQGIQGYVKNVRFLAGCHKAACNVAATPQAAALASTSDSVILFMGLSQEQESEGKDRTTLLLPGNQQSLITAVANAAKRPVILVLLTGGPVDITFAQANPKIGAILWAGYPGQAGGLAIAKVLFGEKNPSGRLPVTWYPEEFTKVPMTDMRMRSAGSYPGRSYRFYKGKTIYKFGYGLSYSKFSHRVVTARNNPAHNTTLLLAAGHAATTEDNLSYHVDHIGDELCRQLKFLAVVKVQNHGPMDGKHTALMFLRWPNATDGRPARQLVGFQSQHIKAGEKAHLRFEVSPCEDFSRVRDDGRKVIDKGSHFLKVGKHELEISFGA

SEQ ID NO: 226609 - protein, 783 aa, Zea Mays
MGALDMAMRLYDGQTQGVVDLPRTVDSIRDAIMPYLVELLLSYISYVFEYISIALPNHTGKGGESGVLIEADRSLLTQRDEQYARVGGVAVEYCVHIGRNDILFDTVFSKFAAAESGGMFLEVLEPYILKDMLGSLPPEIMQALVEHYSGKGWLQRVEQCILHMDISSLDFNQVVRLCREHGLYGALIYLFNQGLNDFRTPLEELLSVVQNTNSKDDASSGYRMLVYLKYCFQGLAFPPGHGIIPQSRLHSVREELLQFLLEESKPLTSEVFKGFNASCGKCLNICYLLWLDTEATLEVIKCAFVQDNFESRDELPSTVNTSASDNEDGIDAGRPEGQNAMVQNVVDAIIDIVGLENDVIRSVMGRTESELWPSEKDFGYLMEFVSFFVSHKRANASKRVVMHILTYLISSYDDTRTRIQKEKEVLQLFNAVPRNDWNSDFVLNLCSDAHFYQACGLIFTARNQNLAALDSYMKDKEEPFHAFIFIDKKLLELVDDEALSFHTTVISRFPELVKLSRECAFVLAIDHFCDKIQQILAELRSDRHSLFLFLKTAIEVHLSGKLDFSKLELRNKQTVELQYSSTEVEAYQQRLSNLSKLCHNPVYIDDELVELYLELLCQYERRSVLKFLETFDSYRLERCLHLCLDYGVTDAAAFLQERVGDVGSALDLILAGLDEKISLFISSVESTFSGVASKSIAEIKQPDIVLEMSEAHPVLDALHASIGLCQRNSQRLDPEESQSLWFQLLDSKLFNSASRKTMRAYCCKPVIIWGKFFPNCSQFLSCS

SEQ ID NO: 226610 - protein, 1628 aa, Zea Mays
MPASSSPAMASQHAPPRRELDLDAFLPSSPTSSGASDADPADDDHRRAVDDLLRLLSSSDSDSDSEESSRIPSTSIQTLSRVQAPAPVAEPSPSPSPSASPSPRRSASALPSETLSSLVARTFSSNGASSSSKPLPSLFRGVRPSPKPGAALAAAAAASRAVLTPHAAAIKSRRSVSAPVEKVLEEEGSGSEGSKEFLPTGSLEAEVEEKGDSEAVADATKQTAGGNVGAELGEDKQAEVGGEENAEAIKLVEASPLDALAAEDSSGHEQGNDANLAETDQVGNQIEAVYEENEDDQTGGDNHVQSGQGMDLIAIALEESSDDEHEFERSDSILQEQVESGSLIDKVIEDRVEQLEASRKAENTEKKLKVSMKPLEWAEELEKRQASSGQHWEEGAAAQPMQLEGIGKGPPAIGYMQIEMDNPVTRVMSSPSFRSDHGSPQVLAVHRSYIAMGTSKGAVIVIPSKYSIHQADDTDAKMLFFWNQGEKTQSPVTAMCFNQQGDLLLVGYGDGHMTIWDVQKSAAAKVIYGEHTAPVVHACFIRQSKAITGDSKGVVLLHTFSIIPVINRLTVKGTQRLFDGNTGIVLSACPLVMDESFGFSNSSAQGNQTTSSSGGLGSMMGGVVGGVVGVDSGWKFFNEGSSPMEDGVVVMFIMHQHALVVRLRTNIDHVDHIETFSRPDGAREGSIAYAAWKYTSYLNESSSVDEERVSWLALAWDRQVQVAKFVKSKIFKHKEWKLDSSAVGVAWLDDQMLVVLNLRGQLCLFSKDGSELRRTTFVPDGLLFDDTILHHAHFFNRFGNPERHFNSSVAVRGATVYILGPSFLTVSRLLPWKERIEALKRAGDWMGALDMAMRLYDGQTQGVVDLPRTVDSIRDAIMPYLVELLLSYISYVFEYISIALPNHTGKGGESGVLIEADRSLLTQRDEQYARVGGVAVEYCVHIGRNDILFDTVFSKFAAAESGGMFLEVLEPYILKDMLGSLPPEIMQALVEHYSGKGWLQRVEQCILHMDISSLDFNQVVRLCREHGLYGALIYLFNQGLNDFRTPLEELLSVVQNTNSKDDASSGYRMLVYLKYCFQGLAFPPGHGIIPQSRLHSVREELLQFLLEESKPLTSEVFKGFNASCGKCLNICYLLWLDTEATLEVIKCAFVQDNFESRDELPSTVNTSASDNEDGIDAGRPEGQNAMVQNVVDAIIDIVGLENDVIRSVMGRTESELWPSEKDFGYLMEFVSFFVSHKRANASKRVVMHILTYLISSYDDTRTRIQKEKEVLQLFNAVPRNDWNSDFVLNLCSDAHFYQACGLIFTARNQNLAALDSYMKDKEEPFHAFIFIDKKLLELVDDEALSFHTTVISRFPELVKLSRECAFVLAIDHFCDKIQQILAELRSDRHSLFLFLKTAIEVHLSGKLDFSKLELRNKQTVELQYSSTEVEAYQQRLSNLSKLCHNPVYIDDELVELYLELLCQYERRSVLKFLETFDSYRLERCLHLCLDYGVTDAAAFLQERVGDVGSALDLILAGLDEKISLFISSVESTFSGVASKSIAEIKQPDIVLEMSECLMHCMPPLDCAKGIHSAWTQRNLSPFGSNSLTRNYSIAHLERQCEPIALLRAIKKTVWDQGCKWKRCQVQLE

SEQ ID NO: 226611 - protein, 81 aa, Zea Mays
MADAEDMQPLVCDNRTGMVKAGFAGDDALRAVFPSIVGRPRHIGVMVEMGQKDAYVGDEVLQTDHDKTKGSFEAADSVSTT

SEQ ID NO: 226612 - protein, 529 aa, Zea Mays
MKDIGANLSSKHNDHGNQANQHTLVGSKNMEGKSVKAKHTVVDAHKNTSWTVDSLINVKDKSEVYGDSNRDILNDVTVQLDHRASNELLPRSTATNIPQLATLENDVVDTVMPYSPNGGCEESFSCPGIKNTPSVRERSVDPINISSDSHDTIEASESSERFMECQKASLCRRRKTVKMAMVSSSSEESGEDTISENVSLGYVLACRSSLSKAQKKRVTKLIQEIQPEFTVFISIMRMSNVKLPGPLLGITKEYAIAHFPDKTTNVTLETPGKSKKWHPKFYKRDESRKNLLMGQWLDFVRDNHVQEGDICLFLPTKDEIRHTFMVYILHETTHSRCGAGFQRVGPCLGGASSAKMASEVHIEDEPTAGEHVSSDSDMPENSHEPLESGDSDDPFEPPYFVPCRSPLSKSQKRMVEQRVRAIRSEVPICVAVMKNNNVGIAQRWMLELCSRYASVYLPTKGQNILLQCKGKTWEAKMMFHNGRRWFLNGGWPDFARGNGLRVGDMCLFELKKKKSTLTMAVHIIRKEQF

SEQ ID NO: 226613 - protein, 132 aa, Zea Mays
MDYSLLVGIHFKDRCKDSSNGDNGTSQNAEDSEENRKGPLRLGICMPSRVENVVKNPESESPLIGEPTGEFQDVILFFGIIDILQDYDISKKLEHAYKSMQYDPNSISAVDPKQYCKRFRDFIFKAFADDVQ

SEQ ID NO: 226614 - protein, 866 aa, Zea Mays
MFGSTNPFGQSSTSPFGNNNSFGTPQGFGQSSTAANNPFAPKPFGSPTTPFGAQTGSSLFATTSTGAFGQQQSAPAFGTTSTGAFGQQQSTPTFGTPSSSQFGSSTPAFGASPTPAFGATSSGSLFGQKPSFGGFGSSPSQSSPFGSTFQQTQPTFGTTPAFGTMTTPAFGTSTPAFGTTTAPAFGATTTPAFGSTSTSLFGASSTPVFGSTAFGTSATGFGTSGTTAFGVSSTTTGFGSSSTPSFGTSASVFGFGSSPSFGQTTVSSGSTPFGTTPSPFGAPVPAFGSQTAAPAFGQPQFANQAGGTRIKPYSQTPDVDSATSGTQPAAKLDSISAMPEYKDKSHEELRWEDYQRGDKGGPNTSGTQAVAPSFPSLIQQNAPNPFSTSNPFSTNNPFAPKPAPTITSPFNTSFNNASVTSSSPFTSSPSTTMFGQTAFAQPTSSTPAFSSGSLFGSTNPGSLFSSSGPSLFSTPTFQPSAPAQTSNLFSFQPPIQPASTGGFPGFSNTTNQALMGQPTPTLSSMVMQPAPVSNPFGMLPAMPHMSIGNGGSSPSVQYGISSLPVVEKLLPSRSLSMAFPRHLAQRRIKLLPRKYNPISDGKVPFFADDEESPATPKADAFFVPRENPRNLVIRPIEQWPSRRETDRQLTVKNATDLNKYEDASIESERGKSASAMSPSSRPPAVENDNQHEARAMAQHGNGNATSVERLLPKLPRADYFTEPSIEELAAKERAEAGYCGRVRDFVVGRHGYGSIIFLGETDVRCLDLESIVEFNNREVVVYKDDSKKPPVGEGLNKAAEVTLLNIKCVNKKTGEEYCEGTRVERYREMLMKKAEEQGAEFVSFDAAKGEWKFRVKHFSAYGLPCC

SEQ ID NO: 226615 - protein, 176 aa, Zea Mays
MTVQIATCMAPLLLRPLLAGESEMDEVFDMDGDDSAQLLAAANAANSAQGIVATLLEEYEGIFHDEHLRCSLSPESQIEDSGIEASTVDGNLEAKGNGFHDVDQELDDDNGVERILSGKLSESSGYAGSDLYDYKNGNIMIDEKTNVLTIIKMAIGVPKKRNDKWMANQLLKLHLE

SEQ ID NO: 226616 - protein, 741 aa, Zea Mays
MYNGIGLQTARGSGTNGYVQTNKFFIKPRSTSGGGPGGPHRPPLPDATGADGGGLGGMRKPNKEILEHDRKRQVELNLLVLRDALEEQGYTEDEIEERVEEARKAAEAEAAAVAAAEEAGSVSGAGRPPLPGRGFTDTQSHHVAARKEKQLETLRAALGLNVEDAKKGDVESDVESGELVPGKYYEELVTVGENNSKDSKNAKKSKKKKENDKRRQPKSSRKSKYDSDLDHDHNTKTKKSSHHDSDDDSETDYDEKKEKKYNKKHRLGSDDDSENDRKKAKRGKNSGSESDTDSGHGKKKTKHVKSDQGGRKKIQVKNSHHDSESDTDSSYGKKTEHARNDRGERKKIPVNNSRHDFKSDIDSGYGKKTEDAKSEHYERKKLLVKSSRHDSESDTDSGYGKKKMEHIKNERDERKKVPVKSSRYDSESDTDSGYGKKKMEQTKNVRDEKRKVPLKSSHHDSESDADIDYRKKKIEHTEGIRDERKKIPARSSRHDSDSGADNNGKNKRPLQSSRHDLEDEKPRSRNYNYGSRASEHEKHMLKKDVQEKRKVATSSDSSDYSSSLSSSDSDTSADSYEEQKRSQAGGRRNELTTQRQKEEERKELEKQQKREVEKKELDKQKQREEERMEMEKEKKRQREREEERQREREQYERKGGNDVERDNKRKLIDDRYDPNSSRDREEGYRDSQNRDDNRRQEEHGQHNRYMDSHDSKRSRHDSHYHSRRDFEQRYSRDEHRDRRRH

SEQ ID NO: 226617 - protein, 388 aa, Zea Mays
MPLGLGRIASYCTHRSGPSRSSLPCMSGACDAITSANRLIGKHLRAGRVDAVREVFDKMPQRDIVSWNSLMAVYARSGVHDSAVTAFLKMRREGFCADHTSFSTVLSACARMETLALGRCIHGLATKTRSSLNVFVGSSLITMYANCGVYSCLEWIVDDVDSPNLALWNALISGLVVNHRVEDARRVFDQMPEHNVVSWTVMIKGYFTVHEVGRALELFNLMPTKNSVSWCVMIGGLVNHKRFREVNELFNTLMSCREIVTNAILVKIVNACAGLKSIGGGRCVHGFAVKSGFIHDHIIEASLVVMYCNSLDIDEAQLEFCKMERKHVGSCKIDEARKIFYSMDGRDKISWNLMVDGYVKHGKIHDAIELYSKMPEKNLEASTTLMSC

SEQ ID NO: 226618 - protein, 388 aa, Zea Mays; identical to SEQ ID NO: 226617

SEQ ID NO: 226619 - protein, 204 aa, Zea Mays
MSPNNLAAMSNLPDRALASTTIVYKPKLGRSPPLLISSQSSIPASSFPDLTSASTMAVLTAVLTRCPTTTISLYIPMAASSLPALASTSTITEYTPTGARPIPSLCFISSNILRAASILPARASAGTASWYVPSSRAQPEVAISSSTSKALNASPLVEVDIRQRQARFNGPDCKGSSHPMNDRMSEVAQTEILAHSRRPTVVVQ

SEQ ID NO: 226620 - protein, 696 aa, Zea Mays
MDAWEATKVVFDRVRALDPENASKMMGLLLIQDNSDKELIRLAFGPEHLLHSFVATARAELAAKPASPPSPVLGPLQSGAPWGLPSPGSGAGGGGGGDHHHHSPFAAADQLGYDGGADAFYADEYDCWSPAGAAGAHRRSFSLSDAEAAASWRPCMYYARGYCKNGSSCRFLHGVPEDDAAEREMAVMRAKALAAAPPTQQQQLMASAYPFSPSPKGGVSLSFLLQQQQQSETQRAAAGMLLGGEDMHRFPVRSPRMDRGDLIGSPAARQIYLTFPADSTFSEEDVSNYFSMFGPVQDVRIPYQQKRMFGFVTFVYAETVKAILSKGNPHFVCDARVLVKPYKEKGKVPDRFRSVLPSSPLHIALPLPACACIAFSSFSLQSHCNALHVALLVCFDSFRCHLKKASFFGFIVLSGCRKLQHTHHGGAEFVGCASPTGLLDSRDPYDLQQPQIGSRMMYGNIANQHEAFLRRKLEEEQAAELQQAIELEGRRFMGLQLLDLKSRGHHHLGSGAPMPLRQATDGKGSGINGNGNASHLEDAICIQDKRMMSSLAMSAPAAADAEGEHEEQQEEGGGGCDGSSSSSPKQAVNPGEEEVVESGPVTATPNAACGFQESYGVVEVELVLPDSPFASPTKEEASYADAVTTAAARNGSISSSPRHVALFAPASSTTLELPPYSSSSFFQVPRFSRGHEAIGL

SEQ ID NO: 226621 - protein, 259 aa, Zea Mays
MWRRCCCNCQVDESDQHENGHVKATINNIDGAIMGLKDSTTGKVEPQDAAPQIDIPVLSLDELIEKTDDFGSTALIGRKGVQGAQPGLALDWMQRVQIAVDAAKGLEYLHEKVQPSIVHRDIRSSNILLFEDFKAKIADFNLSNQAPDMAARLHSTRVLGTFGYHAPEYAMTGQLTQKSDVYSFGVVLLELLTGRKPVDHTMPRGQQSLVTWATPRLTEDKVKQCVDPRLMGEYPAKGLAKLAAVAALCVQYEAEFAQI

SEQ ID NO: 226622 - protein, 207 aa, Zea Mays
MWRRCCCNCQVDESDQHENGHVKATINNIDGAIMGLKDSTTGKVEPQDAAPQIDIPVLSLDELIEKTDDFGSTALIGEGSYGRVYYAILDNGTKMAVKKLDSTENEPTAEFLTQVSLVSRLKHENFVDMLGYCMERNLRIVAYEFATMGSLHDVLHGRKGVQGAQPGLALDWMQRVQIAVDAAKGLEYLHEKVQPSIVHRDIRSSMQ

SEQ ID NO: 226623 - protein, 228 aa, Zea Mays
MPLSEPSAPAVLAALPRALSLAAAAVAAATATLLLISAVFSTPHHAASSSSPQLSPSASASTAAPVAPAPAHAPDSGPGHPHPPPPVPPCPPNATHDVPCHEPPSRERHCPPRPPPPPPLLPHPPKDPPPHPPPHCRVPPPPRYRPPPPWPARRDRARYANVDLPPLPPVKAADGQQQDPVHGRGEWLLFTDGVQGYVERLERVVPLRDGVVHTALDIGCGVCCTRIA

SEQ ID NO: 226624 - protein, 852 aa, Zea Mays
MPNYVVGGIRRNLEQTQYSSSSSSGYSPCARSKVLQQQNDQHEDTHYDSDEAESKLSLLEPEDSVNEDNFAAVLSQFNDAHNKGSEGYGESGCGKHGEKSLAESVGSLNIGIIDFEFMDSTPLIHDKESCSLLEPEDSVNEDNFAAVLSKFNDAPNKESKGYGESGRGKHGEKSLAESVGSLNIGIVDSEFMDSSPLIHDKESCSPLEPEGSVNEDNFTAVLSQFNDAPNKESEGYGESGCGKHGEKSLVESVGSLNIGIVDSEFMDSSPLIHDKESCSPLEPEDSVNEDNFAAVLSQFNDAPNKESEGYGESGRGKHGEKSLAESVGSLNIGIIDSEFMDSSPLIHDKESCFPLEPEGSVNEDNFTAVLSQFNDAPNKESEGYGESGCGKHGEKSLVESVGSLNIGIVDSEFMDSSPLIHDKESCSPLEPEDSVNEDNFTAVLSQFNDAPNKESEAYGESGCGKHGENSLDESVGSLNIGVIDSEFMDSSPLIHDKESCSPLEPEDSVNEDNFAAVLSQYSDGPNEGNEGYGESGHYKHEEKSLDESVGSLTIGIIDSEFMDSSRPIHDKESCSTGSAADQCSRTIPAKYELSSEESDSTGSHLVFDSGKNYLELNNHSVTDLERIYNGHATSVDQYVRGNGETLADHPKKEEAGLQKDTGTIAQHRDTLACDGESVCSSCEEPRRGLNGEPSDFSSESHSRLTPTHNTGGKLSMVSEHPVHNMESDMTGMASDSTNPELNPEASTRNEMDGSRSTDNPVEPENVAQDSATRGRPEGDAPRSGKGVLRSVAGGITLVGAVFFMFHLRRSKGGSFATVIPSLSGKSARSNARARNMGRENVPDAYPGGRLKA

SEQ ID NO: 226625 - protein, 812 aa, Zea Mays
MSLHAARGGPHEDLSWSAIGRRAPRDVVTFGDREGGGGMRSAQQGPGAVRVDEASSASTFRELDEAFLQTQTKIWLGEVLHLRFGEDALVADLLADGELLFQVSKVLWKMLLKNNREQLKQSKVYIYERLSFGRSSGKYMPYSKVDSFLKICQILGLAGIDLFTPSDVVEKRNVRKVCICIRSVSKKSLILHLNVPDFDVVTYTISMPNYVVGGIRRNLEQTQYSSSSSSGYSPCARSKVLQQQNDQHEDTHYDSDEAESKLSLLEPEDSVNEDNFAAVLSQFNDAHAPNKESEGYGESGRGKHGEKSLAESVGSLNIGIIDSEFMDSSPLIHDKESCFPLEPEGSVNEDNFTAVLSQFNDAPNKESEGYGESGCGKHGEKSLVESVGSLNIGIVDSEFMDSSPLIHDKESCSPLEPEDSVNEDNFTAVLSQFNDAPNKESEAYGESGCGKHGENSLDESVGSLNIGVIDSEFMDSSPLIHDKESCSPLEPEDSVNEDNFAAVLSQYSDGPNEGNEGYGESGHYKHEEKSLDESVGSLTIGIIDSEFMDSSRPIHDKESCSTGSAADQCSRTIPAKYELSSEESDSTGSHLVFDSGKNYLELNNHSVTDLERIYNGHATSVDQYVRGNGETLADHPKKEEAGLQKDTGTIAQHRDTLACDGESVCSSCEEPRRGLNGEPSDFSSESHSRLTPTHNTGGKLSMVSEHPVHNMESDMTGMASDSTNPELNPEASTRNEMDGSRSTDNPVEPENVAQDSATRGRPEGDAPRSGKGVLRSVAGGITLVGAVFFMFHLRCGTMLVSTAFQIFAAKSH

SEQ ID NO: 226626 - protein, 582 aa, Zea Mays
MDSTPLIHDKESCSLLEPEDSVNEDNFAAVLSKFNDAPNKESKGYGESGRGKHGEKSLAESVGSLNIGIIDSEFMDSSPLIHDKESCFPLEPEGSVNEDNFTAVLSQFNDAPNKESEGYGESGCGKHGEKSLVESVGSLNIGIVDSEFMDSSPLIHDKESCSPLEPEDSVNEDNFTAVLSQFNDAPNKESEAYGESGCGKHGENSLDESVGSLNIGVIDSEFMDSSPLIHDKESCSPLEPEDSVNEDNFAAVLSQYSDGPNEGNEGYGESGHYKHEEKSLDESVGSLTIGIIDSEFMDSSRPIHDKESCSTGSAADQCSRTIPAKYELSSEESDSTGSHLVFDSGKNYLELNNHSVTDLERIYNGHATSVDQYVRGNGETLADHPKKEEAGLQKDTGTIAQHRDTLACDGESVCSSCEEPRRGLNGEPSDFSSESHSRLTPTHNTGGKLSMVSEHPVHNMESDMTGMASDSTNPELNPEASTRNEMDGSRSTDNPVEPENVAQDSATRGRPEGDAPRSGKGVLRSVAGGITLVGAVFFMFHLSAALLQKKQGGKLCDGHTISFGKICSEQRKGQEHGQRKRP

SEQ ID NO: 226627 - protein, 349 aa, Zea Mays
MPRRWYLSVNLLQSAIRVPDALVNTGLAKLGYEYVNIDDCWAESDRDYQGSFVANRQTFPSGIKALADYVHAKGLKLGIYSDAGTRTCSQKMPGSLDHEEQDVKTFSSWGIDYLKYDNCNDAGRSVMERYTKMSNAMKTYGKGIFFSLCEWGRQNPATWAGGMGNSWRTTDDIADNWGSMTSRADQNDRWASYAGPGGWNDPDMLEVGNGGMSEAEYRSHFSIWALAKAPLLIGCDVRAMSQQTMGILSNSEVIAVNQDSQGAQGKKVQSSNGLEVWAGPLSNNRKAVVLWNRQGYQATITAQWSSIGLASSTAVTARDLWAHSSFSAQGQLSASVPPHDCKMYVLTPN

SEQ ID NO: 226628 - protein, 585 aa, Zea Mays
MGARRRLRQGSGRLQLLFSFLVLLLQAQASVGAASINGEGLALLELKVRVEADPHGVFQDWDPMDSSPCSWSGVRCFDDKVEILNLTGRQLAGTLAPEIGSLRGLKSLLLPKNNFRGQIPREFGGLSALEVLDLSSNNLDGTVPEELWAMPLLKQLSLHDNQLQEGVQAIADDQAGCLSRKLGCWSLLYKWDFKDWISLGGLREKDNTNVPNFSEADVMHNLQSFASVMRRRLLSENDNLAALLGNDDKSSDLQNLKEIQRSVDVNSVGSGSFSAFPGIYGQALAPLLPEDIDATTVQQLSTDVTQTTNVEMSGTTYSKWAYIITIPAAILLISLIVLILVLRKRGRAPVAPWKTGLSGPIQKALVTGAQKLNRAELEVACEDFSNIINTFPTCTVFKGILSSGVEIGVVSTTISSSKDWSRSAESCFKKKIDRLSRVNHKNFINLLGYCLENEPFTRMMVFEFAPHGSLSQHLHVKEFEHLDWAARMRVIMGVAYCLQYMHHELSPPMAIHDVRSDTTFISDDYAAKIADVGVWNELAAKAKAGKEDGSSRAEAPPDLPSNAYCFGALMIETISGRVPDPLLSI

SEQ ID NO: 226629 - protein, 673 aa, Zea Mays
MGARRRLRQGSGRLQLLFSFLVLLLQAQASVGAASINGLALLELKVRVEADPHGVFQDWDPMDSSPCSWSGVRCFDDKVEILNLTGRQLAGTLAPEIGSLRGLKSLLLPKNNFRGQIPREFGGLSALEVLDLSSNNLDGTVPEELWAMPLLKQLSLHDNQLQEGVQAIADDQAGCLSRKLGCWSLLYKWDFKDWISLGGLREKDNTNVPNFSEADVMHNLQSFASVMRRRLLSENDNLAALLGNDDKSSDLQNLKEIQRSVDVNSVGSGSFSAFPGIYGQALAPLLPEDIDATTVQQLSTDVTQTTNVEMSGTTYSKWAYIITIPAAILLISLIVLILVLRKRGRAPVAPWKTGLSGPIQKALVTGAQKLNRAELEVACEDFSNIINTFPTCTVFKGILSSGVEIGVVSTTISSSKDWSRSAESCFKKKIDRLSRVNHKNFINLLGYCLENEPFTRMMVFEFAPHGSLSQHLHVKEFEHLDWAARMRVIMGVAYCLQYMHHELSPPMAIHDVRSDTTFISDDYAAKIADVGVWNELAAKAKAGKEDGSSRAEAPPDLPSNAYCFGALMIETISGRVPDPYDHKPICSWASEHLKDKNYGKLVDASLKEHKESELEAVCEVIQECIDPDPTRRPSMRDVVGKLRDALGISPEAAAPRLSPLWWAELELLSVKST

SEQ ID NO: 226630 - protein, 453 aa, Zea Mays
MAREATNAWPRPSPSARKRSKGKRAVLSPAPPTQAAATEMEAEASVPATDYVYDALPGLHLAFSPEETLDDAAAGQDEDDATATYAVFRNEITEAGDVLADIPAADFFSLDVSTSASVEPEPEPEPPSPAPTAAAATPSISRALEDQPPQGSERAWFRGGRRFRSPMLQLHKEILDFCDFISPSTEEQSSRAAAVQDVSDVVKHIWPQCKVEVFGSFRTGLYLPTSDIDVVIFESRVKTPQVGLYALAKALSQKGVAKKIQVIAKARVPIVKFVERKSGIAFDISFDIDGGPQAADFIKDAVKKLPALRPLCMILKVFLHQRELNEVYTGGIGSYALLTMLITHLQLVWGGKDILGYHRSKEHNLGILLVRFFDFYGRKLNNWDVGVSCNSSRTFFLKSDKDFMNHDRPHLLAIQDPMAPDNDIGKNSFNYFKVITIDFLLMLLQGMLPMLWI

SEQ ID NO: 226631 - protein, 371 aa, Zea Mays
MAREATNAWPRPSPSARKRSKGKRAVLSPAPPTQAAATEMEAEASVPATDYVYDALPGLHLAFSPEETLDDAAAGQDEDDATATYAVFRNEITEAGDVLADIPAADFFSLDVSTSASVEPEPEPEPPSPAPTAAAATPSISRALEDQPPQGSERAWFRGGRRFRSPMLQLHKEILDFCDFISPSTEEQSSRAAAVQDVSDVVKHIWPQCKVEVFGSFRTGLYLPTSDIDVVIFESRVKTPQVGLYALAKALSQKGVAKKIQVIAKARVPIVKFVERKSGIAFDISFDIDGGPQAADFIKDAVKKLPALRPLCMILKVFLHQRELNEVYTGGIGSYALLTMLITHLQLVWGGKDILGYHRSKEHNLGILLVF

SEQ ID NO: 226632 - protein, 441 aa, Zea Mays
MAREATNAWPRPSPSARKRSKGKRAVLSPAPPTQAAATEMEAEASVPATDYVYDALPGLHLAFSPEETLDDAAAGQDEDDATATYAVFRNEITEAGDVLADIPAADFFSLDVSTSASVEPEPEPEPPSPAPTAAAATPSISRALEDQPPQGSERAWFRGGRRFRSPMLQLHKEILDFCDFISPSTEEQSSRAAAVQDVSDVVKHIWPQCKVEVFGSFRTGLYLPTSDIDVVIFESRVKTPQVGLYALAKALSQKGVAKKIQVIAKARVPIVKFVERKSGIAFDISFDIDGGPQAADFIKDAVKKLPALRPLCMILKVFLHQRELNEVYTGGIGSYALLTMLITHLQLVWGGKDILGYHRSKEHNLGILLVRFFDFYGRKLNNWDVGVSCNSSRTFFLKSDKDFMNHDRPHLLAIQDPMAPDNDIGKNSFNYFKHFPRRTLC

SEQ ID NO: 226633 - protein, 123 aa, Zea Mays
MAVRERNIVEHVNKIAPRFQEGIKAFSGSPIVGEIRGLGLILGTEFVDNKSPNDPFPAEWGVGSIFGTECEKRGMLIRVAGDNIMLSPPLIMTPNEVEEIISKFGDALKATEERIGELKSRKN

SEQ ID NO: 226634 - protein, 123 aa, Zea Mays; identical to SEQ ID NO: 226633

SEQ ID NO: 226635 - protein, 186 aa, Zea Mays
MAAAIEELRLLGSIPVLEGPGEVDGVVGEEGRPRGGGDDEEILRFMDSVDSYLLLMDSLSSALRQGWLDLASARHSMGTSRVSSTLFDHKEQSAATKLQVVDHDGLKSSESIPHFALSKWSLQEECHSTYDLSERDFTEPKMRHRGSVTTPEKGNHESANTTTLSTGADASNRFMCLSYQWLKFAP

SEQ ID NO: 226636 - protein, 683 aa, Zea Mays
MDSTTEEASPCVERGFDGLPYPGFWEQVTLRSMAIAVVLAAVFSLVTLRIYMTVGVVGALNMPTNVLSFFSVKSLVSLQRRYGISAAPFTRQENIFLQTCVITCVNTAISGGLPNYITAMNAQVATSLRDDPDKEDIIDRIPTGKYALFLLLTGLVAITLMLPLAQVMIVDYRLLFPTGSVVAHLINSFHTPQGAYAAKLQVAAIFKTFLGSFSWSMFQWFFAGGNNCGFQSFPIFGLELYKRNRFYFDFSASFVGLGMIVPHVVNFGLLFGAITSWGLLYPFLQSKRGQWYHTDSRTSLSGMNGYKIFIAVTMIITEGMFNFIKLLTVSSIDLYKKRQQNDSGKIKYMLTSPSLSYDDRRRLDVFLGQRIPLHVPVAGYIGCAIVCSVVIPWIFQHIKLYHMALLFTILPVFTFCNTYGTGLTDWSVAQSYGRFIQFVIAAWVAVPGAVIASLAACGVSVAALNVSSQAMQDLKTGYMTSTSPRAVVAGHIYGVLIGSVIIPSIFLAFEANAKSTAPIGSKDSEYSCPSAAVYRAIGLLGKRGVKELPDHCITLCLVTFFMTLAIETIRLVSQRRNWKLHSFIPCMIAIALPFLAGPYFTIDMCLGSVLLIIWNKRNRPHAELLSSAVAAGLICGDGLWVLPSSVLSIFNVHPPICMKFLSSGKQVDIADSFLNTLGPHGRT

SEQ ID NO: 226637 - protein, 190 aa, Zea Mays
MLISCLSCYNVETLVHSTLEHCEDADFTFPVHFNFREHTIYVRCRPYLKEFLDRVASVFETIIFTASQSIYAEQLLNVLDPKRKLFRHRVYRESCVYVEGNYMKDLTVLGRDLTRVMIVDNSPQAFGFQLDNGIPIESWFDDPNDMELLKLLPFLESLVGVEDVRPYIARKFNLREKVATASSLTIDMQM

SEQ ID NO: 226638 - protein, 391 aa, Zea Mays
MQTRKKGAAKNAVGYHANPKTSRPSRRATQSTVAEKKVSDLITSSSKKQRPVGVTSKKHSKGGRKLLVSCDTTDAGNDAPQVPPSVFPDLQAQHSDGVADDRPNDSIFSPTYHHHKEGGVNNLSKGLEEQTTHVHGSKEASLKSGSNLACNTHDGINDHSGTLKLQSAGQSTLLEVDEYSELGNLSSEVSAIYLAMQQSKLECIDEQSQDSTSTEGYGEAEETEEYDDFDPYSFIKDLPDLSMVVPKFRPVLLPKQTRSCPTMTLVLDLDETLVHSTLEHCEDADFTFPVHFNFREHTIYVRCRPYLKEFLDRVASVFETIIFTASQSIYAEQLLNVLDPKRKLFRHRVYRESCVYVEGNYMKDLTVLGRDLTRVMIVDNSPQDLNVKPLS

SEQ ID NO: 226639 - protein, 233 aa, Zea Mays
MRFILDEAIAVVAFVVHSFVLLAQAITLSTCIIAHNNALLALLVSNNFAEIKSNVFKRVSKENLHNLVYYDIIERFHIMAFLLFVLAQNILEAEGPWFDSFLINASLVFLCEVLIDAIKHSFLAKFNEIKPVAYSEFLEDLCKQILNDKPDDRQKDLTFIPLAPACVVIRVLTPVYATLLPAGPFIWRIFWILLWSVLTYFMLAIFKIIVGLILRCLANWYVNLRLTRKQHVD

SEQ ID NO: 226640 - protein, 377 aa, Zea Mays
MSREAARTRSRVLVVGATGRLGGSIARASLAAGHPTFALVRPHHFARPDSPVLGPLVAAGATLLQGSLEDYSSLLEAVCQVDVVICAVSTKQVLEQKPLIRAIKEAGCVKRFIPAEFGADPTKVQICGMDYGFYEKKIEIRHSIESEGIPHTYICCNFFMRYLLPSLVQPGLDAPPRDEIKIFGEGNTKGVFVKENDVAKFTICTIEDPRTLNKTLYLRPPGNVFSMNELADLWESKLKKSLKRLYVTEEQLLKEIHDAPFPLKMDLIFIYSAFVKGDHTYFEIDLSMEGTQLYPHMAGMARVGDVVVGELWFSLLYDPIIHNSNKIIMPASTYESHSICQSYSIQFYSWNNNNEQSYAVYNWCKRLNYRLNLVDSC

SEQ ID NO: 226641 - protein, 212 aa, Zea Mays
MAGNVSNDIIKYWAQRYSLFSLFDSGIKMDEVGWFSVTPEPIAKHHASRVGAGVMIDCFTGVGGNAIQFAKKCKHVIAVDIDPQKIDCAHHNASIYGVNDHIDFIVGDFIHIAPHLKGETAFMSPPWGGPDYAKVDVYDMKSMLIPCDGYSLFKLGTMIASRVVMFLPRNIDLNQLADMSLSVDPPWAVEVEKNFLNGKLKAITAYFEEQDR

SEQ ID NO: 226642 - protein, 193 aa, Zea Mays
MDDPVERLKDGFHKFKTEVYDKKPELFEPLKAGQAPKYVVFACSDSRVCPSVTLGLQPGEAFTVRNIAAMVPAYDKTKYTGIGSAIEYAVCALKVEVLVVIGHSCCGGIRALLSLQDGAPDNFHFVENWVKIGFPAKIKVKKDHASVPFDDQCSILEKEAVNLSLENLKTYPFVKEGLANGTLKLVGGRQRVP

SEQ ID NO: 226643 - protein, 154 aa, Zea Mays
MAERLALPTAYEAIIIAHQNLQNPKIQKLIEPISRRASRPVVVNGLLQREDWETAITVPLGIIPAGTGNGMARSLLHAAGEPFSISNVVFAIIRGHKRALDVTSVVQGKARFFSVLMLTWGLVADVDIESEKYRWMGSARLDFYGRLLLYYLVA

SEQ ID NO: 226644 - protein, 128 aa, Zea Mays
MLPRNHGEPFNVLRYNIGQRYASHYDAFDPAQYGPQKNQRVASFLLYLTDVEEGGETMFPYENSENMDIGYDYEKCIGLKVKPRKGDGLLFYSLMVNGTIDRTSLHGSCPVIKGEKWVATKWIRDNIV

SEQ ID NO: 226645 - protein, 1149 aa, Zea Mays
MDDVCEGKDFSFPEQEEGVIELWAKLDAFHEQLRRTEGGEEFVFYDGPPFATGLPHYGHILAGTIKDVVTRHQSMRGRHVSRRFGWDCHGLPVEFEIDKALGITNRQQVFDLGIGKYNETCRSIVTKYVSEWEAMVTRTGRWIDFKNDYKTMDLNFMESVWWVFAQLWEKDLVYRGFKVMPYSTGCKTALSNFEAALDYRTVPDPAVMVSFPIVGDADNAALVAWTTTPWTLPSNLALCVNANLTYAKVKDKSNGAVYVIAESRLGQLPVKAKASGKKQAPSKGSNIEAVQDGLDKESYELLSKIPGVSLVGLKYTPLFDFFIELQGTAFRVIADNYVTDDSGTGVVHCAPAFGEDDHRVCLAAGIFETAGLVVAVDDDGCFIEKISDFKGRYVKEADKDIINAVKDKGRLISKGSIEHSYPFCWRSGTPLIYRAVPSWFVKVEKIKDQLLECNKETYWVPDYVKEKRFHNWLEGARDWAVSRSRFWGTPLPLWISQDGEEIVVMDSIEKLEKLSGVKVTDLHRHYVDDITIPSKRGPEFGVLKRVDDVFDCWFESGSMPYAYIHYPFENRELFEKNFPGNFVAEGLDQTRGWFYTLMVLSTALFGKPAFKNLICNGLVLAEDGKKMSKSKKNYPPPKDLIDEFGADALRLYLVNSPVVRAESLRFKRTGVFAVVKDVFLPWYNAYRFFVQNAKRLEVEGLASFSPMEQVVLLKSSNVLDHWINSATESLVVPYLVKYIDYLTNIYVRLNRKRFKGRTGEEDCRISLSTLYHVLVTTCVVMAPFTPFFTEVLYQNLRKVSSNSEESIHFCKFPSTTGERDERVEQSVKRMVTIIDLARNIRERHNKALKTPLKEMVVVHPDNDFLEDITGKLKEYVMEEINVKNVTPCNDPLMYASLRAEPNFSVLGKRLGKDMGKVSNVVKKMTQEQILAFEKSGEVSFFGHCLKLDDIKVVRQFKRPENVSEKEIDAAGDGDVLVILDLRTDQSLFEAGVAREVVNRIQKLRKTAQLEPADPVDVYYESVGNDKNTLEEILKSQDQYIRDALGSPIVPKEMAPTDVVVLGEESHNVHDMSFVICIARSTPIISPDLLSHASGNSNHVEALRVYLLSKSLSRLKNQFQSGNGVITVDCIEGYPLISDQAPMVLAQALT

SEQ ID NO: 226646 - protein, 668 aa, Zea Mays
MDSIEKLEKLSGVKVTDLHRHYVDDITIPSKRGPEFGVLKRVDDVFDCWFESGSMPYAYIHYPFENRELFEKNFPGNFVAEGLDQTRGWFYTLMVLSTALFGKPAFKNLICNGLVLAEDGKKMSKSKKNYPPPKDLIDEFGADALRLYLVNSPVVRAESLRFKRTGVFAVVKDVFLPWYNAYRFFVQNAKRLEVEGLASFSPMEQVVLLKSSNVLDHWINSATESLVSFVHQEMDAYRLYTVVPYLVKYIDYLTNIYVRLNRKRFKGRTGEEDCRISLSTLYHVLVTTCVVMAPFTPFFTEVLYQNLRKVSSNSEESIHFCKFPSTTGERDERVEQSVKRMVTIIDLARNIRERHNKALKTPLKEMVVVHPDNDFLEDITGKLKEYVMEEINVKNVTPCNDPLMYASLRAEPNFSVLGKRLGKDMGKVSNVVKKMTQEQILAFEKSGEVSFFGHCLKLDDIKVVRQFKRPENVSEKEIDAAGDGDVLVILDLRTDQSLFEAGVAREVVNRIQKLRKTAQLEPADPVDVYYESVGNDKNTLEEILKSQDQYIRDALGSPIVPKEMAPTDVVVLGEESHNVHDMSFVICIARSTPIISPDLLSHASGNSNHVEALRVYLLSKSLSRLKNQFQSGNGVITVDCIEGYPLIRLQLGKHVFLSAGDFYLASRS

SEQ ID NO: 226647 - protein, 565 aa, Zea Mays
MDDVCEGKDFSFPEQEEGVIELWAKLDAFHEQLRRTEGGEEFVFYDGPPFATGLPHYGHILAGTIKDVVTRHQSMRGRHVSRRFGWDCHGLPVEFEIDKALGITNRQQVFDLGIGKYNETCRSIVTKYVSEWEAMVTRTGRWIDFKNDYKTMDLNFMESVWWVFAQLWEKDLVYRGFKVMPYSTGCKTALSNFEAALDYRTVPDPAVMVSFPIVGDADNAALVAWTTTPWTLPSNLALCVNANLTYAKVKDKSNGAVYVIAESRLGQLPVKAKASGKKQAPSKGSNIEAVQDGLDKESYELLSKIPGVSLVGLKYTPLFDFFIELQGTAFRVIADNYVTDDSGTGVVHCAPAFGEDDHRVCLAAGIFETAGLVVAVDDDGCFIEKISDFKGRYVKEADKDIINAVKDKGRLISKGSIEHSYPFCWRSGTPLIYRAVPSWFVKVEKIKDQLLECNKETYWVPDYVKEKRFHNWLEGARDWAVSRSRFWGTPLPLWISQDGEEIVVMDSIEKLEKLSGVKVTDLHRHYVDDITIPSKRGPEFGVLKRVDDVLYSDGSLNSTVWEACI

SEQ ID NO: 226648 - protein, 590 aa, Zea Mays
MARSWLDVQVDLELSQYQTSRPEKQLDDDMNGAQSSVGPESWPYHVLDQQPHDLTALLQKLHSSDLVHETVSRACREQHRQIQMNLMSGNISHLLDLLWSWLSPAEENHNNTARPLDDPEMIRFGAHIVLVLRHLFSDGMDDELDEKLVTVGDLIINMYVRYLFSEDQEELVGIYASQLQHDLCITLFVEMMELRLNSSLHTMYKLFLSAVEYLPFSSDNVSKACFEEIIERVLSRSRQTKPTKYDGDFSDVAHQHHLQSLQKAMVIQWLCFTPPSSIPDFQMISWKLLIRALTHSNTLFREFSLISMRRVPELPAGPHKLLAILAEPLKQKENLISREDPEHEYYSLDATYRSWLKIEMMNAAVSPEMLSAEEKGQAVAAAKETLNLACSLLRNATSCTALTSALYSTVSEDDVLHRLLKVDVQVSSRDPCCIEVALRCLAAEGDGYGLHEANDGGLLAAVMAAGFKGELSRFQPGVSMAISRLDAWYSDRSGSVESTAAYIIRGLCRRCCLPETILRSMQACIALSAAGDDLDYSLDKCDELVELVGSAESGMMHLFSQQQLQEFLIFEREYLICTMEFEEDRLPCDG

SEQ ID NO: 226649 - protein, 1226 aa, Zea Mays
MLLQTYQQDNDEFYELVFCKFLSDTSYSVAVQAAAARLLLSCHSAWTPPYPHVFEDSIIDNIKKWVMKDPEASNECEWKYLGKNKPTDAEMLRTYAIGLLAMALCSGGQLVEDVLTLGVPAKLMHFLRIRVLGDASSSQRDANHPQDTKYPRGRDDNRGKSRLAQDGSRLDGTRVGYGILTNPTAEKDNEPGVVMRQAYGERSLDGTFASSDNSDVPEVDWTNDNSYGTIVCDTKSKYGEKTSVTRALKDEEISENGELLKRKLSRAPSRLRVKGKAGDNLPECEMTPLSPTSGLRIGGRASRDRNVVRVDDPKKATDVNNSSAGLELFSAISKEEYEDRLRDCIIGLKDISDIVLKAVRAAEAEARSANAPDEAVKAAGDAAAELVKSAALEVWKAENNSDAVIVAAEKAASAVVEAAVSTSVSRSTNQVGEERAAEEAVQTSEDQDLENFVISDKSQLLQLREKYSIQCLQILGEYVEALGPVLHEKGVDVCLTLLQMSMKDQEGCDHFAQLPDVLKLICALAAHRKFAALFVDRGGIQKILSIPRITQTYMGLSACLFTFGSLQSTMERVCALSSDTLDSVVELALQLLECPQDLARKNVGIFFAAAFVFKAVLDLFDARDGMQKLLDILYGCASGRSGSNSGGAGSSNVNQGNDRSPAEALTASEKQVAYHTCVALRQYFRAHLLQLVDSIRPSKSIRSIARNTSSARAGYKPFDISNEAMDAVFRQIQRDRKLGLALVRVRWPVLDKFFASNGHVTMLELCKAHGDRYLRDLTQYAIGVLHIITLMPQPHVRKSIVQGTLSNNRAGMAVLLDTVKSFDYIDHEVICPALNVLVNLVCPPPSISNKPLSTANQQPAAAQALASESRDRNFEKSISDRNLLANQGEYRERSGDGNPAERNNTLHQGTPNTPVVTSGVVGDRRITLGVGGGGPGLAAQLEQGYRQAREVVRANNGIKILLQLLGSRMVTHPVAIDSIRALACRVLLGLARDDTIAHILTKLQVGKKLSELIRDTSAQTSAGDSGRWQAELTQVAIELIAVLTNSGKETTLAATDAAAPALRRIERAGIAAATPISYHSRELMQLIHEHLLGSGFTATAAMLQKEAGLAPLPLIAAVLPAHQVAALEASSVQQQWPSGRVQGFLSDKINMSTDQSAHRSDSIPPSSKKKALTFSSSFSRRAQTPHSVSGSRTSNILKSPVPIAADTRDAEMLNKTPLSLPLKRKL

SEQ ID NO: 226650 - protein, 164 aa, Zea Mays
MPAEYLDVVRHSDHGNLSWAPLLYRNPVSVLLGPAARGPVTVAGDAFHPMTPDMAQGGCSALEDAVVLARALSREATPAEGVSAYVAQRRWRAAWLVAGAYLSGWIQQGGTNVGGVRGRLVKVFRDWIFYRFVFPRLADTMWFDCGDLTPPPPTAAVGKSHHIE

SEQ ID NO: 226651 - protein, 187 aa, Zea Mays
MPESPWGLSPFKVRERSTARAGKSAIVKYSNKKKGAGKTAIIEGLALIIANGDVHIFLVGGSDPLQFMLQVRALCEKAKEILMEESNVQSPVTICGDIHGQFHDLAELFRIGGKCPDTNYLFMGDYVDRGYYSIETVTLLVALKVRYPQRITILRGNHESRLLTCHIVSSINLPAGLIDPGIAGLAI

SEQ ID NO: 226652 - protein, 444 aa, Zea Mays
MPESSRGVVSSNAFDEDAKKRAADTVDDGALADGKGKKRREDLCCEICEGDHVPLDCQVYNGPKPHAILCGFGSGESGFFQIPNFGSKGLIPLKESSTAFITAKEGTITAELVKSELARLIPVRWTWAVQSHANGFVVPFPSKVELQRMVAMKFVHAVDGKSIMVIQELEQKIEPVQHLEKAWVNIYGVPYEIRSFLPLWAVGTIIGATQKVDLRYTKQMGVVRLLVGVTNVDKIPESVDIVVGEGLYEIFFKIDKVCKDGVWSEYYYPSDKKDDDFESKDEDFDGLDDIQPKFDDTTRDTVMKDVSGSKVDNSSNVQHATQQNCDIRQTGVPSDFGSLAQSTESFIPHINTSSLDCSDALEKCLVAVNRSSVFRENVAAPTAVAHGVVYDNKWTEAEGTIILNAKQTAQKRGEFSRTGGPSSYLASMVQLNEGSFQGNILAHI

SEQ ID NO: 226653 - protein, 779 aa, Zea Mays
MAFLVALPPQSCMLNSTLAPATCRLRLGAAAYDVGEGELLSYCFGLVSTEKHQMTSGGWSNFEDQALVVLVHDMGQNWELVSDAINNIVQFKCVHRQPKECKERHKVLLDRSSGDGADSAEDSGSSQHYHNTLPGIPKGSARQLFERLQGPFDEENLKAHFEKIILLMQQVHARRRQGNRQELKPIMQPHSSHVITLSQACPNNISGCTLTPLDLCDVTNEITLPNHQGSVGPSTPSNLNSRLPGSPAMVLGNNSPFPSTLSSPRDAQKYGVPRPISLQGDEQPKIQYNQMVNDRNLHEPGVSAPGTTPSGVDCGPGALMMPSAPAMGTVAGLNRGMPGAKPGFPRISSPVMLNAVPSGNLFPNSGQGVLNTVNVHPGAISGPGNSILRPHDPMQTFRPGQGMEEHRQMSEFDMPVSQGSGQATIQFSSMNSSFSSPPVQQPQRPHQMSQSLHMFGNPHHSQIQGTSSSSQQQAYAVHLAKERQMQQHMAPQQHSDLSGASAVPNVQSNTQTLQQGQTSSANSAPCSKSQHQRQQAAQNLPDSSSSPNQPATFTQQKQKKQQEQQQSRQNEPQRNRGSQQAKLMKSLGRGNMMAQTPPIDCTPTNAASTPSKNHVSEKLVQHGQGHFPANTTPVPSMPQPRLVTSLPQSPTKVADIGNQGLKKGGSLSQAMLALQQPPHGSKSTLTTQLQQRQVNPPQNNNGRAVVQQNRQMNSDCRTDLHVGQVRHNQMVPTSMPQSADSCSPVLSSVNQQKREPSLNQTSVTSPSNLLRSPKDTSFG

SEQ ID NO: 226654 - protein, 1070 aa, Zea Mays
MLPTPWSSTFPSPATGFLLLLALLPVASGTSVPTLGGFDRGEAAGADAYSILTFHDYTPPPPPVLPPPPAAPAATCAGDLHGVGDLDTQCVVHESVRLGGGVFISGNGSLLILDGVAVTCERPGCVVSANLSGDLLLGNRSRVVAGWVSLAAANITLGEDAVIDTTALGGDPPDQTSGVPTGTYGDGGGHGGRGASCFVKKGQAQEDSWGGDSYAWSALKTPNNYGSKGGSTTVEKDYGGGGGGVVWLFAEEIVMNGTVLADGGDGGTKGGGGSGGSIYLKASTMQGGGKISACGGNGLAGGGGGRVSIDVFSRHDDTQIFVHGGKSSGCLDNAGAAGTLYEAVPKSITVSNNNLSTQTDTVFLDPPYEPLWTNVFVRNCAKVSLPLRWSRIQAQGQILLSGATLTFGLTHYPYSEFELLAEELLMSDSTIKVFGALRMSVKMLLMWNSRMTIDGGRELGVGTSLLEGSNLIVLKEASVIHSNANLGIHGQGVLNLSGQGDTIEAQRLILSLFYNILVGPGAVLRGPLINGSRDEMAPKLNCEDESCPMEIFHPPEDCNLNSSLPFTLQICRVEDIDVSGLVQGTVVNFNRARSVTVQTSGTISATGLGCRGGIGRGKMLSSGFSGGGGHGGKGGDGIYNGGHVEGGSAYGHADLPCELGSGSGNVSGSSTAGGGIIVMGSLEQSLPNLSLSGSIEANGGNFTGLMSHATIGGPGGGSGGTILLFVRTLLLKKDSVLSSVGGVGGNGSGGGGGGRIHFHWFDIPTGDDYIPFATIKGTILARGGVSEGQGFSGENGTITGKDCPKGLYGTFCKECPSGTYKNITGSSKSMCSPCPPNELPRRAVYISVRGGVAEPPCPYKCVSDRYSMPHCFTALEELIYTFGGPWLFGLLLSGLLVLLALVLSIARMKFVGTDELPGPAPTQQSSQIDHSFPFLESLNEVLETNRAEESHCHVHRMYFMGPNTFSEPWHLPHTPPEQISEIVYEDAFNKFVDEINALAAYQWWEGSVFSILCILSFPLAWSWQQWRRRKKLQKLREFVRSEYDHSCLRSCRSRALYEGLKVSNVPDLWR

SEQ ID NO: 226655 - protein, 1065 aa, Zea Mays
MDSLLSKGKLEESLFDSAGEISSEDVGVPPGDQRWLCPACVCKADSIDALNELQGSKLSIHDSWEKVFPEAASIANGSKQVDTSDLLPDHIKHSDNPALVEGLMVNEVRLSAEDDSKADDLGLPSEDSGDGDFDPSGPDSSEDQKDGLNSEESDFTSDSDDFCAEIAKSCGQDEVSASPLSNVINHTYRMKLRASNNRSNEENHDHVFMDMELGQDMVLPVSSRRQVERLDYKKLYDEAYGKESSNSSDDKEWSGKELLEGSETDSLSERPHPVKRCSRRAQAEQQNNEHTPQRERLHGSESEQKTGILRSNGSSSTGRKFGPVATQKLKVHFEKDPYPSRETKENISEELGLTFNQVSRWFSSTRHYSRVASARKEMHPDGHTSENNDTTTVDSMQARQPNTVVMEKLTGNRNDIVSEKPMVQNNLNQGVAEKLTRDRNDIVPEKQVVQSNLNQCNNEDIPLSGTEIEMESYEQESSESSDEEWSTLSTPRKTKLQGNEKVSLTESLRSAKRCSRRAPAREQNNEHTQSEQLHGSASEQQAREQLHGSVSKQQTEVLRSNVSSGDASKCHFGPIVTQKLKEHFEKDPYPCRATKEGLAQELGLTFNQISKWFSATHHYSRDAVAKNQKYPGENTTENNSSTIFDGIQVIEPNFGLIDKPDADTNDMISEKLMVQINLNEGIEEDIPPSQYTTRCEEKLTMTQAAISREAGPPGYGPGENFLQVSSRITSCEQSVIMAPSAIARGVGPPGYTPGEHQGNGAPWNTSYERRPFTSPTTSSREVGPPGYGPEENQGSGISCNTSREQILFMSPTTISRELGPPGYLPRENQRSDTSWNTSCESGLFMSPATTSIEHGPPGYGPGENQENDSTSCELRMFTSPTIVSREVGPPGYQQGVFMSPKTISREVCPPGFGSGENQGNDTTWYKQSAFTSPTTISREVGPPGYGQEDQGNGGSWNTSCEQGVFTSPTRGISREVGPPGYGPGESQGNTTSWISTCQQRMLAGIQRTGGSRSMDLEAFPPGYGPGGASGSVISPQARSAENVEFSDEARKKAIQRELRRRQKFR

SEQ ID NO: 226656 - protein, 1054 aa, Zea Mays
MDSLLSKGKLEESLFDSAGEISSEDVGVPPGDQRWLCPACVCKADSIDALNELQGSKLSIHDSWEKVFPEAASIANGSKQVDTSDLLPDHIKHSDNPALVEGLMVNEVRLSAEDDSKGDGDFDPSGPDSSEDQKDGLNSEESDFTSDSDDFCAEIAKSCGQDEVSASPLSNVINHTYRMKLRASNNRSNEENHDHVFMDMELGQDMVLPVSSRRQVERLDYKKLYDEAYGKESSNSSDDKEWSGKELLEGSETDSLSERPHPVKRCSRRAQAEQQNNEHTPQRERLHGSESEQKTGILRSNGSSSTGRKFGPVATQKLKVHFEKDPYPSRETKENISEELGLTFNQVSRWFSSTRHYSRVASARKEMHPDGHTSENNDTTTVDSMQARQPNTVVMEKLTGNRNDIVSEKPMVQNNLNQGVAEKLTRDRNDIVPEKQVVQSNLNQCNNEDIPLSGTEIEMESYEQESSESSDEEWSTLSTPRKTKLQGNEKVSLTESLRSAKRCSRRAPAREQNNEHTQSEQLHGSASEQQAREQLHGSVSKQQTEVLRSNVSSGDASKCHFGPIVTQKLKEHFEKDPYPCRATKEGLAQELGLTFNQISKWFSATHHYSRDAVAKNQKYPGENTTENNSSTIFDGIQVIEPNFGLIDKPDADTNDMISEKLMVQINLNEGIEEDIPPSQYTTRCEEKLTMTQAAISREAGPPGYGPGENFLQVSSRITSCEQSVIMAPSAIARGVGPPGYTPGEHQGNGAPWNTSYERRPFTSPTTSSREVGPPGYGPEENQGSGISCNTSREQILFMSPTTISRELGPPGYLPRENQRSDTSWNTSCESGLFMSPATTSIEHGPPGYGPGENQENDSTSCELRMFTSPTIVSREVGPPGYQQGVFMSPKTISREVCPPGFGSGENQGNDTTWYKQSAFTSPTTISREVGPPGYGQEDQGNGGSWNTSCEQGVFTSPTRGISREVGPPGYGPGESQGNTTSWISTCQQRMLAGIQRTGGSRSMDLEAFPPGYGPGGASGSVISPQARSAENVEFSDEARKKAIQRELRRRQKFR

SEQ ID NO: 226657 - protein, 139 aa, Zea Mays
MPMEVVEEVLKEASILNIEEEQPFDDLSRMLKEATSWEEKARLILERSASLYEFEDHMRCSEGIRVILPSKLHMKAEVDIAKLWIDKCQAYLRPSCNKLAFGDFLKVDDIKVHKIWIVLTLDLWQLVNNIFQKHARPAP

SEQ ID NO: 226658 - protein, 198 aa, Zea Mays
MRLLLFGGHGTGGWLSRYDVYYNECIILDRDDPIAKRDLVPSIDSNSKPSTVTDDNQLLNLKESQALENPITELAKRLGIALSEEVSASFVDEANDKELVELSSRLAGQSLPASDQVASIQVLRDHWKSSPASSLQLQELGPLLRDYQRLILRHYTGNSLPAFREMEALRFFHLKSASQLRMDDIPVLLSEYGRLLST

SEQ ID NO: 226659 - protein, 215 aa, Zea Mays
MRSRGASARRSRGEEGDAAGAPHHQGDSGSASEGVGTGDDLEDLPGDLGLALSVVGDGEVLAELDGVVGGAAHGAHPGGELAGERLLQGTEDLAVEVEREQRVQDLHGVLLELHHGGEGLRLDLHLLALHGELPLLGGEAEELVLGGVHADAVDVADLALGRHGEQRLDDGVGAHQRHELGVEQLHLVHLLGDEERVDEVADGLRVLDGGHAAHL

SEQ ID NO: 226660 - protein, 179 aa, Zea Mays
MATTCDMCGYRNSELKPGGEIPAKGKKITLRVQNAQDLTRDVIKSDSASVKVPELELELSCGTLGGMVTTVEGLIVKICEALERIHGFQLGDSTLEWKKKKWDDFKERLSKLLSLQEAWTLIIDDGLAASFVAPATDSLEDDSQLTIEEYQRSWEQNEELGLNDMDTSSADAAYNTTNT

SEQ ID NO: 226661 - protein, 151 aa, Zea Mays
MAEQDGDAGQRPPDSVPVPLEAEACEKGGSDEVVVFFVQIVSIANGMVNPVREHSSVLMKTQLEPLQKSRRRLQGLPCYPEIMGRSPILQLKIILAVEPLTPSEGPRIGENIFGYTIVDIFSSSCRGHHKNPPSEPYVLEIMLEVEAVCKA

SEQ ID NO: 226662 - protein, 160 aa, Zea Mays
MLESVWILSAVRLLMLMCQFSETGVIHSIQIFQVVGNAVMLGEIINYVQSLQRQVEFMSMKLATVNPQVDLNSLPNVLPKDSCGPPHFSLETSGASLSYLSQPHHGSPLGCMDNQSCMHPLDTTFCLAINLQYHFLNGVSDASSQTSMESKEEHYPSMTN

SEQ ID NO: 226663 - protein, 160 aa, Zea Mays; identical to SEQ ID NO: 226662

SEQ ID NO: 226664 - protein, 240 aa, Zea Mays
MLLVHLRAADRWERVAAVLPGRTVADVTAHYDDLEVAVGSIEAGFVPFPATAAAAVARRSGPPGSRSSGTATPAGRALSAPATWLAAASASAGQTTSARRASPGRRRSTSIIADSSLSNHHEDSLGSGLPSISTGKPFDSDEVPPGVTLTAQFPYHLANKVIGKLMMDMSSLYDVGRNKRSAGLLIVDHIVDLLTPCFHGDSFLDRMLSLLPHKENMRSNSAAKNPQTPSKHSQGTIKRS

SEQ ID NO: 226665 - protein, 274 aa, Zea Mays
MRFVVTKVCSGGGKARAGALHIAGAGIGIETPALLLSTRKGLPAFLSCDLLASLPLPDSLLLHVCPTHFIEGPPVKTISAIRGLHGMLGLPDHILVAAASDSIESLPSCEATNKFGASFETPSGRRLVKPSDYMELISCMKPNIWASLADEVPAWVTEKRNKVSVDRTLRWLDACIALDVASGTNSFGVIVGGSSLEQRKLCATEVSKRNVSGFWIAGFGFGESIEERCTLLNATTDCLPREKPRLVSRLGLPEEVLEGVAADTFTNLLWVVSH

SEQ ID NO: 226666 - protein, 150 aa, Zea Mays
MSTSGIGTGFGFLMSTSTTRSARWRLMCGMWMPHTSAVGLPNPTTSSIFSPMSWMKSFTLSMKPPPPCSLSPPSSCLSLPPRSVTVTVGSFSADDDMLALLDCYSAEGDPNADEASGNRVPCTRACGKGGRWSVGDWGRSRLRLALPTAL

SEQ ID NO: 226667 - protein, 371 aa, Zea Mays
MGLTMVVTEGIYNFITLMTVLLLDFYNKKKENDSGVSKYMLKHPSLNYDDRKRLEVFLDNHIPIIGGVVGYIVIGTMCAVVTPWIFHQIKFYHIAILFVTIFPLFFFSNTYVTGLTDWSVSTTYCKVVLFIIAAWIAKPGAVIAGLVACGLALISLNVSCQAMQDLRTGYMTLTSPRVVVAGHMYGVLIASVINPLIYLFFKAHARKSGPLGTKNSIYPCPSAAVYRAIALLSTGGVKELPKHCFTFCFITIFLTVTVETVRLVSQRKDWKVQHYIPCMTAIALPFLVGPTFTIDFALGSVVLMLWTKVNRQSAALLSSAVAAGLVCGDGIWYLPSSLLGFFNVDPPICMRFLASGKPAEMADAFLSTLGT

SEQ ID NO: 226668 - protein, 657 aa, Zea Mays
MDATIGESAPSVERAFEGQPHPGFWGLVTPRSMAVAVVYAFVFSMVSMRIYMIVGLVGAFNMPSNILCFVTLRGLVSLLRRCGIAAAPFTRQENVFLQTSVITCVNVAVANKEDVVEDVPMGRYGLLIFFASTLGIMAMIPMVKVMILDYRLLFPTGSVVAHLINSFHTPQGAYVAKLQVRALIKAFAGSISWSIFQWFYTGGDSCGFQVFPTFGLELYKRRFYFDFSASWVGLGMIVPHVVNFGLLFGGCISGGIIYPFLQSKKGQWYHTENPSSLNGINGYKVFMGLTMVVTEGIYNFITLMTVLLLDFYNKKKENDSGVSKYMLKHPSLNYDDRKRLEVFLDNHIPIIGGVVGYIVIGTMCAVVTPWIFHQIKFYHIAILFVTIFPLFFFSNTYVTGLTDWSVSTTYCKVVLFIIAAWIAKPGAVIAGLVACGLALISLNVSCQAMQDLRTGYMTLTSPRVVVAGHMYGVLIASVINPLIYLFFKAHARKSGPLGTKNSIYPCPSAAVYRAIALLSTGGVKELPKHCFTFCFITIFLTVTVETVRLVSQRKDWKVQHYIPCMTAIALPFLVGPTFTIDFALGSVVLMLWTKVNRQSAALLSSAVAAGLVCGDGIWYLPSSLLGFFNVDPPICMRFLASGKPAEMADAFLSTLGT

SEQ ID NO: 226669 - protein, 555 aa, Zea Mays
MDCHTGKCVKVLSGHRRTPWVVRYHPLHSDILASGSLDHEVRLWDANTSDCIGSQDFHRPIASIAFHGRGEILAVASGHKLYIWNYNKRDDASVPTIILRTRRSLRAVHFHPHGAPYLLTAEVNNIESADSPLTLARSSGYSNYPSALLVSNTNSRFCPLPESNVTSPCLLWPAYLRDDGILHVLGNASSSTIVQQRSSLVQPSTSDTANLQLEQFATPMDVCPGEPTSFNNISDAVTVPTSNAIEMHGAGGQSNPRLQGSSSISNLERFSARDALQVSSLSSIEPIPSTAGSSGSNSRRAMPLNMLLTGGLDVQMFQRNVGSGQQDHFLFGDSSNWEVPFVQGFLMTQNHTGLHPALVNNNVLEDLSGAGTAGINNSTRESSHMHNFGRPGASSSIPLTSGSSRRPNRHYASRSVPGVGSLLLVGPQIDEAEAHAASLGAGSEITASMLAPGTELPCTVKLRIWRHDINEPCVPLAPEACRLTISHAVLCRFGDILASRAIRAAHCLTSIQFSPTSEHILLAYGRRHSSLLRSIVVEGENGIPVYTILELHDTF

SEQ ID NO: 226670 - protein, 206 aa, Zea Mays
MHMETFVMIIIKRLKDANLFVSQGGLIILDFFFLISVVIGLLAESSEEVKTDTDRNVLVMFDILRLSFAQTVENVFALSFLVKDGRVEITVDDSRHIVRPRNAPAASAIASGEVSYSHFVFRFDFKDWKLMKEVVTEGEELLPHRTSQSNLCNEENDQINLEARAQITPIRKLTRNRGLVLQDHVVEETPEENQAFKRRRLFRNQD

SEQ ID NO: 226671 - protein, 353 aa, Zea Mays
MAKARKQKGDGSGTGGGATVLHQKLCLSIDMENQLIYGYTEIKALLAENDTFALHADNMTIRSILVDGETVEFDYSPHWKNETDQPNWSSISCLNTVADAACSTYTSSLNREATPNLIVSSERSIKSMIEQQLDENSEKYEENSGRLEKHGGKTIQTSYDQIVNGCNGSAVEEGIENSAVEEGKKKEKEKEKEEKNGNEKSKENGNETENEKSNQIRRAHCWFPCVDTATQRCPFDLEFTVSTDFIAVSNGDLLYQVLSKEDPSKKTYVYKLNTPVSAQWISLVVGPLEILLDRNDINVSHICLSPALSKLQNTIAFFHDAYSCYEDYLAAPFPLGLYKQIFLPSEMTVLPAS

SEQ ID NO: 226672 - protein, 52 aa, Zea Mays
MAKARKQKGDGSGTGGGATVLHQKLCLSIDMENQLIYGCSVLLSGDGLRRQD

SEQ ID NO: 226673 - protein, 670 aa, Zea Mays
MAQLLHHQDSGFYDKELHGCRWGILQFFGFRRRQRSAKMQPDKKHGPEKNSRGSRRRSRSYAPLKNEDSEILDDDKNTEVTKKQKASQKNSGKASLRSLILRKLYGKEGQEEKMLPVAPKLLRTISTDDISMKRKSHRSISMDGVLHKVPYGKKVSGDVISEGLPRSASATYDRDGVKPYFGTATKRHVNQGFRRSRSLSESWESYSRLLDSISSNESKRVLTSSKSTRVHSPDGPSVIASLQRTSEAFRSQGLDKRDENLVTAEDASAPHFEEKTDVDVDVEVAKGESSSDTVPGGSENPPLPDEYVDHKSEEDTCTAPSPSEAVDVSEEQTVSCDDNNQVPSSEVKLYGDCSTSSGIDIPEEHAEIYDDNQIHSSTQADSYTSLSSKGITISEEHTSTSHENQMHPFQISKPIEGTFCAPYPGGEFEADISLSCEQETESPMSILHVAFSDDPDSPVKHTPLDDTLLNPRILHLDNADASAGTAAIQKGDFDGLQVDPRHEIEFNHVKDIFKKSSFSNEILFDEWCSQNITALQEVDCQHYEAAAASFDFTDMSADQLLLFDLTNEGLLDIYKKYSVSESRFSWFSSFDRPKPVGNRVLKELWSGLSCHLDERPRSSIEVDTILSNDLVARSDPWTTFSGDADHVGNKLVDFVFDKLLTELVLQLAEF

SEQ ID NO: 226674 - protein, 997 aa, Zea Mays
MGGDSGGKEIEKVHEYDTTKTVRENNIFSQDEINNFQQYILRIIGSSQMAGTSLTQSGTTQSPSSQMCTQMSFPYVSNQGGYMDLMMEQIRNSQGESASDECNEMHSGMDTQNETMNNTTLEKPWETYTQMILESDTLLADANMSKERCGAWEKAINICSITQRRIHTRILKWMDVQETFGGCIEAGASKYGEAVYHRDLFEGMHVEQLPDCAPNVDGRAVETSSARENFDAAEFKKTDGSEEELTEDQIDAFIMSEQIAALEGNNAPIDSKYTPQVGMEFKTRGDAEHFLFFYGFLAGFKPAITHTFRTSNKKRNNEVTKVELKCNKHGKTKKADQQEQDNCIEHQGSEKGPKRNTNVQVKTDCRVVMVIKEHQQKWVIDRLDLEHNHDLRPADSNNMFSGHKYMTEMEKGVIRTLNHNNIPTRKMIAILSYLRGGMTALPYKKKDVSNYRTKLNKEVTGNDMTQALQFFQEKQKEDPNFFYRIVIGEDKKVKHMFWADGTSLKYYEMYGDCISFDTTYMANKYNLPFAPFVGVTGHAHTCLFACAFISDETIETFKWIFSTFLEAMGGKHPRTIITDQDKAMRTAIKEVFPETVHRNCFFHIKSKCYQKNGNCFARNLGMAEDFEDIVNYSLTVHEFERDWKKMVEDYHLENNKYFNKMWETRARFIPVYFKNDFFPFLQSTGRSEGTNSRFKDNVASTYSVISFLREYQRIVEQVNVSEEYEDNESNRKRPKELMFGYTIERQAQEAYNRNIFKKFQSQLQTTPKLSYNRTAAPHTFEVYPKTNQEHKPHKTRRYLVMANLTYGMEEFTYVCGKFDKDGILCSHILKVIIEEGLTKIPEEYIMDRWKKKQNQKDTPLMHASMATHPVLRHNLLSRKAALLTSAAAKTEKTMQYISEELDKLQEKVCQMLSSEEVIIGGPWTGTVGGNNAENQSRPIVEILKNPEAVKQKGRPKKPTRLKPIVEEIRSKMKKAEQKKTRKQTMQQQAHKEKRRRR

SEQ ID NO: 226675 - protein, 638 aa, Zea Mays
MGNVCVGPRFSKNCGFFGNFSLWPSRSRNSGTPSNPTTTSRSVPVVQVQPSESDAKPQPAQSTAAPAPVVISEPAQLSQPQPASKPDPSPPLPASQQHAQAQQQQASAPRQQSRKKAAHIKRISSAGLQVESVLRRKTDNLKDMYSLGRKLGQGQFGTTYLCVDKATGLEYACKSIAKRKLVTDEDVEDVRREIQIMHHLAGHPNIIAIRGAYEDSVAVHVVMELCAGGELFDRIVRRGHYTERQAGELARVIVAVVESCHSLGVMHRDLKPENFLFVGNDEESPLKTIDFGLSMFFRPGEEFTDVVGSPYYVAPEVLKKRYGQEADVWSAGVIIYILLCGVPPFWAETEQGIFEQVLHGSLDFDSDPWPSVSGDAKDLLRKVLVRDPKKRLTAHQVLCHPWLQTIASAPDKPLDSAVLSRLKQFSAMNKLKKMALRVNKLLLSCDTIYRFQGTNMDVSHLQFVAQVIAENLSEEEIAGLKEMFKMMDTDNSGQINFEELKAGLEKVGANMKESEIYQLMQAADIDNSGTIDYGEFIAATLHLNKIEREDHLFAAFQYFDKDGSGYITADELQQACDEFGIEDIRLEDMIGEVDQDNDGRIDYNEFVAMMQKPTAGYGKKGHRYNLSIGFRDALKANS

SEQ ID NO: 226676 - protein, 617 aa, Zea Mays
MGNVCVGPRFSKNCGFFGNFSLWPSRSRNSGTPSNPTTTSRSVPVVQVQPSESDAKPQPAQSTAAPAPVVISEPAQLSQPQPASKPDPSPPLPASQQHAQAQQQQASAPRQQSRKKAAHIKRISSAGLQVESVLRRKTDNLKDMYSLGRKLGQGQFGTTYLCVDKATGLEYACKSIAKRKLVTDEDVEDVRREIQIMHHLAGHPNIIAIRGAYEDSVAVHVVMELCAGGELFDRIVRRGHYTERQAGELARVIVAVVESCHSLGVMHRDLKPENFLFVGNDEESPLKTIDFGLSMFFRPGACLSVCPREEFTDVVGSPYYVAPEVLKKRYGQEADVWSAGVIIYILLCGVPPFWAETEQGIFEQVLHGSLDFDSDPWPSVSGDAKDLLRKVLVRDPKKRLTAHQVLCHPWLQTIASAPDKPLDSAVLSRLKQFSAMNKLKKMALRVIAENLSEEEIAGLKEMFKMMDTDNSGQINFEELKAGLEKVGANMKESEIYQLMQAADIDNSGTIDYGEFIAATLHLNKIEREDHLFAAFQYFDKDGSGYITADELQQACDEFGIEDIRLEDMIGEVDQDNDGRIDYNEFVAMMQKPTAGYGKKGHRYNLSIGFRDALKANS

SEQ ID NO: 226677 - protein, 377 aa, Zea Mays
MPCCQLMLDAIMSMNHTATSTPSWLRRLHAKKGISVPSNLQIDDFINGDGSQPSLCLPVPTSSYHHHKNLLDISKNQHQKATETEQCKPPNSQTQQSPRFEKPHMPQPQPKAMISNVLGTPSIDPMDTLPLKAFRKKKKSTSSTLCNKSINKEMQTTFMMSNVLDVPSCNSIETTPYNPICKQPKPNTNVTNALAIPSSTPMNTIQPRKGMKMNTKGKNRYEGKWNGNIYYTIVDTSIDKCKGTKKSICSNDFMVSSKNPKQTFEQHDSIIKGKRRFNLLSNLQEKYEKDKEVTLQSTKVKNNHDTRDTTSAVIERPQSIDITTIDTSINGWKATKHLIHRGQVWEIVDRKSTIRPLHKKLSTMRKRKWLHTRNNAF

SEQ ID NO: 226678 - protein, 230 aa, Zea Mays
MALPNQGTVDYPSFKLVIVGDGGTGKTTFVKRHLTGEFEKKYEPTIGVEVHPLDFTTNCGKIRFYCWDTAGQEKFGGLRDGYYIHGQCAIIMFDVTSRLTYKNVPTWHRDLCRVCENIPIVLCGNKVDVKNRQVKAKQVTFHRKKNLQYYEISAKSNYNFEKPFLYLARKLAGDPNLHFVEAVALKPPEVTIDMAMLLSTGRRICSTMKFLPRATTTLRNLSCTLQGSWL

SEQ ID NO: 226679 - protein, 140 aa, Zea Mays
MALPNQGTVDYPSFKLVIVGDGGTGKTTFVKRHLTGEFEKKYEPTIGVEVHPLDFTTNCGKIRFYCWDTAGQEKFGGLRDGYYIHGQCAIIMFDVTSRLTYKNVPTWHRDLCRVCENIPIVLCGNKVDVKNRQVKAKQGL

SEQ ID NO: 226680 - protein, 632 aa, Zea Mays
MGKRSQKRLIRRHQDGSIGCMAGLIRMFYSRHDANKLLLDRKQPGSRRHSFSAFSGRRGHSRKNSKDLDEIDEYGDYNMEEPSSSKPTVKRLMEDELRKLKQLKLPNDEVERILADLGHGACLDKSSAQNSKAKKGDQNHIRGITTTAAPSGSLDPTASNCIKEAEENELEFALADFLGRIHRNCNNNGELCTEMKALIQTKIAELDNPPCTFAYEQQTSRGDEYDTAGGKHRCSSSKTQPKKFRDALEMLSSDTELFFQKSNSRILESAQRNQNRLIGNNLEPTKIADNTDSNKDPKSLNQHELATRRYGKESRNIFFWKKERSSPRQTAQGTSSSQPVNKIVILKPNPRREIGHAVAVSSTQAPKLGATESSKFSIKEVRRRFRIVTSEATKGIPSVSEDNLQKGQHWLNSSAFTIIKDTRQLAEQTSEGKFSSSVMKDFRSSNSGRQKKRKNDGPTEKNSSIITSSKDESVFYDEARKHLTEILKDKRQTTKQHPTLEISRSLVRMLSFPQSSTSSPRSSPRAKDCIYLSPEEASIRAIYKSNKDLLEEESQSGEFPENVVCDPSEALHEQAVQERWCVKEESQETTQEELDTLRTKEIDKLDCMGKNSNAWGTPAKQCTYKPSQVCFS

SEQ ID NO: 226681 - protein, 67 aa, Zea Mays
MAVLNLQWADRGLQDLLGPRNRSPPATSLLPFVSGLPLYLHQSEGSEATPLGGEERNCEPCVGEVED

SEQ ID NO: 226682 - protein, 144 aa, Zea Mays
MSAPLDRLARPCFEGFVHNDERKESRSDADNSEGDKKTKIGSFKKKAINAGNKFRHSLRRRSKKKTERGDSIKDIRDIKELQDVETFRQCLIDEDLLPPQHDDYHMMLRFLKARKFDVEKAKNMWSDMLKWRKEFGVDKIEGFK

SEQ ID NO: 226683 - protein, 201 aa, Zea Mays
MTPEAALDHVRSIRPRVLLAPSQWHAISSFGALTGGQLPVWSTNLACFLEAIEAGCTNTGNDTIVQQDNIDKENDSAMKLDVSSSMEKPSGQGPEESILESDCIGDVPIECDKHGDSEPLSMEGKIISGNVNVKNQISREDLKEAFKNFGTVRMRQQSETLGKHAMHFLAGYISMFSTQGPFQTGITRIILLGTMLLFFLT

SEQ ID NO: 226684 - protein, 114 aa, Zea Mays
MNVWNYVVTAHKPTSVSHSCVGNFTSPNQLNLIIAKCTRIEIHLLTPQGLQPMLDVPIYGRIATIELFRPHNETQDFLFIATERYKFCVLQWDTEKSELITSAPLLSPIPTRVI

SEQ ID NO: 226685 - protein, 1290 aa, Zea Mays
MAKGVGGGDPIPLSRFGALVAQLESVVASARQKTPDALLCFDLLSELSSAIDEAPKETIQLWQRKCEDALQSLLVLGTRRPVRRLASSAMGRIIEKGDVISVYSRASNLQGWLVDVKRAEATACAGAAQCLGEIYRLFGRKITAGLIETSSIVAKLMKYHEDFVRQDALLLLENALEGSGGGGAAAAYQEAFRIIMRGVSDKSFIVRAAAARCLKAFANIGGPALGMADFDSSMSYCVKGLEDSVSSVRDSFAEALGAILALAVNPDAQVKKGGKKQTASAKKIEDGVQKHLIVPFVKANGANAKELRIGLTLSWVFFLHMIHMKYGTPDSELQNYAIQTMEILQGNDSLDPHALACVLYVLRVGVADQMTELTQRDFLLFLGRKLESLNYTAATRVATLRILCYLLRSVGEVPAEFKDVLDNTVVAALSHSSAHVRVEAALTLRALAEVDPTCVGGLVSYGLTTLQALRETVSFDKGKSLNLELDSLHGQATVLAALVAISPKLLLGYPARLPKSVLELSKKMLNGFSRNPVAAIAEREAGWLLLASLLASMPKEELEDQVFDVLLLWAGPFTGNPESYLRHIQDWASELRVLSVAVEALTAFIRSFVYPSITTTDCGILLNPVLAYLGGALSLISSLRSKQVPNVRSALDLLTTRTLMAYWSLSNPVVYKTEHQQILQLCSSPFSDPSGWEESSCLKFLLDKRDASLGPWIPGRDSFEDELRAFDGGADGFLPCVWDDEISNFPQPESIRKMLVNQMLLCYGSIFACQENTVKISLLNNLDQCLKSGKKYLWFKFLITNACVALLSGLKEFLALRGAQSLPIDILSMIQSIFKAILVEPEISTAQRRAACEGLGLLARAGNDIFTARMARSLLGELVTTTDLSYTTSVAFSLGCIHRSAGGMALSTLVTPTVSSLSHLSKSSNFNLQLWSLHALLLTIEAAGLSYVSQVQGTLFLAMEILLLEENGYVDLRQGIGHLINAIVAVIGPELAPDSTFFSRCKSVIAEISSSNEMATLLESVRFSQQLVLFAPQAVPVHLHVQGLIPMLYSRQPSLRYLAVSTLHHLIERDPAAMIDENIEENLFSMLDEETDSETAMLVRATIIRLLYTSCPVCPSRWLAVLRNIVLATSIRRNTGEVLSCFGHNPPDSTSENDVYYGEDEDNMISSSKQQQIRCAGSISSQFPPRNKHLRYRTRVFAAECVSHVPIAVGAEPAHFDLLLARSAISQGTYLSNDWLVLKLQELVSLSYQISTGQFEGMQPIGVKLLCLIMDKVSDMEYEQSTIILFILSC

SEQ ID NO: 226686 - protein, 1696 aa, Zea Mays
MAKGVGGGDPIPLSRFGALVAQLESVVASARQKTPDALLCFDLLSELSSAIDEAPKETIQLWQRKCEDALQSLLVLGTRRPVRRLASSAMGRIIEKGDVISVYSRASNLQGWLVDVKRAEATACAGAAQCLGEIYRLFGRKITAGLIETSSIVAKLMKYHEDFVRQDALLLLENALEGSGGGGAAAAYQEAFRIIMRGVSDKSFIVRAAAARCLKAFANIGGPALGMADFDSSMSYCVKGLEDSVSSVRDSFAEALGAILALAVNPDAQVKKGGKKQTASAKKIEDGVQKHLIVPFVKANGANAKELRIGLTLSWVFFLHMIHMKYGTPDSELQNYAIQTMEILQGNDSLDPHALACVLYVLRVGVADQMTELTQRDFLLFLGRKLESLNYTAATRVATLRILCYLLRSVGEVPAEFKDVLDNTVVAALSHSSAHDMQLLHVQEKDMPPQYKKVNFSLMLVGCSHCALMKCKHETGYMSHLFLIMLSFCCIKLVRVEAALTLRALAEVDPTCVGGLVSYGLTTLQALRETVSFDKGKSLNLELDSLHGQATVLAALVAISPKLLLGYPARLPKSVLELSKKMLNGFSRNPVAAIAEREAGWLLLASLLASMPKEELEDQVFDVLLLWAGPFTGNPESYLRHIQDWASELRVLSVAVEALTAFIRSFVYPSITTTDCGILLNPVLAYLGGALSLISSLRSKQVPNVRSALDLLTTRTLMAYWSLSNPVVYKTEHQQILQLCSSPFSDPSGWEESSCLKFLLDKRDASLGPWIPGRDSFEDELRAFDGGADGFLPCVWDDEISNFPQPESIRKMLVNQMLLCYGSIFACQENTVKISLLNNLDQCLKSGKKYLWFKFLITNACVALLSGLKEFLALRGAQSLPIDILSMIQSIFKAILVEPEISTAQRRAACEGLGLLARAGNDIFTARMARSLLGELVTTTDLSYTTSVAFSLGCIHRSAGGMALSTLVTPTVSSLSHLSKSSNFNLQLWSLHALLLTIEAAGLSYVSQVQGTLFLAMEILLLEENGYVDLRQGIGHLINAIVAVIGPELAPDSTFFSRCKSVIAEISSSNEMATLLESVRFSQQLVLFAPQAVPVHLHVQGLIPMLYSRQPSLRYLAVSTLHHLIERDPAAMIDENIEENLFSMLDEETDSETAMLVRATIIRLLYTSCPVCPSRWLAVLRNIVLATSIRRNTGEVLSCFGHNPPDSTSENDVYYGEDEDNMISSSKQQQIRCAGSISSQFPPRNKHLRYRTRVFAAECVSHVPIAVGAEPAHFDLLLARSAISQGTYLSNDWLVLKLQELVSLSYQISTGQFEGMQPIGVKLLCLIMDKFGKAVDPEFPGHILLEQFQAQLVSAVRMAISTASGPLLLEAGLELATRVMTSSIIGGDRLALSRLFSLITRPLSDIEGLLYPSFADWVVCKIKVRLLTAHAAVKCNTYQFLRMRENAPNEYQQLAPSLVNSSTLLGKYWIRALKDYVSISFGLHSKINYKPFLDGIQSLLVLSKVQRYLDEVWLLILKATALDAAPLDFDENNPKNLLEQTFISGHCMVKLDRTEFQFLWGLSILVLFHSCQSMKNNSLKINLDFKQDKNFGEFIVHGLDDKRPCDQVLRVLSSLTTEVFFSNNFISVDICQQLLQALTYADCSSAPIIHLFTQTNSGKHHLNWWGTREEVNPPSPCLRSCHTRCRQWPMPPICYG

SEQ ID NO: 226687 - protein, 1676 aa, Zea Mays
MGRMAAVGAAGESAAHTGGVGGGWLKVVHVAAIAEREAGWLLLASLLASMPKEELEDQVFDVLLLWAGPFTGNPESYLRHIQDWASELRVLSVAVEALTAFIRSFVYPSITTTDCGILLNPVLAYLGGALSLISSLRSKQVPNVRSALDLLTTRTLMAYWSLSNPVVYKTEHQQILQLCSSPFSDPSGWEESSCLKFLLDKRDASLGPWIPGRDSFEDELRAFDGGADGFLPCVWDDEISNFPQPESIRKMLVNQMLLCYGSIFACQENTVKISLLNNLDQCLKSGKKYLWFKFLITNACVALLSGLKEFLALRGAQSLPIDILSMIQSIFKAILVEPEISTAQRRAACEGLGLLARAGNDIFTARMARSLLGELVTTTDLSYTTSVAFSLGCIHRSAGGMALSTLVTPTVSSLSHLSKSSNFNLQLWSLHALLLTIEAAGLSYVSQVQGTLFLAMEILLLEENGYVDLRQGIGHLINAIVAVIGPELAPDSTFFSRCKSVIAEISSSNEMATLLESVRFSQQLVLFAPQAVPVHLHVQGLIPMLYSRQPSLRYLAVSTLHHLIERDPAAMIDENIEENLFSMLDEETDSETAMLVRATIIRLLYTSCPVCPSRWLAVLRNIVLATSIRRNTGEVLSCFGHNPPDSTSENDVYYGEDEDNMISSSKQQQIRCAGSISSQFPPRNKHLRYRTRVFAAECVSHVPIAVGAEPAHFDLLLARSAISQGTYLSNDWLVLKLQELVSLSYQISTGQFEGMQPIGVKLLCLIMDKFGKAVDPEFPGHILLEQFQAQLVSAVRMAISTASGPLLLEAGLELATRVMTSSIIGGDRLALSRLFSLITRPLSDIEGLLYPSFADWVVCKIKVRLLTAHAAVKCNTYQFLRMRENAPNEYQQLAPSLVNSSTLLGKYWIRALKDYVSISFGLHSKINYKPFLDGIQSLLVLSKVQRYLDEVWLLILKATALDAAPLDFDENNPKNLLEQTFISGHCMVKLDRTEFQFLWGLSILVLFHSCQSMKNNSLKINLDFKQDKNFGEFIVHGLDDKRPCDQVLRVLSSLTTEVFFSNNFISVDICQQLLQALTYADCSSAPIIHLFTQIIRFCPDNFFEVEAFVFSAIELLSQYLGLILQCRDGSSQNNSSNTLISELSIASETMAYRIKGEYLWKLVMLVVSTSHQSFQQVSTNLCFSNIICFLQNIFPFMRKIFRERVESDGECTSPKVVFGAMVGLVGYFYVECDKKISLLENKISDSYKLLNKILLFCLGEATALAKLVPEIIYRSENVSNNDVLLWGSFRLCVQVIQGSFRSTNIQVHMLGLQVLRSYAQKELTEGSETKLDSFMMLLTELLGDLFLVMETTLKECSNKKSVSVVDECLKLVFLFHTLAQSKKYRQDATTLLLEALLMVFSLSSDTVSQELAEVNTISRKLFSHFIQIPSVAIQIKDIMLSAPAERRLQLQDMVRASVSQGQITVPVATSAHSEQNIQDSCSKNPGSTSEASDCVATHGNNDNEVVDDDWDDDWDAFQSLPAIANDGVDSGEISLTTRYNEQIPQENSSYGSCNADITARAMEDITCVDKELEEPSDLQFSSTEQQPKHDLPGSSHEGCAKLERHPSVDCKEQLADDETADELQQQVHEDTDHVNKDSEVLSAEIHGVKLDILDEDVEDDSPMNSNNLSDIAEEES

SEQ ID NO: 226688 - protein, 107 aa, Zea Mays
MYGFTVDPGYKEWTRYFSEVRKGHTPLHGRAYYQMMECLGLVKIHSPMRGDPGRTVRWLPTKATIEAARVASEKLLKRPGAGSDDPLGTCTMIKKRRKGKAPNRSGL

SEQ ID NO: 226689 - protein, 112 aa, Zea Mays
MDSELEKNKTMDGDVGNSRSYGDPVASALNSTNFNIEEEKDNDFKRTSRPKNRFVITFLHNLVGFYYNLDACFALDVLTRCPYLGCKDATKMMLVVKEIFTCQIQVVRMPQK

SEQ ID NO: 226690 - protein, 163 aa, Zea Mays
MAKLVGRYRKVKKRQFLEFFKKKDIFNNDLGGPYAFLEKSQEKAVPAASKSSPASKKSKDDDDSDEDETDDSNEDETDDSDEGEGLSPKEGDDDDLSDEDDTSDDEEEDTSTPKKHEAGKKRAAESSMLKTPLSDKKAKVATPSAQKTGVPLNGLRKLSSKIV

SEQ ID NO: 226691 - protein, 183 aa, Zea Mays
MGLSFGKLFSRLFAKKEMRILMVGLDAAGKTTILYKLKLGEIVTTIPTIGFNVETVEYKNISFTVWDVGGQDKIRPLWRHYFQNTQGLIFVVDSNDRERVVEARDELHRMLNEDELRDAVLLVFANKQDLPNAMNAAEITDKLGLHSLRQRHWYIQSTCATSGEGLYEGLDWLSNNIANKMLK

SEQ ID NO: 226692 - protein, 193 aa, Zea Mays
MATALWHRTREVAALLDEIRTPKKPIEELATDVKLIPTPEKLEETLKAHGRSRRRRLRRRRWRRMTSCPLNESSTLASSHRGWAEPCQAQGGGQAARESVLLGRNNMDQNFGFAKSGCTQLQLIMAILIEEHKKETTNLMGTGGQINWIAVVSITLHVQPLRHFIMTCTQITYRLPTKKYRKRNKMNKPYVLL

SEQ ID NO: 226693 - protein, 144 aa, Zea Mays
MEVDEKPTKDYNDIGGLEKQKLGIRPPKGVLLYGPPGTGKTLMARACAAQTNATFLKLAGPQLVQMFIGDGAKLVRDAFQLAKEKAPCIIFIDEIDAIGTKRFDSEVRGDREVQRTMLELLNQLDGFSSDERIKVIAATNRADC

SEQ ID NO: 226694 - protein, 214 aa, Zea Mays
MEMLSMLKVGYTILRSETPATDLVNTFMDWAARRSLMLLAIFLPPYYIYKLTTSAFAAAVPEDVAGKVVLITGAASGIGQVARLALVARMVGSLHDVAARARDGGSPDVLVVAGDVAKPEDCRRFVQATVEHFGRLDHLVNNAGVANVCWFEDVPDVAALKRVLAVNFWGAVHATHCALPHLKKSGGGKVFVNSSAAAALAMPGMSLYNVLRIS

SEQ ID NO: 226695 - protein, 547 aa, Zea Mays
MDRKTYELVGPDYPGNRAEDVKDPSLGWMISFLFLIALVGPFSIVLLRKVMVIDYKLAFPGGTATALMINSLHGKTDGDLAGKKLHCLVKYMGISFVWSFFKWFFSGVGDSCGFDNFPTFGLEAFKSTFYFDFSPSYVGFGFISPHIVNCSVFLGSVISWGFLWPFISAQAGHWYPDNLGNSDFRGLYGYKVFIAISIILGDGLYNLVKIFIVIARELCSMQSKQHELPVQALEDDGSCEQLADEKLQTEIFLKDSISPWFAASGYIVLAAISTASVPAIFPQLKWYLVLLCYFFAPVVAFCNSYGMGLTNLNLAPTYGKIALFALASLVGSDGGGVIAGLAACGIVMSVACSTADLMQDLKSGYLTLSSPRSMFTAQLIGIALGCVIAPLTLWLFWTAFDIGDPDGEYKAPFAIMFREMAILGMEGFSALPLHCLDICYAAFFLALATSLLKDVAPANVSRFIPIPIAMAAPFYVGAYFGVDMFIGTAILYAWQKLNREQADGYAVAVASGLICGDGIWSIPSALLSILGAVPPICMSFEASSAPR

SEQ ID NO: 226696 - protein, 515 aa, Zea Mays
MTPAETSPPAPPPRASHPVSSPLLLQDPTTQATCPWREQLTVRGVAVAAALGALLCVVIHRLNLTVGVIPALNVASGLLAFFLAAAWRAAAGWLGFGRGPPFTRQENTVIQTCAIACAGLAFSGCSASYIFAMDRKTYELVGPDYPGNRAEDVKDPSLGWMISFLFLIALVGPFSIVLLRKVMVIDYKLAFPGGTATALMINSLHGKTDGDLAGKKLHCLVKYMGISFVWSFFKWFFSGVGDSCGFDNFPTFGLEAFKSTFYFDFSPSYVGFGFISPHIVNCSVFLGSVISWGFLWPFISAQAGHWYPDNLGNSDFRGLYGYKVFIAISIILGDGLYNLVKIFIVIARELCSMQSKQHELPVQALEAFDIGDPDGEYKAPFAIMFREMAILGMEGFSALPLHCLDICYAAFFLALATSLLKDVAPANVSRFIPIPIAMAAPFYVGAYFGVDMFIGTAILYAWQKLNREQADGYAVAVASGLICGDGIWSIPSALLSILGAVPPICMSFEASSAPR

SEQ ID NO: 226697 - protein, 386 aa, Zea Mays
MAIRKGSSYAVAALLALASVAAVAGEVFFQEKFEDGWESRWVKSEWKKDENMAGEWNHTSGKWNGDAEDKGIQTSEDYRFYAISAEYPEFSNKDKTLVLQFSVKHEQKLDCGGGYVKLLGGGDVDQKKFGGDTSYSIMFGPDICGYSTKKVHTILTKDGKNHLIKKDVPCETDQLTHVYTLIIRPDATYSILIDNEDKQTGSIYEHWDILPPKKIKDPEAKKPEDWDDEEDGEWTAPTIPNPEYKGPWKQKKIKNPNYQGKWKAPMIDNPDFKDDPYIYAFDSLKYIGIELWQVKSGTLFDNIIITDDPALAKTFAEETWGKHKEAEKAAFDEAEKKKEEEDAAKGGDDEDDDLEDEEDDEKADEDKADSDAEDGKDSDDEKHDEL

SEQ ID NO: 226698 - protein, 109 aa, Zea Mays
MVRQTAMVVKCLLLMYYKNSRGRSYRRQGQMLTIVEYFLLLYRALLPTPVWYRFFLNKEYGSLFSSLTTGLYLTFKLTSVVEKIGKGWCVAAKERTSCFCARKKDAKDL

SEQ ID NO: 226699 - protein, 489 aa, Zea Mays
MTKQEIPSSLCSQQLTKEIHVKNSGDLPLQVTKVKVSGADCGVDGFTVDNCKGFSLAPSESIRMLISFQADFSSAMVQRDLELVMTTGIFPIPMTATIPVCMLNQCRKSYLRSAHWKLLVILFGALALLILVFVRYAPDSLTVGSQDYIKIDDKKSAIFEENKKSTINKTLFLNQSSKKSRTNKEHKRTEEAVAEKYPASVVDSSKRADDKNKPDEQLHTTSTVSVSRGNPVEDKASREAPQTSENLTIRIARDKGKRRKRKVGAGLAGKFEVSSSHSGNSTPSSPLSQSSTPKHGWSFSGAPSEPKHENKVESRFDVEATASPTRANHEKKKTWSQVAKEQPRSRSASPGITSPPPSPAVTAPVAWRSPSLAPTSSPTAPQSRAPGSNLVKDKAVKRDVGAAAAAAAPSPKKEFTYDIWGDHFPGNLLVVAREAAPRKMPDASEGASYSLFAREPQTLMMKPSSSAPPPMSRGRGSPPSHVASGYGIK

SEQ ID NO: 226700 - protein, 278 aa, Zea Mays
MPAYRAQNGWSPDAWNKIVSEFHKKHEYVTFNKIQIQEKEREFKREYKVLKEARKQSGVSWNEKRCMIIAEPTIWGNIITTFPRAKKFRKKSFPLFDALSELYDGHIAQGTWNITSTQPLQNSDEGEKFKTIEVEDEDTNEPQVDARIEQDEDIVIVERVEQRLPKRSGAPTVNQEKETKRVRKDALEGLIGRYLDVKTKQVANEAAQSTKEKEVAQDNDFSIKRCISVLKTMDITRDEKIKAAEVFNTPNYRETFICFNDDEPEVALLWLRGKMDKL

SEQ ID NO: 226701 - protein, 709 aa, Zea Mays
MILHGRLVLLDPCNQKSSMPSVEFVMETLELMEEKAIGMSKSIYRYVIRALSRGGYAKELAVLQGNLPAAYDIWKECSRYYSPSIVTQRRFIRALTALGDLQSAYHILQHMVALAAQSCDYLRVSSKRRYRSSRLDIPVPALNEFEDLNLPSCQGKLATGEHLVDAQPELFDEKTRPGNNLSYKVVVDASVANTLKSAPSTVKQILRWAFNDVLHACVPFNNCQLAEHLFTEMQKLGLQPTSYTYDGFIKTVIAGKGIAYANKVINAMERRGIEPYSDTLAALSEGHSNSLQLDLAEEFLERISEIKPKHIGSFNALLSGCAIMNEPERAVRILAKMKHVNMKPTLRTYELLFSLFGNVNVPYEQGDVLSHVDVSKRISIIEMDMFNNGIQHSFVSMKNLIRAFGAEGMIEEMLRYLNIAENTLWNINPHQKSDLYSTALHALVDVKETHRAVKMFKIMRSCSLPTNISIYNTMIECCKWLPCFKSASALLSLMLRDGFNPTVVTFTSLLKVVLENDNFEGALDLLDICKIEGLQPGIQTFNTVLLRAYARGQIHVLEYILECIHRSKIQPDPSTLWYTFCAYEEHELYNTAIESLLVLSMRMISEDAGIPSEKRIVFEDLILSEEPDAEFRIIRAFQAGEEFLATALLNLRWCATMGATVSWSPEESLWAMRLAASYDANKRPHINPSDAPKSWGRNPLNRPYWEANG

SEQ ID NO: 226702 - protein, 96 aa, Zea Mays
MEQRKEREGLTLIKQSMGRIPRSPKADLKKVSKVKVLSKVKLLSKIMVLSKLKLLFKLVQVEVSLPVQSPIIRTRESILQDNLIRSACYATRRWLD

SEQ ID NO: 226703 - protein, 80 aa, Zea Mays
MGRIPRSPKADLKKVSKVKVLSKVKLLSKIMVLSKLKLLFKLVQVEVSLPVQSPIIRTRESILQDNLIRSACYATRRWLD

SEQ ID NO: 226704 - protein, 122 aa, Zea Mays
MDILDLRRTLTHRHQMCTRLPLGAMDIHHHPMACTRRRRRVLTPHHSSLHRGTRATSTTSSVLTTRRRMESINTTTTRETRVAPLGSSKDVGCSLLLLRAGGMLRLLLRREMSGNPIASYRR

SEQ ID NO: 226705 - protein, 991 aa, Zea Mays
MKKSITKQLIFNLMELLMVQIQLFFERREIICAVFNITFILPFSPSIRGAPPPPAMPPPSASAIATRFATHWIADALADDESFDFSVLQGEAPNPKLLRRSPERFRSLTWPLAGAPEATRERVALRCLQEASSVIAAGGDAAATAGVLRVDGARSCEDVLLRLIREVGSSRELEKDLLPPFSQDIQETICTKKSTLPETSFQLLKGLEPWITSMTPQSQMEHNDTEQCDIDQSLRSSHGCVNIEKPMFPTDNAEVQQETMADVVNGSETGNVQKDPPAPTSVFHQPCMHESRSYIPPQEDTIDVVGLGDRSLERSPIVEGNMSIGSVLASAGCDAPLQGRITEPFSQQDKHDHTATVEPKSCRQKSPNLSHCADGEGADDGGSSNQSSKVSIHEGPSAHAPVTSGFDRISGVLSTDASEPEHLSECIPAQDTSMISQLDSRKAHLSALQQERVEKVNQGPEDISANIGPVEKEHVHGDLTLQSASVLLSISCNGSNQGTKSETNLQPGTATEDRMAFEEQNAEKSHLELSGTNKANQALFDDGSVMKNNTVHGGLTAHTAPVSQSCSVTLHDKTSEANCFSEWKNEKNGQKDNCHTSIPGSSQDGGGESAKKTSNEVNSGDTSSKICVHSKDKDINDTLEGLSQQDLCIKCGKVGQLLECSSCSLAAHNSCFGSSVTFEETNLFYCPVCFYKRATEAYKKAKKTYGEARKNVAAFLGTIQVTKQHNEQLNGVQPGGANREDHSDTSKRTHENEVYNLAHQDEEPHQQMKKQKINAIGIDYRKEVLTEKVPFQNSGPASINKHSVLQNNGKTRVKDPEKKQQAGDEEARKEAGNEKSHETGASSQRRCDPPSNHDVEADQEGSLTTSIQSSGSDELEAKGLQEKKAAVSSKSRKGISKRDQHMPTSPRKRNSVHLQKRYSNPLAPPGRRKKLFWTEEEEAVLREGMAKFTPQNNAQIPWILILEHGRGVFHRTRLPSDLRVKWRSMQRKKWI

SEQ ID NO: 226706 - protein, 984 aa, Zea Mays
MKKSITKQLIFNLMELLMVQIQLFFERREIICAVFNITFILPFSPSIRGAPPPPAMPPPSASAIATRFATHWIADALADDESFDFSVLQDLVRASSKPLAGAPEATRERVALRCLQEASSVIAAGGDAAATAGVLRVDGARSCEDVLLRLIREVGSSRELEKDLLPPFSQDIQETICTKKSTLPETSFQLLKGLEPWITSMTPQSQMEHNDTEQCDIDQSLRSSHGCVNIEKPMFPTDNAEVQQETMADVVNGSETGNVQKDPPAPTSVFHQPCMHESRSYIPPQEDTIDVVGLGDRSLERSPIVEGNMSIGSVLASAGCDAPLQGRITEPFSQQDKHDHTATVEPKSCRQKSPNLSHCADGEGADDGGSSNQSSKVSIHEGPSAHAPVTSGFDRISGVLSTDASEPEHLSECIPAQDTSMISQLDSRKAHLSALQQERVEKVNQGPEDISANIGPVEKEHVHGDLTLQSASVLLSISCNGSNQGTKSETNLQPGTATEDRMAFEEQNAEKSHLELSGTNKANQALFDDGSVMKNNTVHGGLTAHTAPVSQSCSVTLHDKTSEANCFSEWKNEKNGQKDNCHTSIPGSSQDGGGESAKKTSNEVNSGDTSSKICVHSKDKDINDTLEGLSQQDLCIKCGKVGQLLECSSCSLAAHNSCFGSSVTFEETNLFYCPVCFYKRATEAYKKAKKTYGEARKNVAAFLGTIQVTKQHNEQLNGVQPGGANREDHSDTSKRTHENEVYNLAHQDEEPHQQMKKQKINAIGIDYRKEVLTEKVPFQNSGPASINKHSVLQNNGKTRVKDPEKKQQAGDEEARKEAGNEKSHETGASSQRRCDPPSNHDVEADQEGSLTTSIQSSGSDELEAKGLQEKKAAVSSKSRKGISKRDQHMPTSPRKRNSVHLQKRYSNPLAPPGRRKKLFWTEEEEAVLREGMAKFTPQNNAQIPWILILEHGRGVFHRTRLPSDLRVKWRSMQRKKSDAVDMEH

SEQ ID NO: 226707 - protein, 408 aa, Zea Mays
MLQSTEAVLQVIPYVKVFSRVAPEQKELVLTTFKSVGRVTLMCGDGTNDVGALKQAHVGVALLNAEPVQKVDSKSKAENKSGKLKNKKPANEASSQVTPVANSSGKASSSLSLTAAERQREKLQKMLDEMNDESDGRSAPIVKLGDASMASPFTAKHASVTPTLDIIRQGRSTLVTTLQMFKILGLNCLATAYVLSVMYLDGVKLGDVQATISGVFTAAFFLFISNARPLQTLSAERPQPNIFCAYVLLSILGQFAMHIFFLITAVNEASKHMPEECIEPDSDFHPNLVNTVSYMVNMMIQVATFAVNYMGHPFNQSISENKPFKYALYGAVAFFTVITSDMFRGLNDYMKLEPLPEGMRGKLMLWAILMFCGCYGWERLLRWVFPGKIPAWEKRQKQAVASLEKKHH

SEQ ID NO: 226708 - protein, 182 aa, Zea Mays
MMAHAPLLQSGDISFEPHETVVSMEYLLGLVLALLGGSVKMQDYSDERKSQILDVVKSLAGGFDMDVIFTRTDGFTMTQEWLLLDCLDLNLRHGWIAARDLLTGPEVSFESLTLASNEPGFPHAEEIKNFLRGPQLTPIGLVSLQEDFVENVPCILFWNKHYHTIVMINGVLNSLVTDSNYL

SEQ ID NO: 226709 - protein, 631 aa, Zea Mays
MGEAVTAAELLYGMPLIRSVAGDGAGAGVETAGCGALLVELKQLWGEIGKSREERERMVRELEAECMRVYRRKVDEATGERAALHQSLAAGEAEIAALAAALGSDSGPQLKVRAVARAVSFLQVNKWTMSLTERVSSATALLEELRAVKAERSRQFADVRSEIEKITAEIAGRSYGYEGSPRASEVGEHDLTIRRLNEYRARLTSFQKEKSDRLHRVLEHVTEVHSLCDVLGEDFIAIVNEVHPGLHETSDPGKPTSISDSTLATLAQVVATLAAEKAKRATMLREAVVPLVELWELMDSSEEERRSFRNVAAVLNPDKLDALPSGVLSVATIKKTEEEVERLTRLKAGRMKELVLKRRLELESICRSMHVEPDASTVPEKSIALIDSGLVNPSELMASIDEQIAKAREELQSRREIMEKINKWLLACEEEEWLEEYNTDENRFSTGRIARLNLKRAEKARLIITKIPAVIDSLMSRTLAWESERKKPFLYDGARLVAVLEEHKQARLRQEEERRRLRKKLRTLLSEKEAMPHLKRPGSSFGRAAEPCKVNRKRVDAGRLASSGGSGTTSGSSSSSGGGASATELIRPRSSAAGSGQCGEFFKGVRRLSAPPFNYVAVSKGRSMSSSLALS

SEQ ID NO: 226710 - protein, 128 aa, Zea Mays
MIHSLQNANTRNIVGDSIHTMGLRDLKQMEGKLEKAIIKIRARKNELLYAEVDYMQKREMDLQTDNMYLRSKIAESNETGQPAMHMTMGAPPTSEYDHMAPFDSRNFLQVSMPQHYSHQLQPTTLQLG

SEQ ID NO: 226711 - protein, 783 aa, Zea Mays
MAVQAHSRPQNVSRQLWPVLHHAVSECCLIIMLVTTAVLSYMATRFARMCSLRSPCMLCSRLDQFLHGKAWFSEELVCATHRIEISRLSYCQSHNKLERSDDMCDKCMLSCMTSSGKTYNLTNMHGRDKVKSRSRSRHKHMCSCCSMQFKKKRDSHMLPDITNSWFPGDDMSKLKQRNIVMSSVGYSSNDDYDHLPYEGYRKLKLGHESEYDIHISNSDNDERNAVSHEARERANHMPSHDALLQPMISNASGLLMPSFDNTIMTKATQPLNNVRDTDTHSSDTKDANSLDHAIGLVLDDISWSQINTSDKNIDVQSKAIPEEVLAELPKEKRSPGVEAAKDFNASANAGTRSSVDTHISWNNSPKIASACRGYYKSPRLSEIISARDTNSKTNEEVKTFLSQLSTARGFDSSLNEMTPRSSTHIDDYRQHDATGMTPFLDRNNSNLDSFDANTTSEDEGESSLEHLKKQAKFNKKKMGMLYKELEAERSASAVAVSEAMAMINRLQEEKASMHMEALQYLRMMEEQADHDQEAIEKLNDLLTEREKELLDLEAELEGYRSKLHDQPFDVGKFGATDGAMAFRVLEGSDFMRHTIFDFEDEKAKILESLHRLEEILGMPSIDMGDANDSLQNSLLSDQSMHISQDIENSELESLSLPREDMISESISSQCYDEQESVKYMHKHMHNHEQDDNESVDKQQKNVTSCSHSDDGNIHTMKSVKHEISLLNARFKALEADQDFLKQILRSLNVSSDGVECIQEITSHLRELRRIMADQRDMTVFMRS

SEQ ID NO: 226712 - protein, 1528 aa, Zea Mays
MDRIRDGRRGGVSVGGVPPPPPPRRRLRSNGGGGPRDSPRSERRRGERLMLNGGGGCASRDDGDDISDESLGDDDDDAEQELVPRYHQQRRSPSTAPPPSSPPPPGGGHHSSSSSGGGGYHNHHHGQHHQMQWKGGSNPIVSKAVDEMIGVPVPRKARSASTKRSSHEWPVPGGGTSGGSTGAGDGSQIQRPLSRPISPASASTTVPARKKLKPLGGGSSGGPGQASKQRPSPSPAPSTTPPQPPPPKMSKSPSFIQEEIEVAEVLFGLTRQFSCPPKQEVNHKLDPRDVPESKCGNSSSAPSSGARPSDSTSLSAIAPKRKKPRLAKYDEDSRPASPTKPELVEPSSKPEPPPVARSEAKMATSAATESGTSTAPAAVQLETLRKPEKTEDSELRPSEPDRRNHSLESQAELPASLPAPSVKPDAEAKPAPPPGKLSDDIDASSDPDADKKGLDSEMDMLGRGNSEKKDGERTLGGLDIDLEDQKVQRIPADESTPKKLTLQLDLEKPSLGDEKSPSQRRQPHQHPQQLQQLKPSKAEIKHEKSAMPAVTPPIPIPVGGWLGNFPPFGGLVSEGAVLCLGSYLSPVPGLSGAGLHHPMDVKPGSSSGLQHAALLPPPTRSKRCATHCYIAQFIQHQQRVAKMNSFWPPAVAAAAAAANRSGPLFGARPFSMGVVPPTDAASMLVNPMQGSYPIRAHTPMQEAKAPMATSFQGSLSKDKALGNAAGPESSQRKQPPAHETQQSTPMPNMLQALAFIFPFNQQHAMVAAANAANRAGDAKSSGASNAMPPSASAHTLAANSGATAMNLSFANLQPADAQFLAILQNGYQFQVAAHPGGPPYRGMAPPGPAVPFINGHVYSSPMLHPSQQQGAQPQSHQKTQLPNLPSSSQKHQPQHSQGLLGYAPNANAAAAASNSHNYSSGNQRPVLAHRQESDKTGEDGLSSDDKPSHSQKSGYEHNFAVPVHLPNFAMMPAAQPAGSQSEKKLSDHHHQQQQPQVSRGQGVRIDLASSQPFVMPFGSIGPPGSAPSGLDFSALAQSHAFLQSHQEAARHGYPQLNFAAAQSTQHKPQHGETKSVAGDSSLTHIAGDSQRKKSTSTKYSGDSQQHSLSFTRTESKNHVPPFLSGSTNESSSRTLSLIGTESSNTFMGSKSTNSTTPASTPPAASSSISQQHQHFLQMQVQHKHQHQQMIQHHHLNRPRSAAPSTQNSAGGYPDRLNMASFQNMMYPPNAAQGQGRVQSPQLKASSGRGTPSSTATTPPAAAPPNLIVMKTSSLHPQQAKIPMQALSTPGHQSQSSLSMSSSKMAPVTNLSTGGGDLSRSSNAPVASGSPSNSVSKSTGGSPPATGNAKGVQQPVQLPSPQQQLAKNSVSTCGSKSTPANHFSMAMPSILGQQPNSSPGSNTGSKQQSHMSSSMKQQPFPQGHFFISSTYAPQAPGAGGAAALGLYQKRPGDKTQPQAPHQQNALSAAAGSNMKSLHPSSGGFMHLAAATQSAGGGMPHTHMPAAQLSFGTMPVPLKPSSDQKPAAGK

SEQ ID NO: 226713 - protein, 313 aa, Zea Mays
MTLVEVEGTHTVQNAYASLDVHVGQSLSVLFTANRPAKDYRIVVSTRFTNATRLLSTAVVRYAGSSGPAPGPLPAGPGDDVDFSLNQARSIRTNLTASGPRPNPQGSYRYGSINVTRTIRLASSAGLVRGRRRYAVNGVSFAEADTPLKLADHYNISGVFRLGGIPDAPPPATAEEVRNETAVMDSDHRSFVEVVLENGEGGGVQSWHLDGYSVFVVGMDVGTWSKKSRDGYNLVDAVSRCTVQVYPRGWTAVLVALDNVGMWNMRSEVWARRYLGQQFYLRVYTPSHSFRDELPIPDNALLCGRAAGRHHSQ

SEQ ID NO: 226714 - protein, 640 aa, Zea Mays
MNPDNFTHKTNEAIVGAHEIAVEAGHAQLTPLHLAAVLAADKGGILRQAITGASGGDGAAGDSFERVLNNSLKKLPSQSPPPDSVPASTALIKVIRRAQSAQKKRGDSHLAVDQLLLGLLEDSQISDCLKEAGVSAARVRAELEKLRGGEGRRVESASGDTNFQALKTYGRDLVEQAGKLDPVIGRDEEIRRVVRILSRRTKNNPVLIGEPGVGKTAVVEGLAQRIVRGDVPSNLLDVRLIALDMGALVAGAKYRGEFEERLKAVLKEVEEAEGKVILFIDEIHLVLGAGRTEGSMDAANLFKPMLARGQLRCIGATTLEEYRKYVEKDAAFERRFQQVFVAEPSVPDTVSILRGLKEKYEGHHGVRIQDRALVVAAQLSARYIMGRHLPDKAIDLVDEACANVRVQLDSQPEEIDNLERKRIQLEVELHALEKEKDKASKARLIEVRKELDDLRDKLQPLTMKYRKEKERIDEIRKLKQRREELQFTLQEAERRMDLARVADLKYGALQEIDAAISKLESETGENLMLTETVGPEQIAEVVSRWTGIPVTRLGQNDKERLVGLADRLHQRVVGQTEAVSAVAEAVLRSRAGGRGRHGRGVKGGPEDAELRPGRRSGAGIIECLLNKRVDKPVNVETRMR

SEQ ID NO: 226715 - protein, 269 aa, Zea Mays
MCEPDTHTSDDERAGELLVALCAVDIWGSSPSGVSRRTMVETGIQWVERTLESSGDCFDMFHMRRTVFRRLHDTLVESYGLLPSRGVSTTEALGIFLWACGGPQSFRQIRNKFGHSLETISRKYSEVLNALYKMSSDVIKPKDPNFIEIHPRLRESRFWPHFKDCIGAIDGSHFPASVPATEQAKYIGRHGYASQNVMVICDFDMRFTFVVTGWSGSVHDTKVLQDTLITYADRFPRPPEGKYYLVNSGYPNRKGYLAPYKGQKYHILE

SEQ ID NO: 226716 - protein, 153 aa, Zea Mays
MQVLNSPWDVCYDPAEEAVYIAMAGQHQIWKHNLHDGVTKVISGDGYERNLNGSSATSTSFAQPSGIPLAFEMHELLVADSESSSIRVVNLKTGGSRLLAGGDPVFPENLFRFGDYDGTGSDVLLQHPLGVVYANDNQVYIADSYNHKVVTLF

SEQ ID NO: 226717 - protein, 103 aa, Zea Mays
MLQTPIAMATALSKSAVKSHPRSPTTAQPPPNPGSNAACLAKAVEGAGPGPGAIGMFGKLGPRICKLLGGHGVQAKAALLGVMGSLAQVTGQEFAMNVILYSG

SEQ ID NO: 226718 - protein, 294 aa, Zea Mays
MLENQRKMFGIFLRRSARPCVIFFDELDSLAPARGSSADSGGVMDRVVSQLLVEIDGLSDNSQDLFIIGATNRPDLLDSALLRPGRFDKLLYVGVNTEASYRERILKAQTRKYKLHKNVSLLSVAQRCPPNFTGADIYALCADAWFHAAKRSVETFETDPSRSNDASAEEVIVEIDDFITCQQRCLLVRARQVGRCEQNPYVIVSSGAILRGSAHGRGLGGLAGSFVPPNGFTCSASAQPAPPPLPLALPSGKEGGRRGCRTVNSSTRGTVPLASSPGSDPLPPPRKGEVLPEG

SEQ ID NO: 226719 - protein, 315 aa, Zea Mays
MLENQRKMFGIFLRRSARPCVIFFDELDSLAPARGSSADSGGVMDRVVSQLLVEIDGLSDNSQDLFIIGATNRPDLLDSALLRPGRFDKLLYVGVNTEASYRERILKAQTRKYKLHKNVSLLSVAQRCPPNFTGADIYALCADAWFHAAKRSVETFETDPSRSNDASAEEVIVEIDDFITCQQRCLLVRARQVGRCEQNPYVIVSSGAILRGSAHGRGLGGLAGSFVPPNGFTCSASAQPAPPPLPLALPSDSRNRRVLILDLIVLSEMIASGKEGGRRGCRTVNSSTRGTVPLASSPGSDPLPPPRKGEVLPEG

SEQ ID NO: 226720 - protein, 267 aa, Zea Mays
MDRVVSQLLVEIDGLSDNSQDLFIIGATNRPDLLDSALLRPGRFDKLLYVGVNTEASYRERILKAQTRKYKLHKNVSLLSVAQRCPPNFTGADIYALCADAWFHAAKRSVETFETDPSRSNDASAEEVIVEIDDFITCQQRCLLVRARQVGRCEQNPYVIVSSGAILRGSAHGRGLGGLAGSFVPPNGFTCSASAQPAPPPLPLALPSGKEGGRRGCRTVNSSTRGTVPLASSPGSDPLPPPRKGPSRGMTQRSPVTSPPSLATRLE

SEQ ID NO: 226721 - protein, 299 aa, Zea Mays
MGNFLPPEGMIKRCGCQDETNLPLRDKEISCYMFLFQVVLWFTDVLKRKSALEEHSSLITDVRFSPGMTRLATSSFDKTVRVWDADNPDYSLRTFTGHSASVMSLDFHPNKEDIVCSCDSDGEVRCWSINNGSCVTCVRVFNGGATRLRFQPRQGKYLAAASEKGISILDAETLQVCRTPLQGHVQIIQSVCWDAAGNYLASVSEDSVRVWSFTSGNYIECIHELICSGNKFHSCVFHPNYPNLLIIGCYESLELWDIREKNTVTISNAHDGMVAALAASSASGLVASVSHDQLVKLWR

SEQ ID NO: 226722 - protein, 705 aa, Zea Mays
MSQTNWEADKMLDVYIYDYFVKRNLQATAKAFQAEGKVSSDPVAIDAPGGFLFEWWSVFWDIFIARTNEKHSDVAASYIETQLIKAREQQHQQPPQQQQQQQQIQMQQMLLHRAAQQQQQQQRRDGSLLNGTASGFSGNDPLIRQNPANANSMAAKMYEERLKLPPQRDSLDEASIKLQQRYGENVGQVIDPNQALLKAAAAGQSSGQILHGTASGLSGTPQQVQARSPQQPPTAEQNIRTEINPVLTPRAAGTEGSLIGIQGSNQAGNNLTLKGWPLTGLDHFRSGILQQKPFMQSPQQFQQLQFLTPQQQQQLLLHAQQNLSSSMSSDVDTRRLRMLLNNRNVVLGQDGQTNSGGDVIPNIGSPGQSGGSRNDIDILIKKKFALLQQQQQQQSHSQQQQLQQPALSGQQSQSSNQLLHQHGKPGVGSLPIDGNLPNSFGFPEQGSKKRKKPVSSSGRANSSGTANTAGPSPSSAPSTPSTHTPGDAMSIPQLQYNGGPSKPLMMFGSDGTGSLTSPANPLGDVERLLEDGSLDENVESFLSQDDMDPRETMGRCMDSSKGLGFTEVAKARASTNKVVCCHFSLDGKLLATGGHDKKVVLWFTDVLKRKSALEEHSSLITDVRFSPGMTRLATSSFDKTVRVWDADNPDYSLRTFTGHSASVMSLDFHPNKEDIVCSCDSDGEVRCWSINNGRSYSVKISTSPG

SEQ ID NO: 226723 - protein, 1007 aa, Zea Mays
MGSWRQKLPGLGEGSGSGSQAAEAGGGGRGFRGRGGFYHQQQSPQGGRGRGTGYYSGGGGGRGGRGAVPSAIAPELRQAMQTSNEPDNIPAPEAGSQSQDAPSPSEEAVDQLKGLSVQDIVQAFPVSSKFPHRPGNGSVGTRCLVKANHFFAELLPAKKDLHQYDVSVTPEVTSRIVNRSVMEELVRLHKLSYLGGRLPAYDGRKSLYTAGPLPFTSKEFHITLLEEDDGSGVERRKKTYKVVIKFAARADLRRLEQFLAGRQAEAPQEALQVLDIVLRELPTTRYAPFGRSFFSPDLGRRRSLGEGIESWRGFYQSIRPTQMGLSLNIDMSATAFFEPLPVIDFVAQLLNTDDIYSRPLLDAERVKIKKALRGVKVEVTHRGNMRRKYRIAGLTSQETRELTFPVDQGGTVKSVVQYFQETYGFAIQHTYLPCLQVGNQQHPNYLPMEVCKIVEGQRYSKRLNQSQIRALLEETCQRPHDRERDIIQMMNHNSYHEDPYAKEFGIKISERLASIEARILPAPRLKYNETGREKDCLPRVGQWNMMNKKMVNGGRVRSWTCVNFARNVQENVAIGFCRELARMCQASGMDFALEPILPPIYAHPDKVERALKARFHDAMNLLGPQRREQLDLLLIGILPDNNGSLYGDLKRICEIDLGLVSQCCCAKQVFKMNKQILANLALKINVKVGGRNTVLADAVSRRIPLVTDRPTIIFGADVTHPHPGEDSSPSIAAVVASQDWPEVTKYAGLVSAQSHRQELIEDLYNVTHDPQKGTVCGGMVRELLISFKKSTGQKPQRILFYRDGVSEGQFYQVLLHELDAIRKACASLEANYQPQVTFIVVQKRHHTRLFAHNHNDQNSVDRSGNILPGTVVDSKICHPTEFDFFLCSHAGIKGTSRPAHYHVLWDENNFTADALQTLTNNLCYTYARCTRSVSIVPPAYYAHLAAFRARFYMEPDSSDSGSLASGARGGGAPSSSSTSRSTRATAGGAVRPLPALKDSVKKVMFYC

SEQ ID NO: 226724 - protein, 103 aa, Zea Mays
MTKEVLESDVYEVFERIQDPNLVYPDYYLNLFHAYDEGNLSWLAATEAEPATMSIAKRAIPEATSIEEANQIVCGNWLNVIEEHRLKYLGSSQVTWTLAALLE

SEQ ID NO: 226725 - protein, 506 aa, Zea Mays
MITDVRRAQGMALLTVSAALPRFRPAPCKPGGAVACQEAAPWQLAVLYVSLLLNAVGAGGYRPCIVAFGADQFDESRAAERARSWGFFNWYYFCNGASMLLAVTAVVYVQDNVGWGWGLGVPAFCMGVSVAAFVAGYPMYRRLEPAGSPFTRLAQVVVAAVKKRRLPAADVDPALLYEDDELDAPISMYGKLVHTDQLSFFDRAAIVTDGDLVTLTDADSGKPSTAPVPDLWRLSTVHRVEELKSVIRMGPIWAAGILVITGSSTQNTFSLQQASTMDRRLAPGLSTFEIPAGSMTVFGLLAMLFTLFVYDRALIRVARRFTGLDRGISFLHRMGVGFAISVLATLVAGFVERHRRDAAAAAGATDAGTSPLSAYWLVPQYALHGVAEAFTSVGHLEFMYDQAPESMRSTATALFWLSISLGSYASTLLVDAVHRWSAGPGGANWLPDNINHGKLDYFYWVVTVLQVMNLVYYAICAKRFTFKPVQLHKKEEEEGGKALVELQEKV

SEQ ID NO: 226726 - protein, 724 aa, Zea Mays
MAAALRLQRQSLAASPFLFSAHGLRTASSRSSSLRSIRVTSLHVRGNWVMASAVGYNVTMSAGVDTYTKSWEAPTATGVSFYPDYNNLYTVGCGVYVYVFGDNMTDIIGSCTSICTDNREIMESANTGSGACEGLGCCSIPIRGGQGFTLKLGRLNSTIPQFGEALSNVKIIFSQNYDFVTDDVYASWVVNTSNVHGMLLNIAITDQPSCASAQSQENKDTYACSSESICDDDLSPSGFNLPYRVTNLSLDDGLLMVTNMLNDTSSNNMERVVLVNYDGYNQNGFYSTDFYSTDEDVVDGNYDFSQEDTTIKWVIANITCHKAMQNNATYACVSDNSICKDVMRGNIRDGYRCKCSNGFQGNPYLQNNCTDIDECLIPNKCNGICHNVDGGFNCTSCPHGKEYDPKKKKCVMSAKQRILIFGIVIGLVCGLGSISFALGAIILTGKWKKGIQRRIRREYFKKNQGLLLEQLISNENATTKTKIFTLDELEEATNKFDATRVLGHGGHGTVYKGILSDQRVVAIKKSKIVEQIEIDQFINEVAILSQIIHRNVVKLFGCCLEDEVPLLVYEFISNGTLYDILHENIATKCLLSWDDRIRIATEASGALAYLHSAAAIPIFHRDVKSSNILLDDNFTVKVSDFGASRSLSLDETHVVTIVQGTFGYLDPEYYYTGSLTEKSDVYSFGVILVELLTRKKPIFINELGAKQNLSHYFIEGYRKGLSWK

SEQ ID NO: 226727 - protein, 2409 aa, Zea Mays
MNIVRGVADLLRKAPPPPPAPDAGAAPTASFSAGDFDDAPTPRVVFSGSLEEGALNALWKNYENALDKVEKEKSLQIFVLQFVETFRDWDPNPIEQLVDQELGNNETVVGCSCGHPSEVILILIQEISLITSTFTESGNSPVSPTNHYSGQQNNLGLSSQILQVLECLEILTRSLHNCRVFSYYGGVQKITSLLKAAVAQLKNLNCLLAAEDQSADEAVKNSRVMLNILVCIITIISNFMKLDITVGRIPHITDTTKHTPSCNHLAAVTSSSPDRTISDTLRHWQQKATVLVMEARCVNWLVELLHTVQRLNLKEQCIDLSLHFITLCILRSTVSGTRAQNHLRSIGGLEILLDGLGLPSSKFSVPRQSSISKNERDEILLLQIQYLQTLSEAVFGNVNNLQILFENGRVHKFANCICWPAFMIQMFHWQNDSTKASLTLDSVSGPTYSLDRTEWIDYSIKLSNAFCSFVLPSEDIGYCSDEIAVSQIVLSIPLAYLEQSVRWIIRILMTVFLCIRACTKETELPHHIKIFAKTLQYYVIRMFKRVLISTPALLPAFREEGVWDLLFSGNFFYFGSSIEDTCFHTVTDIQNGNVSSNRISIHSESLYRTDVKILQVEAISFLEFAATLHENTYNMPECSALLDALEHCISDPLLVSTLLKSFRVILQLATEHTLASFESLDVITRVLKAACRQAQELRNFSNFLCSNVSISQDSSQFKNIEGRTEDTLICTELALSLFMEYVTISIDGRILVLHNADCIDCLFDLFHEQNIREHVLEQVLALFRLPSSSAEDHTAKLQLCSKYLENLARANEKEKVNTELLIDLLVNMREIIMMDHMYYQNLFRDEGCFLHIISLLNGNFNKVTDERLVLNVLQTLTLLLEGNDASKNEDAVVLLLNILQKSSTSLQHYGLVILQQLLKQSITNRTSCFRAGLLSFLLDWFSVEERDDTVIAITELIQILGAHSICGKDIRKIFALLRCEKIGAKHKHTSLLLTSLSHMLKEKGPEAFFEFSGHDSGIDIKSPFLWPYNRGISFSCWLRVENFPDSGMMGLFSFFKEDGKGCSAVLNRSALVYESIYQKHQCVLLPLKLPPKQWRFLSITHTIGRAFSGGSQLRCYVDGELVSSEKCGYPKFNEAMTYCTIGTKLIPVGDGPISIGFEKTSAFTGQMGPVYVFSDALSSEQVKGIYFLGPSYMYSFHGDDSLYRGIVDARDGLSSKIIFGFNAQASEGRSLFSVSSALDNADKNTFQATIMGGTKLCSRHLPQDIIYCVGGVSVFFPLFTQFFDAASDIEKCCHTSVVNDKLVAEVIELVATVLDGNVSNQQQMYLLSGLSILGFLLQSATPQLLTTKTLSALKYMFDILRNCSMSKVLLKDAISQIYLNPQIWVYASYEVQRDLYMFVINYFETDGRLLPLLCGLPWVIDIVCRYYWEKADSRHVVASKPLFHSVTKQVIGERPEVVEIRKLRLLLLSLAEMSLKIKVSPDDIRALVAFIERSQDIACISDVLDMIIRALSQGEVFSSFVGNVNYLGGCCIFINLLKREFEPVRLLGLQLLGKLLTGIPSEKKETKLFALPLGQSRPISENLTKEITAAPQFFLNTMSERLFKFPLSDNLCAALFSVLSGTSAQQVPQENSEPDPSRDRNCNILSLPPFSLPQILICIFRFMHSCKDSSARTRILNLLLGLLDSNSSNIEALMEHSWNSWLETSTKLEVFKDYKSVSKGDPDDVKADEISLVRNLYSLVLSYYLRFVRGGWHQLDDTANYFLLKTDQGQLSCSDLLRDILDDIAGSLLHKSVEDNIFLLQPCCDNVLHFLNLIQELLISQMGIRLLFLSPSISEESSHDNIWKEDIKSTVNDILNTESHGQFTRFSDVNEVSDDWWSFFDKVWSIIRNLNGKGPSKFIPKDPNVEVASLGQRARGLVESMNVPAAEKVAVVSGGGGIGTALGIKVNRFAEKATTSREEIIPRIFFHLVILYLCKAGLENASKCVIQFMSLLPILLISEDDQSKNKLHFLIWSLLIVRSQYGQLDDSARFHVFSHLILETIIYGKSMLVTNILERDDSVDVNNKETGFILSFIQKNRVLAAAANEVKHMKAVQADRLKKLQDLRMKLNECSATEIKLAQAIEDEIHLTITAVLSADDNRKTACQLAFREDQQIIRDKWIHISRALMDERGPWSANPFPNDVVTHWKLDKTEDRWRRRFKFKRNYKFDERLCQPSQSRNESTATLADQLYISAKITQKMKQFLVKGVRGITEDSSYEQFEDTNDASESSQSNPSESQNLNNAADTSDHHASAHYKKEPSSTNGDNDYTKVLCSVRCVFVTPKRKLAGQLDITRTVMHFSFEFLVEGTGGSSVFSKFKDKKDSDCKNELGGVDRLDGCRDSMIETNGVLMQNQSNKIKRHKRWNITKASWT

SEQ ID NO: 226728 - protein, 1059 aa, Zea Mays
MKAVQADRLKKLQDLRMKLNECSATEIKLAQAIEDEIHLTITAVLSADDNRKTACQLAFREDQQIIRDKWIHISRALMDERGPWSANPFPNDVVTHWKLDKTEDRWRRRFKFKRNYKFDERLCQPSQSRNESTATLADQLYISAKITQKMKQFLVKGVRGITEDSSYEQFEDTNDASESSQSNPSESQNLNNAADTSDHHASAHYKKEPSSTNGDNDYTKVLCSVRCVFVTPKRKLAGQLDITRTVMHFSFEFLVEGTGGSSVFSKFKDKKDSDCKNELGGVDRLDGCRDSMIETNGVLMQNQSNKIKRHKRWNITKIKGVHWTRYLLQYTAMEIFFDDSTAPIFLNFSSQKDTKNAGTLLVSLRNEALFPKGSTKDKNNIISFVDRRVGLEMAENARERWKRREISNFEYLVILNTLAGRSYNDLTQYPIFPWVLADYTSEKLDFNKSSTFRDLSKPVGALDENRFKVFEDRYLSFCDPDIPSFYYGSHYSSMGIVLHYMLRLEPFTTLHLNFQGGKFDHADRLFQSIESAYINSLSNTSDVKELIPEFFYMPEFLENSNSYHLGVKQDGEPIGDVALPPWAKGSPEEFIHINREALESEYVSSNLHNWIDLIFGYKQRGQPAVEAANIFYYVTYEGAVDLENMDDMLHKSAIEDQIANFGQTPIQIFRTKHPRRGPPIPIAHPLYFAPQSLTLTSSVCSTASHMCAILFISLLENTVVLMNEGLILSVKLWLTTHLQSGGNFTYSGPQEHSFGIGSDVISPRKIGTFLAENVKFGRQFLATMQNSRDNYLILCGNWENSFQIISLSDGRIMQSIRQHKDVVSCVAVSSDGNVVATGSYDTTVMIWHAFRGRPIDKKIRGANFELSEKEQVIVERPVHILCGHDDIITCLFVSTELDIVISGSKDGTCIFHTLREGRYVRSIQHPSGVGLSKLVASQHGRVVLYSENDLSLHMYSINGRHIASSATLGRLNCIELSCSGDFIVCAGELGQIVLRSMHSLGIVWRYDGNGKTITSLAVTPEECILAGTKNGSLLVFSTETSLLRRGSMQRNKIKPSTSG

SEQ ID NO: 226729 - protein, 1004 aa, Zea Mays
MNIVRGVADLLRKAPPPPPAPDAGAAPTASFSAGDFDDAPTPRVVFSGSLEEGALNALWKNYENALDKVEKEKSLQIFVLQFVETFRDWDPNPIEQLVDQELGNNETVVGCSCGHPSEVILILIQEISLITSTFTESGNSPVSPTNHYSGQQNNLGLSSQILQVLECLEILTRSLHNCRVFSYYGGVQKITSLLKAAVAQLKNLNCLLAAEDQSADEAVKNSRVMLNILVCIITIISNFMKLDITVGRIPHITDTTKHTPSCNHLAAVTSSSPDRTISDTLRHWQQKATVLVMEARCVNWLMFHWQNDSTKASLTLDSVSGPTYSLDRTEWIDYSIKLSNAFCSFVLPSEDIGYCSDEIAVSQIVLSIPLAYLEQSVRWIIRILMTVFLCIRACTKETELPHHIKIFAKTLQYYVIRMFKRVLISTPALLPAFREEGVWDLLFSGNFFYFGSSIEDTCFHTVTDIQNGNVSSNRISIHSESLYRTDVKILQVEAISFLEFAATLHENTYNMPECSALLDALEHCISDPLLVSTLLKSFRVILQLATEHTLASFESLDVITRVLKAACRQAQELRNFSNFLCSNVSISQDSSQFKNIEGRTEDTLICTELALSLFMEYVTISIDGRILVLHNADCIDCLFDLFHEQNIREHVLEQVLALFRLPSSSAEDHTAKLQLCSKYLENLARANEKEKVNTELLIDLLVNMREIIMMDHMYYQNLFRDEGCFLHIISLLNGNFNKVTDERLVLNVLQTLTLLLEGNDASKNEDAVVLLLNILQKSSTSLQHYGLVILQQLLKQSITNRTSCFRAGLLSFLLDWFSVEERDDTVIAITELIQILGAHSICGKDIRKIFALLRCEKIGAKHKHTSLLLTSLSHMLKEKGPEAFFEFSGHDSGIDIKSPFLWPYNRGISFSCWLRVENFPDSGMMGLFSFFKEDGKGCSAVLNRSALVYESIYQKHQCVLLPLKLPPKQWRFLSITHTIGRAFSGGSQLRCYVDGELVSSEKCG

SEQ ID NO: 226730 - protein, 344 aa, Zea Mays
MQTYSPQIIEFLNYKTNVGSYKENRNEDSKARPPQEVPLNDSVPDEHLKKIKLEDVSCPLCMEMLYQPAVLNCGHVYCVSCLSSLNEETLKCHVCGSLHPGDFPNVCLDLDHFLEEYFPAEYELRGQKVQFKKDQCNRETSSSGTSGRKGSTRALHAEDPSNIHIGVGCDSCGVYPIRGKRYKCQDCTELIGFDLCEACYNSSSKLPGRFNQRHTPNHRMEVDNSALVHRILRHHGIPEEGPEGLMMEVVGPDAMVQILIDNQGMEEGNDEGPGEAAIEEPVGSLGSMSRLSHLFMYNPEMEDGNDEDSGEEAAIEEPVGSLGAMAPLFMYDQEMEDNEEDQAH

SEQ ID NO: 226731 - protein, 355 aa, Zea Mays
MFAPSSLSAQEEKRMQTYSPQIIEFLNYKTNVGSYKENRNEDSKARPPQEVPLNDSVPDEHLKKIKLEDVSCPLCMEMLYQPAVLNCGHVYCVSCLSSLNEETLKCHVCGSLHPGDFPNVCLDLDHFLEEYFPAEYELRGQKVQFKKDQCNRETSSSGRKGSTRALHAEDPSNIHIGVGCDSCGVYPIRGKRYKCQDCTELIGFDLCEACYNSSSKLPGRFNQRHTPNHRMEVDNSALVHRILRHHGIPEEGPEGLMMEVVGPDAMVQILIDNQGMEEGNDEGPGEAAIEEPVGSLGSMSRLSHLFMYNPEMEDGNDEDSGEEAAIEEPVGSLGAMAPLFMYDQEMEDNEEDQAH

SEQ ID NO: 226732 - protein, 492 aa, Zea Mays
MASGIGSGQQQPPVRLDALAAPAADADPGAVGDKLVFEAPPQPVREDYVQNAVKFLSHPKVRGSPVVYRRSFLEKKGLSTEEIDEAFRRVPDPQPSTTATTSPQQQVNSQNQSVGVQAYAPAQPVHPANAGPVVLPTQPRFSWYQAFLAAGLLLGFGASAAVFIKKLFLPRLKSWIRNVVAEGNGTEGNQLKPRIDDETADAVKASASAVSAIAKTNQQLLASKDEEKKILVTLTQALDSQAKELKSLTDSIGHTREPINITRDDRFSQYRPLEDHAPTVIRNGAINSSWRASQQTNMYGVSNGDFGSAVRSSFAPAPAEPTAGSFSRSYGEQPMSTAQRSDRSSGSKPWEMHSYSQQRPGYGSNSQLSDDGSYSDAQDSYAPSYHQNGKAPDFQADEPRPLTYNTGVEERPPPQRRWVPPQPPGVAMPEAAAAIRQPKALPKQPSSDASEAAGEMQVNGSSASDAVTEVPVNGATASDAGRSEIQEQSVAA

SEQ ID NO: 226733 - protein, 194 aa, Zea Mays
MYGVSNGDFGSAVRSSFAPAPAEPTAGSFSRSYGEPMSTAQRSDRSSGSKPWEMHSYSQQRPGYGSNSQLSDDGSYSDAQDSYAPSYHQNGKAPDFQADEPRPLTYNTGVEERPPPQRRWVPPQPPGVAMPEAAAAIRQPKALPKQPSSDASEAAGEMQVNGSSASDAVTEVPVNGATASDAGRSEIQEQSVAA

SEQ ID NO: 226734 - protein, 492 aa, Zea Mays
MASGIGSGQQQPPAVRLDALAAPAADADPGAVGDKLVFEAPPQPVREDYVQNAVKFLSHPKVRGSPVVYRRSFLEKKGLSTEEIDEAFRRVPDPQPSTTATTSPQQQVNSQNQSVGVQAYAPAQPVHPANAGPVVLPTQPRFSWYQAFLAAGLLLGFGASAAVFIKKLFLPRLKSWIRNVVAEGNGTEGNQLKPRIDDETADAVKASASAVSAIAKTNQQLLASKDEEKKILVTLTQALDSQAKELKSLTDSIGHTREPINITRDDRFSQYRPLEDHAPTVIRNGAINSSWRASQQTNMYGVSNGDFGSVRSSFAPAPAEPTAGSFSRSYGEQPMSTAQRSDRSSGSKPWEMHSYSQQRPGYGSNSQLSDDGSYSDAQDSYAPSYHQNGKAPDFQADEPRPLTYNTGVEERPPPQRRWVPPQPPGVAMPEAAAAIRQPKALPKQPSSDASEAAGEMQVNGSSASDAVTEVPVNGATASDAGRSEIQEQSVAA

SEQ ID NO: 226735 - protein, 491 aa, Zea Mays
MASGIGSGQQQPPAVRLDALAAPAADADPGAVGDKLVFEAPPQPVREDYVQNAVKFLSHPKVRGSPVVYRRSFLEKKGLSTEEIDEAFRRVPDPQPSTTATTSPQQQVNSQNQSVGVQAYAPAQPVHPANAGPVVLPTQPRFSWYQAFLAAGLLLGFGASAAVFIKKLFLPRLKSWIRNVVAEGNGTEGNQLKPRIDDETADAVKASASAVSAIAKTNQQLLASKDEEKKILVTLTQALDSQAKELKSLTDSIGHTREPINITRDDRFSQYRPLEDHAPTVIRNGAINSSWRASQQTNMYGVSNGDFGSVRSSFAPAPAEPTAGSFSRSYGEPMSTAQRSDRSSGSKPWEMHSYSQQRPGYGSNSQLSDDGSYSDAQDSYAPSYHQNGKAPDFQADEPRPLTYNTGVEERPPPQRRWVPPQPPGVAMPEAAAAIRQPKALPKQPSSDASEAAGEMQVNGSSASDAVTEVPVNGATASDAGRSEIQEQSVAA

SEQ ID NO: 226736 - protein, 819 aa, Zea Mays
MEATSPHPPTTIRRNPPRRARPPPTPLAGDKSKPSPLSRLLEGEAAFAASVPCPPQEERLKVFLRIRPLPDRDRSRPLPAAKDPRRKPKQVGAPGELCLAPDGPNSVVLTVPRSKLVDPKRGRTEVFDGFSAVFPSDSTQHDIFAQVMNPLVDDFLGGKSGLLVAMGPTGSGKTHTIFGSPRNPGILPLTLRRIFNAQGESKVSRKPTRSFFFSMFEIFSEGKGERILDLLSDTVECVLQQSVIKGLQEVSLSNPADAESLVSRGMLKRSTAATNANSNSSRSQCIITIRADSEHLLSSAVLTIADLAGAEREKRTRNQGSRLLESNFINNTSMVFSLCLRSLLEHQKNQKKPLEKHFKNSMLTRYLRDYLEGRKKMTLILNVKPGDDDYLDTSFLLRQASPYMKIKYTSLDDSFDLASQKRINVSLICQENKKKRKVQKPAVLVVERKENVDTDDISKVSEKDGVHHVSLNPEMPRVSRSEAIMTNFARALLTVLRQYKHKLLESENAVESMKELIRDKDIEIMELKKELKAVRYCSCKSSPINEDDSVDHDDSSSFGQAAQSLVNISNQADLGSNDASEDNFHVELQALHKESDKSESFTVPTPAPTGGAMPASSYSDQSFTGQSDEETEELSKITLENKDIQLDINIREEKHHESCSSSQQVNFDTEGTRSSEASLLGTVGSEKKLEELKQKSGRCVSAVEKANVELEHGIDGGQALDEKCDHASAKAAKAPPSKGREADETADTDKEAFGSRTEKTRRRLQPAAAMLLREFTGADIDADNEREERGRSSSSVATGRSDALVQLLMKGRPVRGLAS

SEQ ID NO: 226737 - protein, 274 aa, Zea Mays
MRRPPIVARVRRSLFLLLCCCCCLAAWSSPPAVRALPLCTDGRAPVPLNRTLGFCSAYGGGGSSSSCCDAAADAALRKRFNAMNISDAACAGVIKSVLCAECSPFSAELFNSSSKIQMVPLLCNYTSSSSSAQSKDSTRDYCKLVWETCKNVTIVNSPFQPPLQGSARLPSSSSKLTDVWQSEHDFCTSFGGSSGEQSLCFNGNGIFFNSTEPSPTPKGICLERISNGSYLNMASHPDGSNRVFLSSQAGKIWLASIPEQGSGGTLQYDENSIS

SEQ ID NO: 226738 - protein, 221 aa, Zea Mays
MGQPRHDDAGASLPSVPRWPRTVFLVGAMSCLAISAAAHLLACHSRRASAVFWQLDYAGISVMIVASFVPPVYYAFLCHPPARAAYLCAIAALGALVVAALLSPSCSSPRYRRLRAALFLAMGLSGVVPALHALWLNWGHAACYLALGIEVVMGLTYATGAWFYVSRVPEKWRPGVFDVVGHSHQIFHVLVLVGAVTHYVAVAVLIHWREKVAVACGAASA

SEQ ID NO: 226739 - protein, 212 aa, Zea Mays
MGDSRSKVKELSSWESDLKRREADIKRREEALKNAGVPMEEKNWPPFFPIIHHDIANEIPANVQKLQYLAFASWLGIVLCLSWNFVAVIVCWIKEGDSKLFFLATIYALLGIPLSYLIWYRPLYRAMRTNSAFSFGWFFLCYLIHIGFCIIAAIAPPIVFHGKSLTGILAAIDTFSEHVIIGIFYFVGFALFCLETLLSIGVLQHTRSAHQQ

SEQ ID NO: 226740 - protein, 172 aa, Zea Mays
MGDSRSKVKELSSWESDLKRREADIKRREEALKNAGVPMEEKNWPPFFPIIHHDIANEIPANVQKLQYLAFASWLGIVLCLSWNFVAVIVCWIKEGDSKLFFLATIYALLGIPLSYLIWYRPLYRAMRTNSAFSFGWFFLCYLIHIGFCIIAAIAPPIVFHGKSLTIISSAA

SEQ ID NO: 226741 - protein, 258 aa, Zea Mays
MRCPGCQGSGMKVTIRQLGPSMIQQMQQPCNECKGTGESINEKDRCPGCKGEKVIQEKKVLEVHVEKGMQHNQKITFPGEADEAPDTVTGDIVFVLQQKDHSKFKRKGEDLFYEHTLSLTEALCGFQFVLTHLDNRQLLIKSDPGEVVKPDQFKAINDEGMPIYQRPFMKGKLYIHFTVEFPDSLAPEQCKALETVLPPRPSSKLTDMEIDECEETTMHDVNNIEEEMRRKQAHAAQEAYEEDDEMPGGAQRVQCAQQ

SEQ ID NO: 226742 - protein, 290 aa, Zea Mays
MAQNLYIAGMKFTSATFASATTNLLPACTFVIALVFRYEKFAIRSLASQAKVAGTLLGVGGAMLLTFYKGVDITPWHSNLNLVATLTQHHHHHTTTTTTNYAMGSLLCVCSCFFYALWIVVQAKLSNEYPFHYSSTALMCIMTTLQSSIFALCFDRDASQWRLKFDIRLLSCAYSGIFASGVALVIMAWCVQQRGPLFVSVFSPLMLLIVAVLSSLLLGEKLHLGTAMGAVLIVMGLYAVLWGKGREAAAEAARVSVNDHPTTSNSNSSEEDDDKKRHVSVPMPPAPNSV

SEQ ID NO: 226743 - protein, 473 aa, Zea Mays
MASRLFVLRRHTRWWQRQAPRPRSLCPPSHGGDSASSHGTLELLARLRSSPSFFRLLQSCSIQACHCIHTSPSVNSGNQATAEPQQQNPGVPVPVDGSSELKPKRTKLKGRRAVTNFLKSLRWKKKKEFQRMTAEEKILYKLKLARKKEERLVVALKKIEPEDPSEPTHDPEVLTPEEHFYFLKMGQKCKNYVPVGRRGIYQGVILNMHLHWKKHQTLQVIVKTFTPEEVKEIAIELATLSGGIVLDIQDGNTIIMYRGKNYAQPPPEIMSPKVSLSRKKALDKSKYMEKLRALRRYIPRLEQELEDLHAQMKLAGEHQGQNAGKHVASISHNTNSMPVRKEPCGSIRNKTVSDLLSETVEGSKRLEDESSAIEDDSASESLSFTESEDLSDIFETESEEQEEDNKDRPLYLDRLDKFPSGKNDNEPDDFEEHLRRIASLSDKTDSPSKELKVSELDEIDKIFLRASSLLKKR

SEQ ID NO: 226744 - protein, 293 aa, Zea Mays
MMAGVLEAIRISCLGYPTRRRFDEFVDRFGVLLPEVLGESYDEVTATNMLLDKVNLTGYQIGKTKVFLRAGQMAELDAMRTEVLGCSASKIQRKVRSYLARKKFIQLRISATHLQAICRGQIARHYYDDLRREAASLTIQTCYRMYFARKNYINLCTASTTIQSGLRGMAARKKLQFRQHTKAAVTIQSFWRSYVARSRFMSLKKAAIATQCAWRGRVARKELRKLKMAAKETGALQAAKNKLEKQVEELTWRLQLEKRMREYNMLISTDDQEVIWEIRYISQPENHVNREIR

SEQ ID NO: 226745 - protein, 379 aa, Zea Mays
MLALTASASSASSHPYRHASAHTRRPRLRAVLAMAGSDDPRAAPARSVAVVGAGVSGLAAAYRLRQSGVNVTVFEAADRAGGKIRTNSEGGFVWDEGANTMTEGEWEASRLIDDLGLQDKQQYPNSQHKRYIVKDGAPALIPSDPISLMKSSVLSTKSKIALFFEPFLYKKANTRNSGKVSEEHLSESVGSFCERHFGREVVDYFVDPFVAGTSAGDPESLSIRHAFPALWNLERKYGSVIVGAILSKLAAKGDPVKTRHDSSGKRRNRRVSFSFHGGMQSLINALHNEVGDDNVKLGTEVLSLACTFDGVPALGRWSISVDSKDSGDKDLASNQTFDAVIMTAPLSNVRRMKFTKGGAPVVLDFLPKVRWIIYHYLSW

SEQ ID NO: 226746 - protein, 272 aa, Zea Mays
MTQMLRKHGAIGKFVEFYGVGVGELSLPARATIANMSPEYGATMGFFLVSMIEAYLRANKMFVDKHEPETERVFSSYLELDLSEVEPCVSGPKRPHDRVPLKEMKSDWHACLDNEVGFKVKPWVKTSLTPGSVVATEYLKHRYRCCCGAVSYYLLNLGDSITTDHISYSGKIPEGTPAAKYLLEYGVEPKNFSSYGGRRGNNEVVMRGAFANMRIVNKLLNGEAGPWTIHVPTGEKLYVYDAAMKWKEMLSVLPNYRVKEYMKKLYKTSVQP

SEQ ID NO: 226747 - protein, 267 aa, Zea Mays
MYRELAHRVDDALGFMTASGLTVDHPIMTTTDFWTSHECLLLPYEQALTREDSTSGLFYDCSAHMLWVGERTRQLDGAHVEFLRGVANPLGIKVSDKMNPSELVKLIDILNPSNKPGRITIITRMGAENMRVKLPHLIRAVRNAGLIVTWITDPMHGNTIKAPCGLKTRPFDSILAEVRAFFDVHDQEGSHPGGVHLEMTGQNVTECIGGSRTVTFDDLSDRYHTHCDPRLNASQSLELAFIIAERLRKRRMRSGLNSSLPLPPLAF

SEQ ID NO: 226748 - protein, 751 aa, Zea Mays
MSSKRTNALQNPAVMAAVRGGSYDSTTAKNKASPLVTPEQINNFISNINLLDQIGIFELNHIFAHSPRLNSDAIVAFVKALCKVSMTELQSPTDPRIFCLTKIVEIAHYNMNRIRLVWSRIWKVLSDFFVSVGLSENLSVAIFVMDSLRQLAMKFLEREELANYNFQNEFLQPFAVVMQKSNASEVRELIVRCVSQMVLSRVNNIKSGWKSVFTVFTAAAADDRKNIVLLAFETMEKIVRDYFPYITETETTTFTDCVKCLITFTSSKFSSDASLNAIAFLRFCAVKLAEEGFISHEKDTEQQPSKIDSSDGNSMVHKDDHVYFWVPLLAGLARLTTDSRPTIRKGSAEVLFDILADHGHLFSQSFWANIFESVIYPLFSSESFAPNGQISSVNSTEDDSWNFETKTVALKCLADLYIMFFEVMRPELSRVTSVITNFIRSPYKQSASTGISVFQRLTEGLASKLSNDEWGTVLLCFKESASHTFVVFDKIVKMMKVIEIPDRNESYSEAEQYSDHDIYNDEEEEANMETASYAIVRMKNHMALQLLIVEGIIKLYEVHRSFLGAEHIVIMLEILSAIASHASEVNSESNLHRKLHKACSILEVPEPAVIHFESESYQSYLKLLQALLHDNPSLSETMNVESQIMLVCEKILRMYLTCAEHELSNGVSGRGPALQRMPLGTSKKEELGARTPFVLHVMGLLGSLEKNCFRRNLPRFFPLLANLIRCEHNSGEVQVALYDIFQSSIGPIISA

SEQ ID NO: 226749 - protein, 555 aa, Zea Mays
MLLLAGVLFSTEKYKAMKQKNSCPILDHASCHSQEEWHLDSTMLRSMSRITRPTYMSAMGSMLFMLTRFPLLDHPLIMMTYLFWIRSPKFSSSVAQTHPFKSEQKLLKLCSTSKIHFMRASVKLHLLDGRMMADAEAGEFWGFFGGFAPLPRRAPAEGNEKHDETAFKLLCFDQGKLEPVDCQSLAHELLETNKCYFLDCGAELYVWMGRITSLMERKGASEAAEKLLSDSNRTRTHIIKVIEGFETVTFKSKFKEWPQTPELKLSSEDGRGKVAALLKRQGLNVKGLMKAAPTQEEPQSYIDSTGNLQVWRVNDKDKVQLSPSDQSKFYTGDCYIFQYTYPGDDKEECLIGTWFGKKSIEEDRVIAVSLASKMVESAKFQAVQARFYEGKEPIQFFVIFQSFQVFKGGLSSGYKRFIAENGIDDESYSEDGLALFRIQGSGPENMQAIQVEPVASSLNSSYCYILHNGNTVFTWAGNLTTALDQELMERQLDVIKPNTQSRSQKEGSETDQFWSLLGGKSEYSGQKMVRELESDPHLFSCILSKGQRNTPLYSR

SEQ ID NO: 226750 - protein, 172 aa, Zea Mays
MVESAKFQAVQARFYEGKEPIQFFVIFQSFQVFKGGLSSGYKRFIAENGIDDESYSEDGLALFRIQGSGPENMQAIQVEPVASSLNSSYCYILHNGNTVFTWAGNLTTALDQELMERQLDVIKPNTQSRSQKEGSETDQFWSLLGGKSEYSGQKMVRELESDPHLFSCILSK

SEQ ID NO: 226751 - protein, 223 aa, Zea Mays
MKLVRETGVQQRNSLLGDLGTSKKHATGKRSNALISGMENGNETGTRNRPFAQKQSHSSQVDENQGTADSPDNLKPSLLKLKFKRPHYEQLNTQASQPEEPTSWVSQQEDQFNVAKGQRSKRKRPSMEKADGLDGTTPAKRHHQSTDDEVMDANWILRKLGKDAIGKRIEVHLTSDGKWHQGMVSNVMGGTLCIQLDNGRSENVELGKQAIRLIASRSKGRKR

SEQ ID NO: 226752 - protein, 1193 aa, Zea Mays
MEAPPSALPWWLATTACSAPPTPAASSVAGRLAFLFLSPCLQRALLAAIDLLFLVVALAVILRARLARSNDGLSLGLDHREREPLLAKPATTDQAPPPLRRSWSFQHGLALATSAVQAAAALVLLLLLALLRRSGRTTGLLAAECAFLAAHAVAHLAAAWVVAVEKNTAGTSPARLHPLHLRFFWLATAAFAALYAGCAAARYAAAEPLVPDDPLAFAWLALSLPLLYFSATGSTGLVVDSNGGGRAAAATEETYATASWFSLATFGWINPLIAKGSRATLAADQVPPVAPPDTAEAAYVLFTSNWPAPAPGSSKAQRPVLTALLRSFWPQFLLTAVLGVAHLSVMYIGPSLVDRFVEFVRRGGEFTEGLQLVAVLLVGKAAETLASHHYEFQGQKLGMRINAALLAAVYRKSLRLSTGARRAHGAGAIVNYMEVDAQEVADVTHQLHNLWLMPLEIAVALALLYTHLGPAVLTAVAAIAVVTVVVAFANKLNIEYQFKFLAKRDERMKAITELLNYIGVIKLQAWEETFGNKIRKLREEELGWLAKSMYFMCANTVVLWSGPLAMTVLVFGTCVLTGIQLDAGKVFTATAFFRMLDGPMQSFPEAIAAVTQATVSVGRLDRYLLDAELDDSAVEQVDGTGIDTSAVVVEVCDGVFAWDMRGNKQRKESEDGESEEEKDVEGTPVLETVLKGINVEVRKGELVAVVGMVGSGKSSLLSCIMGEMEKISGTVRVCGSTAYVSQTAWIQNGTIQENILFGQPMYAERYKEVIHSCCLEKDFEMMEFGDQTEIGERGINLSGGQKQRIQLARAVYQHCDIYLLDDVFSAVDAHTGSNIFKECLRGTLKGKTVILVTHQMDFLHNVENIFVMRDGMIAQSGKYDELIEADSDFADLVAAHDSSMELVEQRCQVEKPEHFQPTTVVRIPSLRSRSIGKGEKVVVAPEIEAATSKIIKEEERESGQVSWRVYKLYMTEAWGWWGVMGMVSFAVVWQCSDMASDYWLSYETSGGIQFNPSLFIGVYVAIAAFSMVLQVIKTLLETVLGLQTAQIFFEKMFDSILHAPMSFFDTTPSGRILSRVAWPSVVAVIPLLLLNIWYRNLYLATSRELTRLEGVTKAPVIDHLSETVLGVTTIRCFKKEKEFFHENLDKINSSLRMYFHNYAANEWLGFRLELIGTLLLSITAFLMISLPSNFIKK

SEQ ID NO: 226753 - protein, 468 aa, Zea Mays
MYAERYKEVIHSCCLEKDFEMMEFGDQTEIGERGINLSGGQKQRIQLARAVYQHCDIYLLDDVFSAVDAHTGSNIFKECLRGTLKGKTVILVTHQMDFLHNVENIFVMRDGMIAQSGKYDELIEADSDFADLVAAHDSSMELVEQRCQVEKPEHFQPTTVVRIPSLRSRSIGKGEKVVVAPEIEAATSKIIKEEERESGQVSWRVYKLYMTEAWGWWGVMGMVSFAVVWQCSDMASDYWLSYETSGGIQFNPSLFIGVYVAIAAFSMVLQVIKTLLETVLGLQTAQIFFEKMFDSILHAPMSFFDTTPSGRILSRASSDQTTIDVVLAFFIGLTISMYISVLSTIIVTCQVAWPSVVAVIPLLLLNIWYRNLYLATSRELTRLEGVTKAPVIDHLSETVLGVTTIRCFKKEKEFFHENLDKINSSLRMYFHNYAANEWLGFRLELIGTLLLSITAFLMISLPSNFIKK

SEQ ID NO: 226754 - protein, 587 aa, Zea Mays
MEVDDDVEEDDIDFNPFLREGSPSETSSSLTSEAECEEHSSENQPSNHTYQQNTVVNENTSDSALPQNRLSSQDAVNEMFPEETSTQVNIENDGHLNGLEKDVLASEAACSPTVQDPHHLSLEISEEDAICKRTRARYSLANYSLEELETFLQESDDDSGLQNVDEEEEYRKFLAAVLSGVGNDTQTFQGDENQDEDDNDADFELEIEEALESDGDENVENYHNTNPRKEKDVRRPQTRQRRPLTGMSGAGSDHQESNKTHLRPIVPYIPSALVTPAHAFGWQYANQNAFFPSSLVSLTRPPLACGFTYQQLGQLHVLIYEHVQLLIQTFSLCVLDSSKQDVANNVKKMIVELVGARDQALARSSPQRHIFFETQHLSSSFVSSDNLERQWIPLIKSPIISVLDVAPLELVLDYLSDVATAVVKYRKSHVDGTADKTRRKEPLFPSAAINSCKQVNNVSQDRSNGVPTASPPSGQLQQKKSLAATLLENIKKDTIALVPADIARLAQRFFSLFNFALFPHKSPPSPMANRVLFTDAEDRLLALGILEYNNDWAAIQKRFLPCKSKHQIFVRQKNRSSSKAPDNPVKD

SEQ ID NO: 226755 - protein, 663 aa, Zea Mays
MEDADPSSSLAGPWNDRLPGKEDYTDEPKKTGGREPSVAMGEGRRGGCRRGLVVGRVHWQVDDDVEEDDIDFNPFLREGSPSETSSSLTSEAECEEHSSENQPSNHTYQQNTVVNENTSDSALPQNRLSSQDAVNEMFPEETSTQVNIENDGHLNGLEKDVLASEAACSPTVQDPHHLSLEISEEDAICKRTRARYSLANYSLEELETFLQESDDDSGLQNVDEEEEYRKFLAAVLSGVGNDTQTFQGDENQDEDDNDADFELEIEEALESDGDENVENYHNTNPRKEKDVRRPQTRQRRPLTGMSGAGSDHQESNKTHLRPIVPYIPSALVTPAHAFGWQYANQNAFFPSSLVSLTRPPLACGFTYQQLGQLHVLIYEHVQLLIQTFSLCVLDSSKQDVANNVKKMIVELVGARDQALARSSPQRHIFFETQHLSSSFVSSDNLERQWIPLIKSPIISVLDVAPLELVLDYLSDVATAVVKYRKSHVDGTADKTRRKEPLFPSAAINSCKQVNNVSQDRSNGVPTASPPSGQLQQKKSLAATLLENIKKDTIALVPADIARLAQRFFSLFNFALFPHKSPPSPMANRVLFTDAEDRLLALGILEYNNDWAAIQKRFLPCKSKHQIFVRQKNRSSSKAPDNPVKGSKFNIMVKVSIELHSTVT

SEQ ID NO: 226756 - protein, 605 aa, Zea Mays
MEVDDDVEEDDIDFNPFLREGSPSETSSSLTSEAECEEHSSENQPSNHTYQQNTVVNENTSDSALPQNRLSSQDAVNEMFPEETSTQVNIENDGHLNGLEKDVLASEAACSPTVQDPHHLSLEISEEDAICKRTRARYSLANYSLEELETFLQESDDDSGLQNVDEEEEYRKFLAAVLSGVGNDTQTFQGDENQDEDDNDADFELEIEEALESDGDENVENYHNTNPRKEKDVRRPQTRQRRPLTGMSGAGSDHQESNKTHLRPIVPYIPSALVTPAHAFGWQYANQNAFFPSSLVSLTRPPLACGFTYQQLGQLHVLIYEHVQLLIQTFSLCVLDSSKQDVANNVKKMIVELVGARDQALARSSPQRHIFFETQHLSSSFVSSDNLERQWIPLIKSPIISVLDVAPLELVLDYLSDVATAVVKYRKSHVDGTADKTRRKEPLFPSAAINSCKQVNNVSQDRSNGVPTASPPSGQLQQKKSLAATLLENIKKDTIALVPADIARLAQRFFSLFNFALFPHKSPPSPMANRVLFTDAEDRLLALGILEYNNDWAAIQKRFLPCKSKHQIFVRQKNRSSSKAPDNPVKGSKFNIMVKVSIELHSTVT

SEQ ID NO: 226757 - protein, 605 aa, Zea Mays; identical to SEQ ID NO: 226756

SEQ ID NO: 226758 - protein, 420 aa, Zea Mays
MEVDDDVEEDDIDFNPFLREGSPSETSSSLTSEAECEEHSSENQPSNHTYQQNTVVNENTSDSALPQNRLSSQDAVNEMFPEETSTQVNIENDGHLNGLEKDVLASEAACSPTVQDPHHLSLEISEEDAICKRTRARYSLANYSLEELETFLQESDDDSGLQNVDEEEEYRKFLAAVLSGVGNDTQTFQGDENQDEDDNDADFELEIEEALESDGDENVENYHNTNPRKEKDVRRPQTRQRRPLTGMSGAGSDHQESNKTHLRPIVPYIPSALVTPAHAFGWQYANQNAFFPSSLVSLTRPPLACGFTYQQLGQLHVLIYEHVQLLIQTFSLCVLDSSKQDVANNVKKMIVELVGARDQALARSSPQRHIFFETQHLSSSFVSSDNLERQWIPLIKSPIISVLDVAPLELVLDYLSDVLS

SEQ ID NO: 226759 - protein, 287 aa, Zea Mays
MRNFPLSRGTVAGLIKGYVAVSAAVYTETFNGMLGNSPTNLLMLLALGIPTACIVVMYFVRPCTPSLDEDNSTEHSHFMYTQISSVVLGIYLMVATILGDTLKLSQAVTYLLFGIMILLLLAPLAIPIKMTLYPNKQTKEKASTLAPSYSTDSLSGADPENSQPLLGSASTTLATGTNESDDSTDLDLLLAEGEGAVNLKKKRGPRRGDDFTFLEALVKADFWLLFVVYFCGVGTGVTVLNNLAQIGMSVGANDTTILLCLFGFCNFAGRILGGSVSEYFVRWKYRI

SEQ ID NO: 226760 - protein, 200 aa, Zea Mays
MVGRGGVHGERGEQRLAHGGGGGRRPPGGSLLVRLLLPFRRFSAQIFGASSSTASARRAPLLRIAPRASVSDQASHLPRVHPPAERKWGGCTYLRRSKKPGALKSTNRLHHPAEQRSKNPSLLLLRYVTIKSNEKKSNVVESAGGGSRGRWMNTAGGGGGKGEDGNGGGESLRRGDGGGAANTVSRGLPQKEPGGPGRGA

SEQ ID NO: 226761 - protein, 63 aa, Zea Mays
MEINRAILEENEASDDDGAGEEDDDINEADEDAEEELPPVPVEEKEPATVVGPRTRNRPRRRV

SEQ ID NO: 226762 - protein, 302 aa, Zea Mays
MPEAPVVTMRDTAAAAPPATHRDLLEYIERVTAGAAQVQRRVLSEILAQNAPAEYLRRLGVSGAAPGAVEAFRRAAPLVTYEDILPDVLRIANGDTSPILSGKPIREFLTRSVPLPRGRRAARGRVQEPGAHVQVPAAEERGAEHRLRQDRRGGASRGGERRGAAPGAVRRVAGGVHELRGRGDHPGPLRAVLGAAAPRGGRAGAGAGVGVRGLLPGRGGGPEQRVPAGPRRRPLHRAAGDPGGVGRHVRQAHGLRARPRRLHQPVQGAAVRAPGPRGGAAGRAGAGQLREPQVPQVEPRRR

SEQ ID NO: 226763 - protein, 560 aa, Zea Mays
MDAAQVPAAVVVDVGALTGPIGSEAPAAPKFRGQHSAKLGRALRMFVEMPTAIAHSSRIPIAGYMNMYDAKGPAWKRFLYHVGPGFMVCLAYLDPGNLGTDLQAGADHRYELLWVTLIGLIFALIIQSLSANLGVVTGRHLAELCKTEYPAWVRICLWLLAELAVIAADIPEVIGTAFAFNILFHVPLWVGVLITGSSTLLLLGLQKYGVRKLELLVGLLVFVMAACFFIEMSIVKPPAEEVIHGLFIPSLSGPGATGDTIALLGALVMPHNLFLHSALVLSRNTPSSVRGINDACRFFLLESGVAMFVALIINICIISVSGTVCNSSNVSPDDSAKCSDITLDSSSFLLRNVLGNSSAVVYGVALLACGISSSITGTYAGQYIMQGFLDIKMRQWLRNLMTRSIAIIPSLIVAIIGGSSGAGRLVIIASMILSFELPFALIPLLKFSSSSSTMGQHKNSIFIIGFSWILGFVIIGINIYFLSSKFVGWILHNSLQIYANILIGIVVFPLMLIYVCAVIYLTLRKETIKFVACGELQTIETDKSKLANGSNMEEKKDQLV

SEQ ID NO: 226764 - protein, 427 aa, Zea Mays
MDFASRHAAAEAATSASAAAPAGVAEEPEYLARYLVVKHSWRGRYRRVLCIASSGVVTLDPTTLNLTNSYDARSEFDHAEALTATDEFTLAVRTDARSKFKPMRFSSPLRPGILTELHRLRPVQASFDFPVLHLRRRTHEWSSFKFKVTPVGVELLEASGDIRWCLDFRDMNSPAIVLLGDSYGRKTSEGGGFVLCPLYGRKSKAFMAASGTTNTAIISHMTKTAKLKIGLSLSVDNSQSMKADDFIAKRAMEAVGAAETRHGEWSVTRLRSAARGTANIESLSLGVGPRGGLGEQGDSVSRLLVLTSTSLVERRPENYEAAIVRPLSAVSAFVRFAEEPQMFAFEFNDGCPIHVYASTSRDNLLATVLDILQTQRQCAIPVLPRLTMPGHRIDPPCGVSHLQMPHHSSVDMESATMHIKTSGCSCL

SEQ ID NO: 226765 - protein, 425 aa, Zea Mays
MDFASRHAAAEAATSASAAAPAGVAEEPEYLARYLVVKHSWRGRYRRVLCIASSGVVTLDPTTLNLTNSYDARSEFDHAEALTATDEFTLAVRTDARSKFKPMRFSSPLRPGILTELHRLRPVQASFDFPVLHLRRRTHEWSSFKFKVTPVGVELLEASGDIRWCLDFRDMNSPAIVLLGDSYGRKTSEGGGFVLCPLYGRKSKAFMAASGTTNTAIISHMTKTAKLKIGLSLSVDNSQSMKADDFIAKRAMEAVGAAETRHGEWSVTRLRSAARGTANIESLSLGVGPRGGLGEQGDSVSRLLVLTSTSLVERRPENYEAAIVRPLSAVSAFVRFAEEPQMFAFEFNDGCPIHVYASTSRDNLLATVLDILQTQCAIPVLPRLTMPGHRIDPPCGVSHLQMPHHSSVDMESATMHIKTSGCSCL

SEQ ID NO: 226766 - protein, 784 aa, Zea Mays
MTWVEIPRAEKKPLPTDDCIQIGWFPKDCMQIGQRLGYRRARRTVCRSDSGWGTGVQIGWFKKVLEKQSRESRAPSCRAGTDGRPGRKKRGRRAGRGVDDGWVDSVTLSKRFCRLGYRFGSLWIHAVLQTKHAIAEKHNFLIFEDRKFADIGNTVTMQYEGGIFRILDWADIVNAHIVPGPGIVDGLKLKGSPKGRGLLLLAEMSSAGNLAHGDYTAAAVKIAEQHSDFVMGFISVNPASWSVTPSSPAFIHATPGVQMAAGGDDLGQQYNNPESVINYRGSDIIIVGRGIIKASDPLKTACEYRRKMSSQELFSPVRAAQSATTHTPPTNTMDAAAKEALILDLHAVEAVKLGTFVLKSGITSPIYLDLRVLVSHPRLLASVASLLGALPATRPYDLLCGVPYTALPFAAALSVAASVPMLLSRYDTKRVEGAFRAAQTVLIVEDLVTSGASVLETVAPLRAEGLVVADAVVVIDREQGGRENLAASGVALHSLMTLTEMLAVLARHGKVGEEKIAEVRRFLQANRKVAVPGVPAGPPKPSATARRKSFAERAGLATNPMGRRLFEVMEAKQSNLCVAADVGTAKELLELADKVGPEICMLKTHVDILSDFTPDFGANLRTIAGKHNFLIFEDRKFADIGNTVTMQSEGGIFRILDWADIINAHIVPGPGIVDGLKLKGLPKGRGLLLLAEMSSAGNLAYGDYTAAAVKIAEQHPDFVIGFISVNPASWSPAPSSPAFIHATPGVQIAAGGDALGQQYNTPFSVSVLLPFDSRVTAHCCGVYF

SEQ ID NO: 226767 - protein, 703 aa, Zea Mays
MTWVEIPRAEKKPLPTDDCIQIGWFPKDCMQIGQRLGYRRARRTVCRSDSGWGTGVQIGWFKKVLEKQSRESRAPSCRAGTDGRPGRKKRGRRAGRGVDDGWVDSVTLSKRFCRLGYRFGSLWIHAVLQTKHAIAEKHNFLIFEDRKFADIGNTVTMQYEGGIFRILDWADIVNAHIVPGPGIVDGLKLKLMNHGTHTNCRVLALKGSPKGRGLLLLAEMSSAGNLAHGDYTAAAVKIAEQHSDFVMGFISVNPASWSVTPSSPAFIHATPGVQMAAGGDDLGQQYNNPESVINYRGSDIIIVGRGIIKASDPLKTACEYRRKMSSQELFSPVRAAQSATTHTPPTNTMDAAAKEALILDLHAVEAVKLGTFVLKSGITSPIYLDLRVLVSHPRLLASVASLLGALPATRPYDLLCGVPYTALPFAAALSVAASVPMLLSRYDTKRVEGAFRAAQTVLIVEDLVTSGASVLETVAPLRAEGLVVADAVVVIDREQGGRENLAASGVALHSLMTLTEMLAVLARHGKVGEEKIAEVRRFLQANRKVAVPGVPAGPPKPSATARRKSFAERAGLATNPMGRRLFEVMEAKQSNLCVAADVGTAKELLELADKVGPEICMLKTHVDILSDFTPDFGANLRTIAGKHNFLIFEDRKFADIGNTVTMQSEGGIFRILDWADIINAHIVPGPGIVDGLKLKSLLSSGIE

SEQ ID NO: 226768 - protein, 472 aa, Zea Mays
MGDVLIPELQRGNTSVTICARVSRLWDFYDPQDEAKLLHCDMVLLDKEVQHLHGYLFGKGKLVLGNDAIGIVTSISAVAPHRSRGQHTTSSKRTISLCNVSARKAHSPIKWNEVLSSNQPMPHVSEEQKIAYIRDLHPFENKDREFLVTVTVKKIGDRWWYSACKKCTRAAVAHGDSYKCSDQVCATIGTPNQSGIVVPCATPAITKELTTTSRKRTRSSPAKTVTKRLFTDVDGGTTASKDAADSAAAPRLAQSRPNKVHGAWLPPWLVTHYARYMEVVSGHWNYHGKPVVQNVLHKASEKSAHAKKWVEPHIKTAKMKWIPVKEKLVVLKKNAEPYVQKVSTRSVKFYESSRDAVTPHVVKVKEFAHPYYQEAKKFSKPYIDQIAEITKPHVEKVRTTLKPYTKRAVHAYGSFIASATTYHRQAQATIMDYLHQHGVPKSFATKELVWFLASALLALPVFVICRLVVKTF

SEQ ID NO: 226769 - protein, 438 aa, Zea Mays
MSSTSSGRRAPSSSAAVASSPGQKRARDEASSGSPSDPDAAKNPRRAFASSPFADFGTYMAAKNSKLAAQFDADANTSGTDAGGLFDGVSIFVDGFTVPSSQELKEIMLNNGGRFVNYFSRHTVTHIVCSNLPDSKMKNLRAFSRGLPVVKPAWVVDSLAENRLLNCAPYQINQNSSSSRKQMKLSSFFSEKQNEICHKGEQNNQNKDIEFQPSSAQEGSQYQSGDCESEASMDTLELSKDSLSSDEQKASAFEERESGDFTVDEGEYDYETACSESRNDTDGNLGVPQSPNAKSRCSNLFSTRSTGSHLSLSLEKSAAKPSGRPHSTLTDPNFVENYFKYSRLHFIGTWRNRYRKRFSNLLEAKGIKLSADHSGKKKTIIHIDMDCFFVSVVIRNMPELHDKPVAVCHSDNPKGTAEISSANYPARNYGAAILFSIN

SEQ ID NO: 226770 - protein, 830 aa, Zea Mays
MSGEMARAEALPEGEAPGFGVDLYAQATKAVSLRTPFEGDEAAPRVPTLPARLVSWAGPGDARKKHKKILPPPPDDAAPEPPPQSPVVTPAKVGLWDQFEAYFRPVTLADVEMLRPKLPFGYSKVDSCMLVPFLGSGNESTTQAETYDVAVAETTLYLGVGGEEVVTNRERGVQSVHLASQKERNDQSIEHDIHDVVVQQMVSDKELNRHRGVQGIHEVSIQLGGRSSGVDQAGSSSGIVLGQFVNEEGTSLNWLLGATGRFVLTSERPNKKRKLLGVDAGLEQLVLLPRVGAEASASCDVCCLGESSMESNRIVNCSNCKVSVHQKCYGLHAVPDGQWLCAWCTYLESTGWSLKEDAGNTQSMPCALCPKEKGALKPVKVESTRNEGIGHQKFVHLYCSLWAPEVFVEDMESMEPVLSLENVQENRMKLTCSICKIKHGACVRCSHGTCRTPFHPICARESKHQMEIWGKSRHPNVELRAFCSKHSAVEYASSVDTSNLASEQNPRKSGPYNTTLNSGKIPVIRFTRKNKDKFISCGTSASSSGNLIRVKTIEQDALANTVRNANSQPIRIWETGTGHPSVSGDHIRSSGDIAVVLRKLIDSGKVSVSDVASEVGISSESLEAALVGETTTFSHGLTLKIIKWLQNSVHMHGAQGNVCKGSSGVVQDNKSDGLDTTDTVDVKNALVLDDDKGVLVDVPDFAVTEPARTRSKSNSKILKENNATCATGVTIVQNGEKNMVKEDSNPECAAKEFANESTQGFSPSSSKDVLKDEHGILILNDTSGNKESGTSTQIPNEKQALMIHILIFTHSLRKRYLIIGTLLSIRIRKL

SEQ ID NO: 226771 - protein, 800 aa, Zea Mays
MSGEMARAEALPEGEAPGFGVDLYAQATKAVSLRTPFEGDEAAPRVPTLPARLVSWAGPGDARKKHKKILPPPPDDAAPEPPPQSPVVTPAKVGLWDQFEAYFRPVTLADVEMLRPKLPFGYSKVDSCMLVPFLGSGNESTTQAETYDVAVAETTLYLGVGGEEVVTNRERGVQSVHLASQKERNDQSIEHDIHDVVVQQMVSDKELNRHRGVQGIHEVSIQLGGRSSGVDQAGSSSGIVLGQFVNEEGTSLNWLLGATGRFVLTSERPNKKRKLLGVDAGLEQLVLLPRVGAEASASCDVCCLGESSMESNRIVNCSNCKVSVHQKCYGLHAVPDGQWLCAWCTYLESTGWSLKEDAGNTQSMPCALCPKEKGALKPVKVESTRNEGIGHQKFVHLYCSLWAPEVFVEDMESMEPVLSLENVQENRMKLTCSICKIKHGACVRCSHGTCRTPFHPICARESKHQMEIWGKSRHPNVELRAFCSKHSAVEYASSVDTSNLASEQNPRKSGPYNTTLNSGKIPVIRFTRKNKDKFISCGTSASSSGNLIRVKTIEQDALANTVRNANSQPIRIWETGTGHPSVSGDHIRSSGDIAVVLRKLIDSGKVSVSDVASEVGISSESLEAALVGETTTFSHGLTLKIIKWLQNSVHMHGAQGNVCKGSSGVVQDNKSDGLDTTDTVDVKNALVLDDDKGVLVDVPDFAVTEPARTRSKSNSKILKENNATCATGVTIVQNGEKNMVKEDSNPECAAKEFANESTQGFSPSSSKDVLKDEHGILILNDTSGNKESGTSTQIPNEKQG

SEQ ID NO: 226772 - protein, 1188 aa, Zea Mays
MSGEMARAEALPEGEAPGFGVDLYAQATKAVSLRTPFEGDEAAPRVPTLPARLVSWAGPGDARKKHKKILPPPPDDAAPEPPPQSPVVTPAKVGLWDQFEAYFRPVTLADVEMLRPKLPFGYSKVDSCMLVPFLGSGNESTTQAETYDVAVAETTLYLGVGGEEVVTNRERGVQSVHLASQKERNDQSIEHDIHDVVVQQMVSDKELNRHRGVQGIHEVSIQLGGRSSGVDQAGSSSGIVLGQFVNEEGTSLNWLLGATGRFVLTSERPNKKRKLLGVDAGLEQLVLLPRVGAEASASCDVCCLGESSMESNRIVNCSNCKVSVHQKCYGLHAVPDGQWLCAWCTYLESTGWSLKEDAGNTQSMPCALCPKEKGALKPVKVESTRNEGIGHQKFVHLYCSLWAPEVFVEDMESMEPVLSLENVQENRMKLTCSICKIKHGACVRCSHGTCRTPFHPICARESKHQMEIWGKSRHPNVELRAFCSKHSAVEYASSVDTSNLASEQNPRKSGPYNTTLNSGKIPVIRFTRKNKDKFISCGTSASSSGNLIRVKTIEQDALANTVRNANSQPIRIWETGTGHPSVSGDHIRSSGDIAVVLRKLIDSGKVSVSDVASEVGISSESLEAALVGETTTFSHGLTLKIIKWLQNSVHMHGAQGNVCKGSSGVVQDNKSDGLDTTDTVDVKNALVLDDDKGVLVDVPDFAVTEPARTRSKSNSKILKENNATCATGVTIVQNGEKNMVKEDSNPECAAKEFANESTQGFSPSSSKDVLKDEHGILILNDTSGNKESGTSTQIPNEKQGALLGRKNNDLTEVELGPCLEKGVPSHGHCFVQGDNGVDGVGSVENSFNTSNCSHGQPFFNFDDSHSYIHPFIKKKVSHHWDITFNQNKETLNHYIQESSYPSHEKIPTDSLVEVESTADTTVTDQVLKARSSKILEHSPDDEVEGEMVYLQSRLLDNAVVLKHRYEKLIAKVVQNLCRELDAFSKRKWDLIFVNQFLRDVREAKKRGRKEKRHKEAQAVLAAAAAAIASSSRNSTVRKDAKENAPESSPKLVAGSSRVGQRTFSLPRINDSSKSSNNKVSSDNKFGSFHMPISSKENGLYCDVCMRTETLLNRIFVCSRCKAAVHIDCYRNLENSIGPWNCELCEDEDISSEATSTTVSDKSHCNGKLPFAQCGMCHGTSGPIMFKYF

SEQ ID NO: 226773 - protein, 341 aa, Zea Mays
MVQQNSKSMLPVSDNGSSMSSMEAVSFDDERRIENFLKDQIPKSVAYGGYVAVAAISIGTLPQIFPQLKWYYILVAYVVAPVLAFCNAYGSGLTDWSLASTYGKLAIFVFGAWAGLSHGGVLVGLAACGVMMSIVSTASDLMQDFKTGYLTLASPRSMFISQVIGTGMGCVIGPCIFWLFYKAFGDIGESGTEYPAPYAIVYRNMAILGVDGFGSLPKNCLTLCYIFFAAAITINLVRDLTPYKVSRFIPLPMAMAIPFYIGSYFAIDMFLGSAILFVWERLNKAKADAFGPAVASGLICGDGIWTLPQSILALAKVQPPICMKFLSRSTNAKVDSFLGLS

SEQ ID NO: 226774 - protein, 821 aa, Zea Mays
MKGKRGGGANEKDKRAKKKQTKQKKNNRKAKDKERDVKCEVKILERLHDETVIDNSDGLPAKVEVIAKVDALEEGSSDGSDMPNSVTGGSGRNSSGCCTAPKLDQDTVLLTLRDKLRKLGQRLQEKNIEGQKLLKAHFEARDTKVKVEESSDSSNSLDRPPDVPESSMHSSEDTVDLKVNGTPNKDASVVNPVLEESVSGIPVTAKNESLPSARTKEGPVSNKDNASSLKMKTMASCLKLHPADVDKDAPFPSKSPRINRAAPVPSKLPSADKATPVLPKSSLSVNKAALVRPKSPAVDKATPVCPESPAVDKVTPVRPRSPAVDKATPVRSQSPAVDKATHVCPQSPSVDKATPSIDKATPVRPKSPAIDKVTPIPPKSPPVDKASPAPPKSLSGAKDVPVPSRSLQIDRFIPAPPRLSQVDKAALPSSEQPHISPATNSEAQGATTSRKVTASSVLEVAAASRPSSAPVLPTPRSTAPVASHIQTSTLLSRSMSEAAGRRSVNDPSFSAPSYTPQTYRNAIIGKTGLATTSANLAYQSYSLGQDTAPSQPLSAYASSTAVMMPPAGRSDQSSARHGFKSGSGKLEAHDSWQQWKGDNNVDMHLWRDHTTYQQMTRGQAYDQSRRDDTYQQTCSRGTEKFSRHAGLQARQFQTETPASHVWHQQQGQVAEEFPHLDIINDLLEEDQINGSIPESFHQDYNVFGLPFSPRGNVSDMGMASVRSPARFNSTKYEYDGGFSGAYDINAVNGLRERQFPSLDSYSNGLSDVSASKPWLNGSPSPSVMSLGVNTNGYHPQVADYPSLGNGVNGVSLWRRHANGRW

SEQ ID NO: 226775 - protein, 1264 aa, Zea Mays
MAGSVVTDDSAASTTGMRDDENSLSGESFSEWRSCDRADSDTPSTSPPFWDSDGDDDDPGPKPSELFGHHTWRIENFSKEKKREMKSEPFEAGGYKWYILVYPQGCDVSNHLSLFLCVANHDKLLPGWSHFAQFTIAVANIDPKKMKYSGELNLVCFLLGRFWKKEHDWGWKKFMELSKIQDGFLVDDVLEIIAQVQVIREKVDRPFRCLDRPYRRELIRIYMTNVEQIYRRFVEERRSKLSKLIEDKMKWSSFRAFWSAIDPNTRHHMSREKTETILKILVKQFFVEKEVTSTLVMDSLYTSLKALEYRMKSKKCKTKLADLEELPAPMVHVDMDMFVLADDVIALLERAALEPLPCQPVAPKDDKTSQSRMKDGSSGEVYKVSMEREERRLTELAQKILETFVLSHIFSGIEVAYQEAVALKRQEELIREEEEEAGLLEHQMKGKRGGGANEKDKRAKKKQTKQKKNNRKAKDKERDVKCEVKILERLHDETVIDNSDGLPAKVEVIAKVDALEEGSSDGSDMPNSVTGGSGRNSSGCCTAPKLDQDTVLLTLRDKLRKLGQRLQEKNIEGQKLLKAHFEARDTKVKVEESSDSSNSLDRPPDVPESSMHSSEDTVDLKVNGTPNKDASVVNPVLEESVSGIPVTAKNESLPSARTKEGPVSNKDNASSLKMKTMASCLKLHPADVDKDAPFPSKSPRINRAAPVPSKLPSADKATPVLPKSSLSVNKAALVRPKSPAVDKATPVCPESPAVDKVTPVRPRSPAVDKATPVRSQSPAVDKATHVCPQSPSVDKATPSIDKATPVRPKSPAIDKVTPIPPKSPPVDKASPAPPKSLSGAKDVPVPSRSLQIDRFIPAPPRLSQVDKAALPSSEQPHISPATNSEAQGATTSRKVTASSVLEVAAASRPSSAPVLPTPRSTAPVASHIQTSTLLSRSMSEAAGRRSVNDPSFSAPSYTPQTYRNAIIGKTGLATTSANLAYQSYSLGQDTAPSQPLSAYASSTAVMMPPAGRSDQSSARHGFKSGSGKLEAHDSWQQWKGDNNVDMHLWRDHTTYQQMTRGQAYDQSRRDDTYQQTCSRGTEKFSRHAGLQARQFQTETPASHVWHQQQGQVAEEFPHLDIINDLLEEDQINGSIPESFHQDYNVFGLPFSPRGNVSDMGMASVRSPARFNSTKYEYDGGFSGAYDINAVNGLRERQFPSLDSYSNGLSDVSASKPWLNGSPSPSVMSLGVNTNGYHPQVADYPSLGNGVNGVSLWRRHANGRW

SEQ ID NO: 226776 - protein, 646 aa, Zea Mays
MATESGKTDSFPRAQPSAATRSPPAVSPPDPDCDCASYRMDERRMTRPHPPDAPARPDAALPRRPDVQSCPGAACDELQREKRKEGKGKGKRKRKRKDDGEMEGTGKDKTMGKKEKNGEEKLKKGKGGGILTNKLFSELCISELTAKAIREMNYTHLTKIQARSIPHLMEGSDVMGSAKTGSGKTLAFLVPAIELLHRSHFLPRNGTGVVVVCPTRELAIQTHNVAKELMKYHSQTLGYVIGGTSMRSEANQLAEGINILVATPGRLLDHLRNTSSFKYKELKCLIIDEADRILEQNFEEDMKQIFKRLPQDRQSVLFSATQTKKVQDFANFTFGKNEERQRKLVYVGVDDSELKPTVEGLQQGYCVIPSEKRFLVLYTFLRLKAREAQTAKAALRGEVGEEQKKVKIMVFFSSCSSVKFHAELLNFLGIECYEIHGQLKQQKRTSTFFRFLKEKSGILLCTNVAARGLDIPEVDYIVQYDPPDDPKDYIHRVGRTARGDKGRGSALLFLLPEELKLLIHLQAARISLTEYVFTEKHVPKSLSQLENIVSGNYFLNKSAKEAYRSYLLAYNSHSMKDIFDIHQLDLKKVAASFCFKEPPKVNLDLESSASRHRKMRKVFGGQSHGIGASNPYGRRGVYDRSKFARF

SEQ ID NO: 226777 - protein, 573 aa, Zea Mays
MGSRERMLFDLNKLPAEVEEEAAAVVPNESAVVVSQEAAVVASQAAVVVSQPQKSLPVPMTYAPSLFQPGGGSQSQGILNDNNAFKHASIGSGFQPFVKNNKDSNNTKEPMKVEDNQNSSIQSTAMVNNRTTDSASPKAETCNQVSQAVEREEGECFDADSISENAGSSNKDEITGTASTHLKKESQESEPHLIKSGGVTKDDTAAECSDAEMVDASKDLVHGSSTGSENMQISECKGNQPGDDLDPCNRSKDVKGVEANYAFRFASNPAKRPKLNEHKEAMLGKKRARQTVFIGVEDAKQAGTMKTTTPRRQSSFPAPIVTRTVKEASRGIGEKAAEKQNQQAIRDQRQPEMMGSERSNSVDPSDQHTEPNGDTELGTQGWSKKMNTEEPASDGYQHPAQRQASLKQTMDFKQPKGRPFSSQRTILTGQNNADQKPANKRSIISKKKTFLNNVQYQDSSIERLIREVTNDKFWHNPEEAELECVPGSFESAEEYIRVFEPLLFEECRAQLYSSYEESLEAVGRDAHVAVQVKTVDKRERGWYDVVVLPIHERKWNFKEGDVAILSFPHPGSG

SEQ ID NO: 226778 - protein, 506 aa, Zea Mays
MGSRERMLFDLNKLPAEVEEEAAAVVPNESAVVVSQEAAVVASQAAVVVSQPQKSLPVPMTYAPSLFQPGGGSQSQGILNDNNAFKHASIGSGFQPFVKNNKDSNNTKEPMKVEDNQNSSIQSTAMVNNRTTDSASPKAETCNQVSQAVEREEGECFDADSISENAGSSNKDEITGTASTHLKKESQESEPHLIKSGGVTKDDTAAECSDAEMVDASKDLVHGSSTGSENMQISECKGNQPGDDLDPCNRSKDVKGVEANYAFRFASNPAKRPKLNEHKEAMLGKKRARQTVFIGVEDAKQAGTMKTTTPRRQSSFPAPIVTRTVKEASRGIGEKAAEKQNQQAIRDQRQPEMMGSERSNSVDPSDQHTEPNGDTELGTQGWSKKMNTEEPASDGYQHPAQRQASLKQTMDFKQPKGRPFSSQRTILTGQNNADQKPANKRAQLYSSYEESLEAVGRDAHVAVQVKTVDKRERGWYDVVVLPIHERKWNFKEGDVAILSFPHPGSG

SEQ ID NO: 226779 - protein, 367 aa, Zea Mays
MPLYLFSSPAAAKLATGPHASLHRRRQFLFRVPHRPSRRAPLLTSAAERPAGRTMATADTGASTVTDSRLRATGVKQALISLSDKTDLANLGNGLQRLGFSIISTGGTASSLEASGVNVTKVEEITQFPEMLDGRVKTLHPSIHGGILARRDQEHHLKALKEHGIGTFDVVVVNLYPFYDKVTSGAISFEDGIENIDIGGPTLIRAAAKNHKDVLVVVDHKDYPALLEYLEGKQDDPDFRRTLAWKAFQHVASYDSAISEWLWKQSNKADSFPPSFTVPLTMKSTLRYGENPHQKAAFYGDRSLSLVNAGGIATAIQHHGKGFAILRTSSYRKCPTTTIWTRTLRGTASRSLRARLASWLSTQIRVA

SEQ ID NO: 226780 - protein, 599 aa, Zea Mays
MPLYLFSSPAAAKLATGPHASLHRRRQFLFRVPHRPSRRAPLLTSAAERPAGRTMATADTGASTVTDSRLRGVKQALISLSDKTDLANLGNGLQRLGFSIISTGGTASSLEASGVNVTKVEEITQFPEMLDGRVKTLHPSIHGGILARRDQEHHLKALKEHGIGTFDVVVVNLYPFYDKVTSGAISFEDGIENIDIGGPTLIRAAAKNHKDVLVVVDHKDYPALLEYLEGKQDDPDFRRTLAWKAFQHVASYDSAISEWLWKQSNKDSFPPSFTVPLTMKSTLRYGENPHQKAAFYGDRSLSLVNAGGIATAIQHHGKEMSYNNYLDADAAWNCVSEFESPTCVVVKHTNPCGVASRHDILEAYRLAVRADPVSAFGGIVAFNTTVDEDLAREIREFRRPTDGETRMFYEIVVAPGYTAEGLEVLKGKSKTLRILEAKRRRSGKGTLLSLRQVGGGWLAQEPDDVTPEDVAFTNVSERAPDARELSDAKFACLCVKHVKSNAIVIAKNSCMLGMGSGQPNRLESLRIAFRKAGEEAKGAALASDAFFPFAWNDAVEEACQRGVAVIAEPGGSIRDQDAVECCNKYGVALVFTGVRHFRH

SEQ ID NO: 226781 - protein, 523 aa, Zea Mays
MPLYLFSSPAAAKLATGPHASLHRRRQFLFRVPHRPSRRAPLLTSAAERPAGRTMATADTGASTVTDSRLRGVKQALISLSDKTDLANLGNGLQRLGFSIISTGGTASSLEASGVNVTKVEEITQFPEMLDGRVKTLHPSIHGGILARRDQEHHLKALKEHGIGTFDVVVVNLYPFYDKVTSGAISFEDGIENIDIGGPTLIRAAAKNHKDVLVVVDHKDYPALLEYLEGKQDDPDFRRTLAWKAFQHVASYDSAISEWLWKQSNKADSFPPSFTVPLTMKSTLRYGENPHQKAAFYGDRSLSLVNAGGIATAIQHHGKEMSYNNYLDADAAWNCVSEFESPTCVVVKHTNPCGVASRHDILEAYRLAVRADPVSAFGGIVAFNTTVDEDLAREIREFRRPTDGETRMFYEIVVAPGYTAEGLEVLKGKSKTLRILEAKRRRSGKGTLLSLRQVGGGWLAQEPDDVTPEDVAFTNVSERAPDARELSDAKFACLCVKHVKSNAIVIAKLGTTRWRRRASAAWR

SEQ ID NO: 226782 - protein, 827 aa, Zea Mays
MSSSVSIAAEWDLLSDRFYRRLTLYSPLPWSTPAAAGATSSSSGVSGAVIGRLDLSTHIVAAAPFGGPIAAVRDDSKIVQLHSEPSRRRVLLFSSSGHPIASAPWPPLLPRLHSLGFSSSLSLLALLSDGSLLRFRLPDLQPSPCSSPVPLLPPASGGVADALFWGGGVAILTEDNRVVVATDIEVDDPHPRHLADPGIGDEEHVLCMAVVEAQFVMSGSPEVLLAVGDRVIAVDEDGVQVLGEELEIGPVQKMAVSPNGKLLAAFAHDGRLLVIPTDFSRIIFEYECESALPPEQIAWCGLDSVLVYWPEVLLMVGPNGDPVQYNYDEPIKLIPECDGVRILSNSSMEFLHRVSDSTTSIFGIGSMSPAALLYDARDHYDRQSAKAYDNYQLISSSLPEAIEACIDAAGHEFDVSRQRTLLRAATYGLAFCSRFPHERFQEMCKMLRVLNAVRDPEIGMPLTIHQYKLLTTSVLIGRLINANQHLLALRISEYLNLNPEVVIMHWACEKITASTTLPDTVLLDGLLDKLRLCKGISYAAVAAHADNSGRRRLAAMLVDHESQSSKQIPLLLSIDEQDKALSKAIESGDTDLVYLVLFHIWQKVAVEKKAPLDFFGVINARPVARDLFMAYARHSKHEELKDFFLSTGRLQDAAFLLLKESWELEKNPMASKGSPLHGPQVRLIEQAHRLFAETKEHVFESKASEEHAKLLRSQHELEVSTKQPIFVGSSVSDTIKTCIAMGNERAALRVKSEFKVPDKRWYWLKTCALATVGNWDGLEKFSREKRPPGGYKPFVEACIDAGQKNEAVKYIPKLTDPRERSELHTGI

SEQ ID NO: 226783 - protein, 102 aa, Zea Mays
MTVVAVESDEPRTESSLERGTIIYNLLVTLPFPSGLISRLRRAFLLYRFTNDLVSRSSLHMLQLLVLLHVSASQNATAHNDVHVMRTDIKEQKQRQIPTSRV

SEQ ID NO: 226784 - protein, 585 aa, Zea Mays
MVAMTEPRDPPTGCAMFGIYSGLFRRRRSASMTSLHRIDEAPAVAPLANPAHHQKPAVHHDASSLARRPNAVPVPAAQNGAVARAAPPAANGRGRTVTKAVNGAGGPRPAVEPAAEYTGMAAELDRMILDHQRVKGTTQLVRATSGNMMLHRNLGNLNAGATGTAVRSPVVERGGTAAANERKAPPNGYASSGMGNIVREPRTPAAAGELCRALSHRTDPEKLKEMGNEEYRQGHYEEAVALYDQAIMMDARRPAYWSNKAAALAALGRLIEAVADCKEAVRIDPSYDRAHHRLGGLYLRLGEADKAIYHLKQSSNESASADVSRAQSVKSRIAKSNDARRLKNWFTVLQEAQAAASDGADCAPQVMALQAEALLRLQRHDEADSLLSSAGAPRFGVDESTKFFGTFGHAYFLIVRAQVDMAAGRFEDAVATAQTAFQLDPSNREVAVVQRRAKAAAAARLRGNDLFKAAKFVEACAAYGEGLDREPGNAVLLCNRAACHAKLGRHEKAVEDCSGALVVRPSYSKARLRRADCNVKLERWEASLRDYQVLIQELPENEDVKKALSEVEAKLKDQRNGAAAARSQH

SEQ ID NO: 226785 - protein, 321 aa, Zea Mays
MRDKLTTFILKNPPEQKKGGKDKKKAMRRAEKERLKEGEAADEEQKKLKKDAKKKGASSKESTAKGSKKKATAGGSDEDHSTSPTRSRDGDHAAADEEEDDDDVQWQTDTSIEAAKQRMQEQLSAATAEMVMLSTEETEKKKHATHKDGTANGSAKEIPDEKPAVTKPSPYKELIGDIKASLGSAPTPTQLKAMLASSTLPSQDVMNALLEALFDGVGKGFAKEVVKNKKYLAVAVPDEGAQTLLVQAIEAFGSKCNPEALKEVPVVLKALYDGDILEEETVVDWYNAAVAAGKDSQVVKNAKPFVEWLQSAESDDEDGDE

SEQ ID NO: 226786 - protein, 238 aa, Zea Mays
MHTETQHSAQADIIPTRFWYTTSSSDNGKAGGATVPPRPSDDRDVRLLLVVAADAEEADAVARAVAGERGLHGHHMAAVVSHAGDEDALQPPIQRQPELLAAAEPLVDHGDRGRPERVRPRQGAQPAAADWPLVREDRAPRGRSCGFGRRDAGAGGVQRDRLGGAAGRRRRRGTAACRTGAGCRARHREQERESGGAGLLEDASARLRVHLRARPGPCVCVFASGWSVFKWCLKGFLV

SEQ ID NO: 226787 - protein, 530 aa, Zea Mays
MRLLVYAMGKEEKGARAAKKGTSSGKAPLLQPRYSVRGDAAASQKTDVVTDYAGSKECEDFHYDTMEMHQFLETIEGLKGHPQCVDCRREAVAGNPALLNPRFVMCSGCSQCFCAGLASNEDGPIGHAQLHAKSACHPVALWIDQPDAAYCFQCAHSLSLKVIALAARSHNHGYAVRGMPNFRAKCYVNALVQCLLALDDLWMSMLGPRAPAGPLGVALKELFLETRSGNDAGAFLNTRRLMESICLLDAGYRTTDHQDCQELLVHVRNGLIDEERKKKLPDVRKDDVPTVVDSIFKGEVSVMWTCSRCLNTAGKDEEFYELSLPLPPSKKHPSRSVPAIKQCRRIQKEEEKKAAVSLTSVKQCIKYYFRKVKVQNRCEICEKPSTSRSKDGGQIVANINSGGHAYVTLCLSKLPPVLTIHVLRFNINDKRVGHVKFEENIDVGEYLDPRSTDKDDARYRLVGVIEHLGRTVTPGHFVAYVRGSRIVSEKELSSSSSSWFQANDIRIRNISLDDVLKHEAFLLFYEKIKA

SEQ ID NO: 226788 - protein, 179 aa, Zea Mays
MSDVSPTKVTKHNNGDLLYMKAAYGEAMSSQHGPDYDWRTSPIDPQAVYASGGKAHGRYTMFANVIDSSQVRVQRGGSSRSAARSSRRSTQDLAEVEQLREELRRHQDYLKQQAAQHEYYATQIQQQQTLIQQLADAQGIHVPVPPPTTSRSLSLVFTSTYTYISIYRTSDPSSYLADA

SEQ ID NO: 226789 - protein, 1533 aa, Zea Mays
MEMIGSGSRSCLCHSSFLPGFFTGGEHAEKLSHKRTERSHPLPFLVKEEELSGDELEEFIKNRYSNRVKYAADRSYSREDDDIFPMDCALKEPTIWRVKCMVGRERQMAFCFMQKFVDLRKIGTKVPIITAFALDHIRGFVFVEAEKAGYVTEACKGFCSVYTSRITSVPATEVPSLLSSRTKPFEISRGTWIRMKNGNYKGDLAQVVNMDSGRKKVMIKIIPRVDLHAISKKFGGAVSLKEAAVPAPRLISSQELEFFRPHIEIKRDRQTGEVFEVLDGLMFKDGFLYKKVALSSLIYWGIQPTETELLKFSSSPSNRASADDLDWLSGMYGSKKRNLPAERDMKSSSSKIKSSKAPDLKGSTSTENYDDNDEFNLHDLVLYGRKDFGVIIAVEKDGFRILKGGPEGSAVTVRKQDIKKGCVDKMFTAVDHHKKTISINDTVNVVEGPFQGKQGLVKHLYLGILFIFNESESENCGFFCAQSGSCEKIRKGLGSSTTENSDFPTPMFSEPAYEQNEHRNTEGPYRSTREQLFSIGQMLRIRKGPLKGYLCRVVRIFRNDVTVKLDSLLKIVTVQADLLSVPANRGDNLSGAPASKFGSQDTPFFGSEAGKTSWDRGLPSFGSDSWQPFSSSTLPVQNAGAESEADPWCKKTSAEDDSDPWGKKTDGDSDPWGKEAVSAADGDCNPWGKETVPSAAGDSDPWGKKVFSADGDSDPWGKKAISSAVEVWNTSATQKEGSSGNAWDKQAGVGGSDAAGSSWDRAVVNKESEKSDNWGEACRVMDMGTGADTDPWGSKVKAVDMEGPNSWEKATMPPDNKLEDVSQGWNQHKGNSTEDQAKDNVSKDEDNNRAWSSSLPVTEDGTWGKSKDDNCDGAGGAGGWDASVANWNKSSVLADAQDEGWGKGNWSSAKSEETNNEIGNWNKAGASDQAGPKSFGGDGWNKGGDQNSSWNSPGNFGGGRGFGRGRGRVRGRESGDFNGRNDQGNWKNSWGGDNAEKSSWRSDNQVDNEAGDSGGYRGRGRGGRGQYGGRGRGRDNGWRNGDGPKWGGGDNWNATNPPSNQPWSSSGGTKSYGQNQPSTWNNPEDNKPSVGEQGDPWASKVSSTEGQQNDSWSSKMTSRGAEDTSGGWDSKEKGSSCNGGGEGLQNDPWANKIGSNEGKEQEADPWASKMSSAVGADDKNGTWDTTTKGTLSNEKADDPWNSKRGNDDDSKKTDAWGAGSSGGNQESSWSKPIFSLGDQEPTWNNPRFGDDDNVNNRGGFGRGNQGRGRGRSFGGGGGGSSWNESNKNGESGGGRSGEPWNRRGFDGGRGRGRFGRGDRNQGNNLGSGDGGSWGSGRGNGGGRGGYRNWNDNNERRPFGQGGGWSQSSDWNANKGSGEGNQAFSKSKPSWDAQNASGGDDQAGKKSDTDNSWSQNRSSPSILGQPSGDANNKSSAWDGAPNGGAGRGGSGSWGKSDEDGWNSSSGGSAREKPSWGGGAEAPPRKEDDGAWGKGGEGSRSLGGGGEGGSSSSWDKPADGAWSGNNKGGSGSGGW

SEQ ID NO: 226790 - protein, 222 aa, Zea Mays
MRMNEIIDKYSTHSKNLGKAEQPSLDLNLEHSKYANLNEQLVEASLRLRQMRGEELEGLSVEELQQLEKNLESGLHRVLQTKDQQFLEQISDLEQKSTQLAEENRQLRNQVSHIPPVGKQSVADAENVIAEDGQSSESVMTALHSGSSQDNDDGCLVLHGSEKTRWSVLIWVELRLQQIGTCVIVLWTTPDYCNNLASEARSVNLICHPCGFMMRCCACTVC

SEQ ID NO: 226791 - protein, 220 aa, Zea Mays
MNEIIDKYSTHSKNLGKAEQPSLDLNLEHSKYANLNEQLVEASLRLRQMRGEELEGLSVEELQQLEKNLESGLHRVLQTKDQQFLEQISDLEQKSTQLAEENRQLRNQVSHIPPVGKQSVADAENVIAEDGQSSESVMTALHSGSSQDNDDGCLVLHGSEKTRWSVLIWVELRLQQIGTCVIVLWTTPDYCNNLASEARSVNLICHPCGFMMRCCACTVC

SEQ ID NO: 226792 - protein, 256 aa, Zea Mays
MAPAFPTTLLHQASTSFRFPAGAAGCIRPHCLAPLAAPTTLSLAATPAVPRRLLLPVAAGIWDLISGGAGAAAAASLAVRRGMQLFRQGDVAGSLAEFDKAIEMDPRQKQYLWQRGLSLYYLDRFEEGAEQFRIDVAANPNDTEESIWCFLCEAQLYGTEEARKRFLEVGLDSRPVMREAYALLRSGADPEKLVAKFSSGTDGEVFYSSLYAGLYYESQIWQNLTLLQHASRRMDRGPAITWLPLHLSTASVATGK

SEQ ID NO: 226793 - protein, 163 aa, Zea Mays
MDGRKRKGKFRNSLRRMAMECLCSGEQLKASDETMRSSDSTITKDFSASGYSSWNGEIEQYLDNGNIEEAELSLREGICLNYETSALVPKMKISIARKTGRGKTHSQWDSPPMPLHAVSLLMEAIYLKARALHDLGKDKGLMKGKTIVDVVGKFTWYFIFCSS

SEQ ID NO: 226794 - protein, 163 aa, Zea Mays; identical to SEQ ID NO: 226793

SEQ ID NO: 226795 - protein, 1144 aa, Zea Mays
MAPKAGRGKGRGGKGDKRKKEEKVVPSVVDVTVVTPDESQVTLKGISTDRVLDVRKLLGSNVETCHLTNYSLSHVARGHRLEDGAEVVALKPCALRIVEEEYATAEQAEAHVRRLLDILACTTAFARPRDGAAKHRASRHGRPATPPSSPTPASTGAHGVASGEAAPPISEAHDMAAIRPPPKLGEFYDFFSFAHLTPPVHFIRRKEANGASQEGDHFEIEVKVCNGKLLHVVASVKGFYLSGKPHNVSHSLVDLLQQLSNAFANAYEALMKAFVDHNKFGNLPYGFRANTWLIPPIYVDSATRCPALPVEDENWGGNGGGCGRDGKYDRRRWSKEFSVLARMPCKTEEERVIRDRKAFLLHNLFVDTAIFRAASTIRRLIDQSMNSVGSHSGTHGSNVFEERIGDMNITVKKDGADASLKVEDKVDGVAFCQTGAMDIAQRNLLKGLTSDENVVAKDSSTLGVVIVKHCGYTATVKVSGRAKDSNDVKQTNDISGKFDGMLTIDVHDHPDGGSNALNVNSLRIPLPRVIHPETVVGNQHHSPKSHASNPAKKLARKILKDSLVKLDSMPSINSRIIRWELGSSWLQQLQKKDTPASENGKGNAMKTDKEPAVRGLGKHFEQLRKLKKKECNNEGSSSEKEECSNNYSSMNGTQVSDMIAADEANNGADISKLMSEDAFLSLKSLGAGLHEKSLEELTKMAHNFYDDTALPKLVADFASLELSPVDGRTMTDFMHARGLNMSSLGRVVELAEKLPHIQSICIHEMVIRSFKHIIRAVIAAVDDMQNMSAAIAETLNILLGSPRLENGADTDAHIDNNLRLKWVESFLSKRFCWKLKDEFAHLRKCIILRGLCSKVGLELAARDYDMNSPNPFDKSDIVSIVPVCKHVVYSSIDGRNLLESSKMALDKGKLDDAVSYGTKALSKIIAVCGPYHRLAANAYSLLAVVLYHTGDFNQATIYQQKALDINERELGLDHPETMKSYGDLSVFYYRLQHIEMALKYVNRALYLLQFSCGLSHPNSAATYINVAMMEEGMGNVHVALRYLHEALKCNKRLLGADHIQTAASYHAIAIALSMMDAYSLSVQHEQTTMQILQEKLGEDDLRTQDAAAWLEYFESKALEQQEAARRGMPKPDSSIASKGHLRSS

SEQ ID NO: 226796 - protein, 592 aa, Zea Mays
MAAIRPPPKLGEFYDFFSFAHLTPPVHFIRRKEANGASQEGDHFEIEVKVCNGKLLHVVASVKGFYLSGKPHNVSHSLVDLLQQLSNAFANAYEALMKAFVDHNKFGNLPYGFRANTWLIPPIYVDSATRCPALPVEDENWGGNGGGCGRDGKYDRRRWSKEFSVLARMPCKTEEERVIRDRKAFLLHNLFVDTAIFRAASTIRRLIDQSMNSVGSHSGTHGSNVFEERIGDMNITVKKDGADASLKVEDKVDGVAFCQTGAMDIAQRNLLKGLTSDENVVAKDSSTLGVVIVKHCGYTATVKVSGRAKDSNDVKQTNDISGKFDGMLTIDVHDHPDGGSNALNVNSLRIPLPRVIHPETVVGNQHHSPKSHASNPAKKLARKILKDSLVKLDSMPSINSRIIRWELGSSWLQQLQKKDTPASENGKGNAMKTDKEPAVRGLGKHFEQLRKLKKKECNNEGSSSEKEECSNNYSSMNGTQVSDMIAADEANNGADISKLMSEDAFLSLKSLGAGLHEKSLEELTKMAHNFYDDTALPKLVADFASLELSPVDGRTMTDFMHARGLNMSSLGRVVELAEKLPHIQSICIHEML

SEQ ID NO: 226797 - protein, 964 aa, Zea Mays
MASTEQEAAVEAAAVVEEVTRQQGKGCGVAGGGDTVGSWRNIDIAWRKADEAAIRRYEAANWLRRIVGVVCAKDLAEEPSEEEFRIGLRNGIILCNALNKIQPGAVPKVVEVPSDSTAPVDGTALCAYQYFENVRNFLTGMQDLGLTTFEASDLEKGGQGVRVVDCVLAMKSFCDAKHVGKRSPFKYGGIVKPLSGKYVIRKNNEPYMKVMMRSHSAELLRDGISLEQIGLDFSLEPTETTATPDSIRMLVQTVLADKKPEEIPSVVESLLSKVINEYDCRIASQSEVVKDTMEQVKDTMEQVKDTMDTNDCNSVLRMDSPFDTNDTKSLSRVDSPQVESTTPSDLDKATENIKMDEDEQNASSLTEDVSTLVPLPVPVPLSNDIVINIPKIVRNFDQEEKQIQDLKSNMSTVKSFMEQLKLLYSEDLKKLGDHLRIISHAASGYRKVVEENRKLYNQIQDLRGNIRVYCRVRPFHPGKEFPSSSVAGIEDRTITVMVPSKHGKDGKKSFTFNSVFGPLATQADVFTDMQPLVRSVLDGFNVCIFAYGQTGSGKTFTMSGPKILTEEGLGVNYRALNDLFGIQEQRKDTICYEIAVQMMEIYNEQVRDLLQTGGNKKLEIRNNSQNGIAVPDANVVPVRSTADVIDLMNLGQKNRTVCSTAMNDRSSRSHSCLTVHVQGRDLTSGTVLRGCMHLVDLAGSERVDKSEVVGIGLKEAQHINKSLAALGDVIAALAQKSTHVPYRNSKLTQLLQDSLGGGGGGGEARELKEQIACLRAALARKDGDHESIRSTQSSPDIYRMGTGNASPASRHPIEDGIIENDSALGDLAEHSQFGSSNSLPELGPDATQDLAFYQRSNSEQQWSWSGSVATEDSDDFEVATNCSLELDCVRPSSAPKASGLSNGGGTAVKKIQVKGSKGSDVRGVNPGKRSSPLQKKPSGPSPTLIKKGGGEGRKTPNGKTGTKK

SEQ ID NO: 226798 - protein, 619 aa, Zea Mays
MASTEQEAAVEAAAVVEEVTRQQGKGCGVAGGGDTVGSWRNIDIAWRKADEAAIRRYEAANWLRRIVGVVCAKDLAEEPSEEEFRIGLRNGIILCNALNKIQPGAVPKVVEVPSDSTAPVDGTALCAYQYFENVRNFLTGMQDLGLTTFEASDLEKGGQGVRVVDCVLAMKSFCDAKHVGKRSPFKYGGIVKPLSGKYVIRKNNEPYMKVMMRSHSAELLRDGISLEQIGLDFSLEPTETTATPDSIRMLVQTVLADKKPEEIPSVVESLLSKVINEYDCRIASQSEVVKDTMEQVKDTMEQVKDTMDTNDCNSVLRMDSPFDTNDTKSLSRVDSPQVESTTPSDLDKATENIKMDEDEQNASSLTEDVSTLVPLPVPVPLSNDIVINIPKIVRNFDQEEKQIQDLKSNMSTVKSFMEQLKLLYSEDLKKLGDHLRIISHAASGYRKVVEENRKLYNQIQDLRGNIRVYCRVRPFHPGKEFPSSSVAGIEDRTITVMVPSKHGKDGKKSFTFNSVFGPLATQADVFTDMQPLVRSVLDGFNVCIFAYGQTGSGKTFTMSGPKILTEEGLGVNYRALNDLFGIQEQRKDTICYEIAVQMMEIYNEQFQMQMWCQSDRPLM

SEQ ID NO: 226799 - protein, 542 aa, Zea Mays
MVPSKHGKDGKKSFTFNSVFGPLATQADVFTDMQPLVRSVLDGFNVCIFAYGQTGSGKTFTMSGPKILTEEGLGVNYRALNDLFGIQEQRKDTICYEIAVQMMEIYNEQVRDLLQTGGNKKLEIRNNSQNGIAVPDANVVPVRSTADVIDLMNLGQKNRTVCSTAMNDRSSRSHSCLTVHVQGRDLTSGTVLRGCMHLVDLAGSERVDKSEVVGIGLKEAQHINKSLAALGDVIAALAQKSTHVPYRNSKLTQLLQDSLGNPQSSKSLVCNLPAPKICAVSILFPLFSGGQAKTLMFIHIAPEPDAISESISTLKFAERVSTIELGAAKSSKEGGGGGGGEARELKEQIACLRAALARKDGDHESIRSTQSSPDIYRMGTGNASPASRHPIEDGIIENDSALGDLAEHSQFGSSNSLPELGPDATQDLAFYQRSNSEQQWSWSGSVATEDSDDFEVATNCSLELDCVRPSSAPKASGLSNGGGTAVKKIQVKGSKGSDVRGVNPGKRSSPLQKKPSGPSPTLIKKGGGEGRKTPNGKTGTKK

SEQ ID NO: 226800 - protein, 88 aa, Zea Mays
MPEHGEEEKEHLDLPHSLRRLGECTFYDDGTAKGELPETVYCFDGVFYNYFSIGMDAQVAYGFHQLRDEKPFLASGPLSNKGSYSFFT

SEQ ID NO: 226801 - protein, 1131 aa, Zea Mays
MTKSAARSASTVSEAAAAAAAMSLPSMTKPGRNSTTSVEAATESALRVTPMKLLVRVVEARGLPAVHLNGSSDPFVKLKLGKRRAKTAVVKRSLSPAWDEEFSFLVGNVAEELVVSVLNEDKYFSNDLLGQVRLPLSQVMETDDLSLGTQWYQLQPKSKKSKKKCRGEVCLHVSLSTRTHVSEESQSVPHPASDDLASSSDSTIEHKTLSTTYSCIDLSAVPSIERASRSSFERFPSSILEQPDRSSVEDLAAPDPGGPAAAADTDAMPTPSSVVEVLSRYFFRKPENATVQQVQHSVASDTTDHPVVDRQLQEPNASSSEDREIPERVTVPEPSLDELLKVMESKDQGSEMPAALPGGTLVDESYVAAPTELNSLLFSASSDFWPAVAELQGTSGFQIEPWKLDSSESFVQRTLSYTKAASKLVKAVKATEEQKYLKAAGNSYAVFSVVSTPDVPCGNCFKVEILYCVTPGPQLPSEEQTCHLTVSWRVNFVQSTMIKGMIESGAKQGMAEGFAQFSEVLSQKLKTAELDDANSNKEKILASLHAQKESCWRLVVRFLGNFTFIFSVAIALYVIAHLHLSKPDVMHGLEYFGLDLPDSIGEVVVCAVLILQGQNIVKVTRRFLSAWKQRGSDHGVKAHGDGWLLTVALIEGTGIIATGSSDLFDIYVVFTCNAKRKTSSIKFQTSDPKWNEIFEFDAMDDPPSRMDVAIYDSSGQCVIGHTEVNFLKNNLSELTDIWLPVSGKCDQASNPRLHLRIFLNNSRGTEVVMNYLAKMGKEVGKKINLRSAQTNVAFRKLFALPLEEFLIDDFTCHLKRKMPLQGRLFFSPRIVGFYSNIFGHKTKFFFLWEDVDDIQVIPATLSIGSPSLMIILRKDRGLEAKHGAKGTDHHGRLKFVFQSFVSFNDAYRIITAIWKIRALSPEQKGEATEKDEVKELLPEEAGTLFTNADVKMSEIFSSVLSVDVESLMEMFSGGPLEHKMMQKAGCIDYTATQWELVGCNIQQRQTSYKLDKNLSRHGGEAATTEQKYSLVNQDGWAIEKVMTLQGVLLADHFNLQMKYCITNVPSKPNTCSVLVLLGIAWLKSTKQQKKVTKSIISNTSNGLKELFAEVEKELTSSSSSHPNVAAGPTTA

SEQ ID NO: 226802 - protein, 223 aa, Zea Mays
MMTEMLKSKQILKDGMQHTRKLICSSMGARMDSEPKSWRILADVLYDLGTALEVVSPLCPQLFLEVAGLGNFAKGMVVVAARATRLPIYSSFAKEGNLSDLFAKGEAISTLFNVMGIGAGIGLASTVCSTTQGKEVPLLEKYKCRSVNEFVDACKKATGVNIKIEYLNRRPGDYAEVYSDPRKINKELNWTAQYTDLKESQSVAWRWQKSHPRGYEAKLNIAC

SEQ ID NO: 226803 - protein, 372 aa, Zea Mays
MAVELAKQLLAVIGSYTPPLWATLIAGVFVIISVSLSLYLLFNHLSAYKNPEEQKFLVGVILMVPCYAVESYISLVNPSISVDIEIMRDGYEAFAMYCFGRYLVACLGGEDRTIEFLNREGGSGSAAPLLGQASEQRYVNHPFPMNYVLKPWPLGEWFYLVIKFGLVQYMIIKSICAILAVILESFGVYCEGEFKLNCGYSYTAVVLNFSQSWALYCLVQFYTVIKDELAHIKPLAKFLTFKSIVFLTWWQGIAIALLFNWGLLRGPIAQELQFKSSIQDFIICIEMGVAAVAHLYVFPAKPYELIGDRLVGDVSVLGDYASVDCPLDPDEVKDSERPTKFRLPQPDDHVRCSTAIKESVRDVVLGGGEYLK

SEQ ID NO: 226804 - protein, 249 aa, Zea Mays
MDKNYGELYNILGWGEEYFAVNTEGHLSVKPFGRWTEPGQEIDVHSVIVEALATQPNDSTSKSQFPMILRFPDVLKNRIETLHNAFNSAMESTGYTSRYQGVFPIKVNQNKHVVQDMVRFGQQWNYGLEAGSKPELLIAMSCLPVTEAEPKPSRLSRARWWTSPATVTGRSRTSSAAKTHCRCTCSSRASVATTWPYSSPGRTRRPLLASTTCSVAQPSFVSIVALQKMAASRLNALTWAQLRMRSSAA

SEQ ID NO: 226805 - protein, 273 aa, Zea Mays
MLNCIAEATGTFIPVSSLLLDMLEMKELRGRPDGVGKAVNLFSVKQVDKKTVKTRAFQEACIYSVVDELAKHLTQWSYSIAFFEMSFIPLVRLRSFCKTIKADRFRKEMKDLIYQIEANVEFIKSKRVGIAFSPNDPAVESFLQTEKEERCSPLSKFVATLHQRAQDRMDALDETSVIVGAESSTFSRRLSEAQKQQDEQDDDEGTIAFSKNWLSENKKPKYVLAYLFFFPITWRGKHNHTVVRCAEPQRRIKSDPGRMMMSRLRRIGLRIWS

SEQ ID NO: 226806 - protein, 1677 aa, Zea Mays
MEPSPSSRRRSRAAAADKGKDPDPASSDHPSPPAPDDDADVTFPQPFTSASTALQGLLRRLGAGLDDLLPSSSSAPSSATSGHLKRILAGLQAHGDESRQLQSLMQLCEMLSIGTEDSLAAFPVDAFVPILVGMLGREDEPATAGASPDVMLLAARALSNLVDVLPSSCSAVVHYGAIQCFCARLLTIEYMDLAEQSLQALKKISLEHPTACLRAGALMAVLSYLDFFSTGVQRVALSTAANICRKLPSDASEFVMEAVPLLTNLLNHHDSKVLEHASVCLTRIAEAFAYYPDKLDELCNHGLVAQAASLIAVGNSSGQTSLSTSTYTGLIRLLSICASGSLLAVKTLLLLGISGTLKDILSGSALISGTSVSPAVTRPADQMFEIVSLADDLLPHIPARIIKLPTYYHTYKGSSTKKSASIKQEGGGSTGNERSGRERLLREQPELLQQFGMDLLPTMTQVYGSSVNAPIRHKCLSIIGKLMYYSSAETIQSLLGTTNISSFLAGILAWKDPQVLIPALQIAEIMMEKLPETFSKLFVREGVVHAVESLICSESSNKMPSQVPPQDKDKDSAMPSRSRRQRRRAGAVAAENSSLDESNSSNLGVMCSTATASEAPNTSLRFTVSDHAKSFKDKYFPADTDSSDIGFTDDLLKLRALCAKLNTVSENVKTKAKGKSKAISTNFLDISIDVEEQLDKIISEMLSELSKVNGVSTFEFIRSGVVIALLDYLSCGTFGKEKVSEGNLSQLRQQALRRYKTFISVALSIDHGRDETPMALLVQKLQSALSSLERFPVVLSQSSRIGIGGSRLTSGLSALAQPFKLRLSRAQGEKSLRDYSSNIVLIDPFASLASVEEFLWPRVQRSEVASKPIIPSGNNSESGVPGTTAGASLTAAMAQSGRRPTTRSKSSAAGGLTSKKDSHDESTSTAKGKGKAIVKPNSDESKGPNTRNAAHQKSASEKDLEMKQAHGHSSSEDEELDTSPVEIDDALMIDDDDISDDDDDDDDDHEVLQEGSLPICSQDGVHDVKLGDADESNIGSATFSHAQPSSGSGARNTSSRGPDSTEFRSMGTFGSRGAMSFVAATMAGLASVGGRSVRGVRDRRGLSLGGSMNDHNKLIFTAGGKQLNKHLTVYQAIQRQLMLDEDDEERFNGSDIPNDGNRFWGDVFTITYQKADNQVEKGCQGTSTSLNIKSDSYRSISEAQGVSLLDSILQGELPCDLERTNSTYNILALLRILEGLNQLSPRLRVQGASDDFAEGKINTLDELYRTGAKVPSEVFVNSKLTPKLARQMQDVLALCSGSLPSWCYQMTKACPFLFPFETRRQYFYSTAFGLSRALNRLQQQQSDNHSSGGEREVRFGRLQRQKVRVSRNRILDSAAKVMEMFSSQRAVLEVEYFGEVGTGLGPTLEFYTLLSHELQCAQLGLWRATSSYDSGLHTDMKDVIRLDPEDGSSGKELNTDLPGDGMYLIQAPLGLFPRPWPPKVDTSEGSRFFKVLEYFRLIGQVIAKVLQDGRLLDLPLSTAFYKLILGQELDLFDIVSFDSEFGKTLQELQVLVERKQFLESTSGKNQLQVADLCFHGASIEDLCLDFTLPGYPDYVLKEGEGGTIVNIYNLEEYITLVVDATVKSGIKRQVEAFRSGFNQVFDMSSLHIFSPQELDYLICGDPQDIQHQERLHPRGGG

SEQ ID NO: 226807 - protein, 1576 aa, Zea Mays
MEPSPSSRRRSRAAAADKGKDPDPASSDHPSPPAPDDDADVTFPQPFTSASTALQGLLRRLGAGLDDLLPSSSSAPSSATSGHLKRILAGLQAHGDESRQLQSLMQLCEMLSIGTEDSLAAFPVDAFVPILVGMLGREDEPATAGASPDVMLLAARALSNLVDVLPSSCSAVVHYGAIQCFCARLLTIEYMDLAEQSLQALKKISLEHPTACLRAGALMAVLSYLDFFSTGVQRVALSTAANICRKLPSDASEFVMEAVPLLTNLLNHHDSKVLEHASVCLTRIAEAFAYYPDKLDELCNHGLVAQAASLIAVGNSSGQTSLSTSTYTGLIRLLSICASGSLLAVKTLLLLGISGTLKDILSGSALISGTSVSPAVTRPADQMFEIVSLADDLLPHIPARIIKLPTYYHTYKGSSTKKSASIKQEGGGSTGNERSGRERLLREQPELLQQFGMDLLPTMTQVYGSSVNAPIRHKCLSIIGKLMYYSSAETIQSLLGTTNISSFLAGILAWKDPQVLIPALQIAEIMMEKLPETFSKLFVREGVVHAVESLICSESSNKMPSQVPPQDKDKDSAMPSRSRRQRRRAGAVAAENSSLDESNSSNLGVMCSTATASEAPNTSLRFTVSDHAKSFKDKYFPADTDSSDIGFTDDLLKLRALCAKLNTVSENVKTKAKGKSKAISTNFLDISIDVEEQLDKIISEMLSELSKVNGVSTFEFIRSGVVIALLDYLSCGTFGKEKVSEGNLSQLRQQALRRYKTFISVALSIDHGRDETPMALLVQKLQSALSSLERFPVVLSQSSRIGIGGSRLTSGLSALAQPFKLRLSRAQGEKSLRDYSSNIVLIDPFASLASVEEFLWPRVQRSEVASKPIIPSGNNSESGVPGTTAGASLTAAMAQSGRRPTTRSKSSAAGGLTSKKDSHDESTSTAKGKGKAIVKPNSDESKGPNTRNAAHQKSASEKDLEMKQAHGHSSSEDEELDTSPVEIDDALMIDDDDISDDDDDDDDDHEVLQEGSLPICSQDGVHDVKLGDADESNIGSATFSHAQPSSGSGARNTSSRGPDSTEFRSMGTFGSRGAMSFVAATMAGLASVGGRSVRGVRDRRGLSLGGSMNDHNKLIFTAGGKQLNKHLTVYQAIQRQLMLDEDDEERFNGSDIPNDGNRFWGDVFTITYQKADNQVEKGCQGTSTSLNIKSDSYRSISEAQGVSLLDSILQGELPCDLERTNSTYNILALLRILEGLNQLSPRLRVQGASDDFAEGKINTLDELYRTGAKVPSEVFVNSKLTPKLARQMQDVLALCSGSLPSWCYQMTKACPFLFPFETRRQYFYSTAFGLSRALNRLQQQQSDNHSSGGEREVRFGRLQRQKVRVSRNRILDSAAKVMEMFSSQRAVLEVEYFGEVGTGLGPTLEFYTLLSHELQCAQLGLWRATSSYDSGLHTDMKDVIRLDPEDGSSGKELNTDLPGDGMYLIQAPLGLFPRPWPPKVDTSEGSRFFKVLEYFRLIGQVIAKVLQDGRLLDLPLSTAFYKLILGQCHLILSLGRHCKNCKFLLNESSSLNPLLARTSYKLQICVSMALLLKICV

SEQ ID NO: 226808 - protein, 1844 aa, Zea Mays
MEPSPSSRRRSRAAAADKGKDPDPASSDHPSPPAPDDDADVTFPQPFTSASTALQGLLRRLGAGLDDLLPSSSSAPSSATSGHLKRILAGLQAHGDESRQLQSLMQLCEMLSIGTEDSLAAFPVDAFVPILVGMLGREDEPATAGASPDVMLLAARALSNLVDVLPSSCSAVVHYGAIQCFCARLLTIEYMDLAEQSLQALKKISLEHPTACLRAGALMAVLSYLDFFSTGVQRVALSTAANICRKLPSDASEFVMEAVPLLTNLLNHHDSKVLEHASVCLTRIAEAFAYYPDKLDELCNHGLVAQAASLIAVGNSSGQTSLSTSTYTGLIRLLSICASGSLLAVKTLLLLGISGTLKDILSGSALISGTSVSPAVTRPADQMFEIVSLADDLLPHIPARIIKLPTYYHTYKGSSTKKSASIKQEGGGSTGNERSGRERLLREQPELLQQFGMDLLPTMTQVYGSSVNAPIRHKCLSIIGKLMYYSSAETIQSLLGTTNISSFLAGILAWKDPQVLIPALQIAEIMMEKLPETFSKLFVREGVVHAVESLICSESSNKMPSQVPPQDKDKDSAMPSRSRRQRRRAGAVAAENSSLDESNSSNLGVMCSTATASEAPNTSLRFTVSDHAKSFKDKYFPADTDSSDIGFTDDLLKLRALCAKLNTVSENVKTKAKGKSKAISTNFLDISIDVEEQLDKIISEMLSELSKVNGVSTFEFIRSGVVIALLDYLSCGTFGKEKVSEGNLSQLRQQALRRYKTFISVALSIDHGRDETPMALLVQKLQSALSSLERFPVVLSQSSRIGIGGSRLTSGLSALAQPFKLRLSRAQGEKSLRDYSSNIVLIDPFASLASVEEFLWPRVQRSEVASKPIIPSGNNSESGVPGTTAGASLTAAMAQSGRRPTTRSKSSAAGGLTSKKDSHDESTSTAKGKGKAIVKPNSDESKGPNTRNAAHQKSASEKDLEMKQAHGHSSSEDEELDTSPVEIDDALMIDDDDISDDDDDDDDDHEVLQEGSLPICSQDGVHDVKLGDADESNIGSATFSHAQPSSGSGARNTSSRGPDSTEFRSMGTFGSRGAMSFVAATMAGLASVGGRSVRGVRDRRGLSLGGSMNDHNKLIFTAGGKQLNKHLTVYQAIQRQLMLDEDDEERFNGSDIPNDGNRFWGDVFTITYQKADNQVEKGCQGTSTSLNIKSDSYRSISEAQGVSLLDSILQGELPCDLERTNSTYNILALLRILEGLNQLSPRLRVQGASDDFAEGKINTLDELYRTGAKVPSEVFVNSKLTPKLARQMQDVLALCSGSLPSWCYQMTKACPFLFPFETRRQYFYSTAFGLSRALNRLQQQQSDNHSSGGEREVRFGRLQRQKVRVSRNRILDSAAKVMEMFSSQRAVLEVEYFGEVGTGLGPTLEFYTLLSHELQCAQLGLWRATSSYDSGLHTDMKDVIRLDPEDGSSGKELNTDLPGDGMYLIQAPLGLFPRPWPPKVDTSEGSRFFKVLEYFRLIGQVIAKVLQDGRLLDLPLSTAFYKLILGQELDLFDIVSFDSEFGKTLQELQVLVERKQFLESTSGKNQLQVADLCFHGASIEDLCLDFTLPGYPDYVLKEGEGGTIVNIYNLEEYITLVVDATVKSGIKRQVEAFRSGFNQVFDMSSLHIFSPQELDYLICGRQEIWESESLVDNIKFDHGYTAKSPAIVNLLEILSEFTPEQQHAFCQFVTGAPRLPHGGLAALSPKLTIVRKHPSSAVNTSNSTGAVESADDDLPSVMTCANYLKLPPYSTKKSCARSCFMRSWKAEDHLIFHKKYTISELTYRGQFYSGDLVSWSMYNTELRLPAHSANGFKGESPSPHSDAG

SEQ ID NO: 226809 - protein, 1775 aa, Zea Mays
MEPSPSSRRRSRAAAADKGKDPDPASSDHPSPPAPDDDADVTFPQPFTSASTALQGLLRRLGAGLDDLLPSSSSAPSSATSGHLKRILAGLQAHGDESRQLQSLMQLCEMLSIGTEDSLAAFPVDAFVPILVGMLGREDEPATAGASPDVMLLAARALSNLVDVLPSSCSAVVHYGAIQCFCARLLTIEYMDLAEQSLQALKKISLEHPTACLRAGALMAVLSYLDFFSTGVQRVALSTAANICRKLPSDASEFVMEAVPLLTNLLNHHDSKVLEHASVCLTRIAEAFAYYPDKLDELCNHGLVAQAASLIAVGNSSGQTSLSTSTYTGLIRLLSICASGSLLAVKTLLLLGISGTLKDILSGSALISGTSVSPAVTRPADQMFEIVSLADDLLPHIPARIIKLPTYYHTYKGSSTKKSASIKQEGGGSTGNERSGRERLLREQPELLQQFGMDLLPTMTQVYGSSVNAPIRHKCLSIIGKLMYYSSAETIQSLLGTTNISSFLAGILAWKDPQVLIPALQIAEIMMEKLPETFSKLFVREGVVHAVESLICSESSNKMPSQVPPQDKDKDSAMPSRSRRQRRRAGAVAAENSSLDESNSSNLGVMCSTATASEAPNTSLRFTVSDHAKSFKDKYFPADTDSSDIGFTDDLLKLRALCAKLNTVSENVKTKAKGKSKAISTNFLDISIDVEEQLDKIISEMLSELSKVNGVSTFEFIRSGVVIALLDYLSCGTFGKEKVSEGNLSQLRQQALRRYKTFISVALSIDHGRDETPMALLVQKLQSALSSLERFPVVLSQSSRIGIGGSRLTSGLSALAQPFKLRLSRAQGEKSLRDYSSNIVLIDPFASLASVEEFLWPRVQRSEVASKPIIPSGNNSESGVPGTTAGASLTAAMAQSGRRPTTRSKSSAAGGLTSKKDSHDESTSTAKGKGKAIVKPNSDESKGPNTRNAAHQKSASEKDLEMKQAHGHSSSEDEELDTSPVEIDDALMIDDDDISDDDDDDDDDHEVLQEGSLPICSQDGVHDVKLGDADESNIGSATFSHAQPSSGSGARNTSSRGPDSTEFRSMGTFGSRGAMSFVAATMAGLASVGGRSVRGVRDRRGLSLGGSMNDHNKLIFTAGGKQLNKHLTVYQAIQRQLMLDEDDEERFNGSDIPNDGNRFWGDVFTITYQKADNQVEKGCQGTSTSLNIKSDSYRSISEAQGVSLLDSILQGELPCDLERTNSTYNILALLRILEGLNQLSPRLRVQGASDDFAEGKINTLDELYRTGAKVPSEVFVNSKLTPKLARQMQDVLALCSGSLPSWCYQMTKACPFLFPFETRRQYFYSTAFGLSRALNRLQQQQSDNHSSGGEREVRFGRLQRQKVRVSRNRILDSAAKVMEMFSSQRAVLEVEYFGEVGTGLGPTLEFYTLLSHELQCAQLGLWRATSSYDSGLHTDMKDVIRLDPEDGSSGKELNTDLPGDGMYLIQAPLGLFPRPWPPKVDTSEGSRFFKVLEYFRLIGQVIAKVLQDGRLLDLPLSTAFYKLILGQELDLFDIVSFDSEFGKTLQELQVLVERKQFLESTSGKNQLQVADLCFHGASIEDLCLDFTLPGYPDYVLKEGEGGTIVNIYNLEEYITLVVDATVKSGIKRQVEAFRSGFNQVFDMSSLHIFSPQELDYLICGRQEIWESESLVDNIKFDHGYTAKSPAIVNFVTGAPRLPHGGLAALSPKLTIVRKHPSSAVNTSNSTGAVESADDDLPSVMTCANYLKLPPYSTKEIMRKKLLYAILEGRGSFDLS

SEQ ID NO: 226810 - protein, 698 aa, Zea Mays
MTEHDGVRGVLLHHRTAGGQPPVTFAIASRETDGVRVSVCPSFTIASGGPSSSGEPTAAAMWDEIKKHGAFGHAGAGNGNAARAAASKAGSSVGAAVAASTAVPAGATRVVSFSLAWACPEVKFPAGSTYYRRYTRFYGTDADAAAEHLAHDALLEHMNWESQIEEWQKPILHDQRLPEWYPVALFNELYYLNAGGTIWTDGQAPKRAGFASSLTATEPFSIDTLLPVAAGGSAVDGVVRAVASATERSHSAAAFGAALLRGGEDNVGQFLYLEGMEYNMYNTYDVHFYASFALLSLFPRLELSLQRDFARAVLLHDPRPRRTLDGRTVARKVLGAVPHDVGLNDPWVELNAYMLHDAARWKDLNPKFVLQVYRDAVATGDAAFAEAVWPAVYVAMAYMDQFDRDGDGMVENEGVPDQTYDMWSVSGVSAYTGGVWVAALQAAAGMARVVGDRPAEAYFRARRDRAARVYDAELWTGAYFRYDNSGGGGASESIMADQLAGQWYARACGLEPVVEDAKARSALATVLDYNVMRVKGGAIGAVNGMRPDGAVDASSTQSKEVWPGVTYAVAAAMVHEGMTEAAFRTAKGAHDAAWGNDGFGYAFQTPEAWTEDGGYRSLHYMRPLGIWAMQWALSPPELHRDLRTPEARSSEEPSPADAALGQAQFDKVASMLRLPEEQQPKGYLWAIYNLVRQIVLPA

SEQ ID NO: 226811 - protein, 185 aa, Zea Mays
MSELCLSEGLSRNMPDNGAENGTEGGGSRVKYAVMDVPITLPSLKPAFDKPNPKQGIGMLSWSSDSHYFFTRNDNMPTVLWIWDICRLELAAVLVQKDPIRAAAWDPTCTRLVLCTESPHLYMWTPSGACCVNIPFLNFRIVDLKWSSNGSCLLLKERESFCCATIISALPEEEPDHSDDTSEDE

SEQ ID NO: 226812 - protein, 684 aa, Zea Mays
MSGPNKSPFSGVADDLKGRAGCYKQDWNHGFRSGLRILAPTLYIFFASTVPVIAFGEQLSKDTDSALTTVETLASAAICGIVHSIIGGQPLLIVGVAEPTIIMYTYIYNFAKNQPNLGEKMFLPWAAWVCIWTAVMLFLMAIFNVAAILNKFTSFFMQEAIKGMVGEFSAPDGSNQSQSTFQFQWLYINGLLGFIFSMGVLYTALASRSIIPAAWQRSLIADYGVPLMVILWTSLSYSLPSRIPSGVPRRLFTPLPWEPKSLQHWTVAKDLFSVPTVHIFLAIVPATMVAGLSFFDHSVASQMSQQKLFINVFLVLIPWKCGVDLDLWCGLLGIPPSNGVLPQSPMHTRSLAVLKRQLLCKKMVQTAKEGMMNNATSSEVYVKMQDVFIKMDHGGDTVSAHKELKDLKDAIIPEGNGSRTVPEVFDPEKHVDAYLPVRVNEQRVSNLLQSLLITGCIGVTPLIQKIPTSVLWGYFAYMSIDSLPGNQFWERIQLLFITPQRRYKVLEGAHASFMESVPFNTICTFTLFQLIYLLIVFGMTWIPVAGILFPLLFFFLIIISHLRELDAAEYEELKGFTPDPSVCEDESVRSGDAQPGYASEILEEFTTHRGELKRRNSTFHDGRLLQLNSVKMTRELSRVPSWLTRILEEYAVSESELQLSMGVRSLIASLLTEYSLKQATHFRY

SEQ ID NO: 226813 - protein, 225 aa, Zea Mays
MIVLTMRGIGLALVHSTGTSTSVENVVSLSKLCSTLQLKTVQSSGTQQITTCLAFCIAHMEEDLRPGTEQYRFIEQCHIGLMKFHNHSGFYKDFSSWVGQRLYLLRQTVLSHSNCPFAYLYHSVILSAIQLCTELSKASKDALEYLRKVRASISYHKAQTNISYFVLYKDCQESARFGRELHGPGCIIVKGETPWVLISAIQLCTELCKASKDALEYLRKKLIVW

SEQ ID NO: 226814 - protein, 523 aa, Zea Mays
MLNNKLGTSVTATQVSKEEAKTSVSAVDAQLFSKGEAKPTDVSVLPTSTISGTPAVGGAIGIPGLTNIPNLESVKRAQELAAKMGFRQDPQFGPLINLFPGTSTEVTVPQRPAKAPVLRLDAQGREIDEQGNVISMTKPTNLSTLKVNINKQKKEAFQIIKPDLDSLAKSSVHFDERMGINQKKLLRLKRPGFQFVEEGKLTRQAELQKIKSQFGEAQAKELKVKQAQLAKAKTEVDMNPNLIEVALGVRAPKQKQKEEIPEIEPWDAKILLSATYEDVSVEKLNLDKITIYVEHPEPYDPPAEPAPPPPQPLKLTKKEQKKLRTQRRLAKEKDRQEMIRQGLLEPPKPKVKMSNLMKVLGSEAVQDPTRMEMEIRTAAAEREQAHVDRNIARKLTPSERREKKERKLFDDPTNTVETIVCVYKIRDLSHPQTRFKVDVNAQENKLTDWAAAVGGDEDAEAEAEADKPVNSCELVWQGSVAKPTFHRFTVHNCRSESAAKKIFVDASVPHYWDLAVNSSEGSP

SEQ ID NO: 226815 - protein, 655 aa, Zea Mays
MDFDPSPASAHGDGSGGAWPFDSLTTSMLFSSVSASPQLPASSSSWLTPPSPLWLFEDRHLLPLDAPSAAPEAAVAAAVVEEVQRARSGNSHTTGKRVDQINHKWQFHLSLDEDGTDNSSFFKEKLTQALRYFKESTDQHLLVQVWAPVKNGDRYVLTTSGQPFVLDHQSIGLLQYRAVSMMYMFSVDGENAGDLGLPGRVYKQKVPEWTPNVQYYSSGEYQRLNHAISYNVHGTVALPVFDPSAQSCIAVVELIMTSKKINYACEVDKVCKALEAVNLKSTEILDHPNVQICNEGRQAALVEILEILTVVCEEHKLPLAQTWVPCKYRSVLAHGGGLKKSCLSFDGSCMGEVCMSTSDVAFHVIDAHMWGFRDACVEHHLQRGQGVSGKAFISHKPCFSKDIRKFCKLAYPLVHYARMFGLSGCFAICLQSSYTGNDDYILEFFLPLDCIDEDDQNALLESILTLMKRCLRSLKLVDDNDLSGVSLHLSNVLKLENEESKTDAQFDGSLRESPEDDRHGGSHKFDNENQKVLDITEGQLLTDDYSQDNGTSVGRPNGSGASDSSLLHKTNKPPERRRGKAEKTISLEVLQQYFSGSLKNAAKSLGVCPTTMKRICRQHGISRWPSRKINKVNRSSSYTCWPFTRVSQCREINSK

SEQ ID NO: 226816 - protein, 1289 aa, Zea Mays
MSSLQLLQLTERGRNLLSSRRRTLAIVSGAVLAGGALAYAQSGRWKKHQEANSCSDANSHSSNNGRTSQNGIDGKLVKTRKKKSGLKSLHFLAAILLKKIGPNGTNYLIGLILTAVLRTAVGHRLAKVQGYLFRSAFLRRIPTFTRLIIENLLLCFLQSTLYQTSKYLTGSLGLRFKKILTDLVHADYFENMVYYKISHVDHRITNPEQRIASDIPKFCSELSDLVQDDLAAIVEGLIYIWRLCSYASPKYVLWILAYVIGAGGTIRKFSPAFGKLKSTEQQLEGEYRQLHSRLRTHAESVAFYGGENREASHIKQRFRALVKHLNVVLHENWWFGMIQDFLLKYLGATVGVILIIEPFFAGNLKPESSTLGRAEMLSNLRYHTSVIISLFQSLGTISISSRRLNILSGYANRIHELLDVSRELSGGRDRLITQNSSDGNYISEANYIEFSDVKVVTPSGNVLVDNLNLHLESGSNLLITGPNGSGKSSLFRVLGGLWPMVSGHIVKPGVGSNLNKEIFYVPQRPYTAVGTLRDQLIYPLTADQETEPLSYGGMVDLLKNVDLEYLLERYPLDKEVNWGDELSLGEQQRLGMARLFYHKPKFAILDECTSAVTTDMEERFCKRVRAMGTSCITISHRPALVAFHEIVLSLDGEGGWDIQDNRNGSFSPEVEFDVLKASESDRKSDALTVQRAFITSTKGNASMKPKKHSYSTEVIASSPSMEIEHTVQSSIVTQLQCSPRPLPVRVAAMSQILVPKLFDKQGGQLLAVVLLVFSRTWISDRIASLNGTSVKYVLEQDKAAFIRLAGTSVLQSAANSIVSPSLRNLTSRIALGWRIRMTNHLLQYYLKRNAFYKVFNISGMSMDADQRMTHDVEKLTNDLAGLLTGLGFLRAVSPDFGDLANQEQELEGTFRFMHSRLRTHAESIAFFGGGSREKAMIDAKFMTLLNHSKVLLRKKWLYGIFDDFVTKQLPHNVTWGLSMLYALEHKGDRALTSTQGELAHALRFLASVVSQSFIAFGDILELHKKFLELSGGINRIFELEELLQASQSNPVMPSDATNAGSEEIISFRGVNIVTPSQKLLASQLSCDVSQGKSLLVTGPNGSGKSSIFRVLRGLWPIASGSLSKPSEGIFNVPQRPYTCLGTLRDQIIYPLSHEEAKLKMLSGETSDKSTASELLDDHLRTILENVRLLYLLEREGWDATTNWEDTLSLGEQQRLGMARLFFHCPKYGILDECTNATSVDVEEHLYRLATNMGITVITSSQRPALIPFHSLELKLIDGEGKWELCSIHQ

SEQ ID NO: 226817 - protein, 243 aa, Zea Mays
MSIFYNANVGFALASLKGVNIPMYIAIKRITPLAVLVAGCMRGKGKPPTQVILSVICTANGVLVAALGDFSFDLYGYYMALTSVFFQTMYLILVEKSGAEDGLSSVDLMFYNSILSLPFLFFLIIATGEFPHSLTVLSAKAASLMFGVVLVISLMMGIVLNFTMFWCTIVNSALTTTIVGVLKGVGSTTLGFDLLGGVEVHALNVTGLVINTFGGLWYSYAKYKQKRKTPRKIQHDVESHAHK

SEQ ID NO: 226818 - protein, 900 aa, Zea Mays
MQEASRIMSQGTDGEVAGVVNSHDDKDHVHGTIRRVAEADSEKDEVHGGGQEPIFFQCLDQEQPPDPVHLEDARVEFPSDEDGDGDDVRVSFATADGDRLLEEQAELDLDVEEEQEDTSRYDYVTWMAPEPVSIHERRRRLLQGMGLTSSKDLLRSRNARARLPPDIPRYVPRRQQQLPAAEAPSTTRAAPAVAAALPEFAEHHPNDAVLTRSCSDSRLVVRGGGVRKMQPFRRVCSLPHSLQGSPAHKALSAAARCPLSSAPSKDGGTSKTTAGDTGGGGFRNPNNDREFQANSQLNSAQRSAPLNKDELEQFISHAPLVTQPVRRSQSQPVPGAGTAKGDEKPAEKRRTRWLRNIKLVASAAGLRNDKDGGGGSRSARTPSVTMSKSASTTAAMSSAATGPERLKVHHYGKSSRELTGLYMRQEVRAHEGSIWSIKFSPDGRFLASGGEDSVVRVWEVLDVDASSSAVAHEMEMSTSLPPQPPPASTDGGRSVAAPWLAAQLSRKVRRGRSSKDALPEHVIVPESVFALAEQPSCALEGHQDDVLDLSWSKSQQLLSSSMDHTVRLWNVDTKTCLRVFPHSDYVTCVQFNPADDGYFISGSLDCKVRIWSVPDRQVVDWSDLNDMVTAACYTPDGQAAIIGSHRGSCRFYKTTDCKLNQEAQIDMSITKKRRSQAKKITGFHFAPGNPSEILVTSADSQIRVFNGISVLQKFKGFKNTSSQISASYTADGRYVVCASEDSNVYVWRRVPGSVGGTGGASISVRAKTWLTSRSYEYFFCRDVSVAVPWPGSPCIPCDASRRVNGNGNSDTPRRQTSSRRDDDVVGAGCVPRGTMSGTMAYHGGQLLQPELSRRESQSSARWHGGAEGGNAWGMVLVTASRGGEIRVYQNFGLPLTNLFH

SEQ ID NO: 226819 - protein, 223 aa, Zea Mays
MKTKHPVPFTQKFPGIDPMALHLLERLLSFDPKDRPTAAEALTDPYFTGLANSAREPVAQPISKFEFEFERRKLARDDVRELIYRETLEYHPQMLQEFLGGGVKANFVYPSGVDRFKRQFVHLEEIAAKGEKTSPQLRQHTSLPRERVNDSGDDLEKPSADYCIRLHVCDQLSSSRNFLKSESISASQCVVIKPKREKDEEPISEYASSPVDGVPPRIAELKT

SEQ ID NO: 226820 - protein, 546 aa, Zea Mays
MELLRPRGDGCCPRVLSVSLLLLAALLWKHVSAAAITRGDFPEGFVFGAGASAYQDIRLTVILEMWLRTSITITRFSIAWSRLIPDGRGAVNPKGLEYYNSLIDELLRYGRHLPHVTIYHFDLPQALQDEYNGLLSPRIIDDFTAYADVCFRSFGDRVKHWITVNEPNIEPIGGYDQGYLPPRRCSYPFGLGVTCTHGNSTTEPYAVAHHLLLAHASAVSLYRRKYQGEQGGRIGLTLLAWWYEPATQKPEDVEAAARANDFSLGWFMHPLVYGDYPPVMKRNVGARLPSLTARDSAMVRGSLDFVGINQYGAILVEADLGQLDRDLRDYYGDMATNFVTVPFESTVTRNQQVPRLGLRNHEAPWALSKLLEHLQTHYGNPPVMIHENGEAGQARALSLSRFSCRAHARFLSSPELMVPPPPPPPGAGHEPDPSGGFLYDDEFRAHFLRVYVEAALASVRNGSDLRGYFVWSFMDVFEFLFSYRFRFGLYGVDFAADNRTRYARRSARWYAGFLRGGAATSRPPLFQRGHTAPPIRSENQPHVSVL

SEQ ID NO: 226821 - protein, 74 aa, Zea Mays
MTLMAGIIVRNTLVTYDRHNEKIGFWKTNCSELWERLHIGDTPSPAPSSDTSSEHDMSPAPAPSNLPATLLVLI

SEQ ID NO: 226822 - protein, 83 aa, Zea Mays
MTLMAGIIVRNTLVTYDRHNEKIGFWKTNCSELWERLHIGDTPSPAPSSDTSSEHDMSPAPAPSNLPGLKLLYKARQTMSLLL

SEQ ID NO: 226823 - protein, 330 aa, Zea Mays
MPSRRRRRGDLAVAVAVLATVALAAGADGGAEFDYRKLSGIIIPGFASTQLRAWSVLDCPYSPFDFNPLDSVWLDTAKLFSAVNCWLKCMLLEPYNQTDHPECKSRPDSGLSAITELDPGYITGPLSSVWKEWVKWCVEFGIEANAIIAVPYDWRLPPSMLEERDLYFHKLKLTFEIALKLRGGPSLVFAHSMGNNVFRYFLEWLKLEIAPKHYIQWLDEHIHAYFAVGAPLLGSTEAVRGALSGTTFGLPVSEGTARLMFNAFGSSLWLMPFSKHCKADNIYWKHFFEGKGGCPHKQQCDEDEYISDYGGWPTDLVNIEIWGHTHPSQI

SEQ ID NO: 226824 - protein, 808 aa, Zea Mays
MQPSSQHYVKSELLPCIGATNRAIRSTVGTVISVLFQIVRVAGWIELFQALHKCLESNDLDHMEGAMDAIYKICEDVPEELDVDVPGLSERPINVFMPKILQFFQSPHASLRKLSLGCINQYIVVMPSALYMSMDQYIQGLFNLAKDPSADVRKLVCSAWVQLIEVRPSILESHLKNVTELILQANKDPDDEVALEACEFWSAYCDVSMPPEGLREFLPRLIPTLLSNMVYADDDESLDDAEEDESFPDRDQDLKPRFHASRLHGSQTGDDDDDDDAVNVWNLRKCSAAGLDVLSNVFGDSILPTLMPLIEQNLARTDDNSWKERETAVLCLGAIAEGCIGGLYPHLPQIVAFLIPLLDDKFPLIRSITCWTLSRYSKFIVQSLDHPNGREQFDKILMGLLRRILDTNKRVQEAACSAFATLEEEASEELVPHLEVILQHLMCAYGKYQRRNLRILYDALGTLADAVGAELNQAKYLDIFMPPLITKWQQLSNSDKDLFPLLECFTSIAQALGPGFAQFAEPVFQRCINLIQSQQLAKIDPTAAGAVYDREFIVCSLDLLSGLAEGLGAGIESLVAQSSLRDLLLQCCMDEAADVRQSALALLGDLSRVCPIHLHPRLQEFLTVAAKQLNPQSVKDAVSVANNACWAIGELAIKIGKEIAPVVITVVSCLITILKSPEGLNKSLVENSAITLGRLSWVCPDIVAPHMEHFMQAWCSALCTIRDDFEKEDAFHGLCAMVAANPTGAAGSLAYICQACASWTEIKSEGLHNEVCQILNGYKQLLGNNGGWEQCMAALKPDVVQKLARYGV

SEQ ID NO: 226825 - protein, 567 aa, Zea Mays
MQPSSQHYVKSELLPCIGATNRAIRSTVGTVISVLFQIVRVAGWIELFQALHKCLESNDLDHMEGAMDAIYKICEDVPEELDVDVPGLSERPINVFMPKILQFFQSPHASLRKLSLGCINQYIVVMPSALYMSMDQYIQGLFNLAKDPSADVRKLVCSAWVQLIEVRPSILESHLKNVTELILQANKDPDDEVALEACEFWSAYCDVSMPPEGLREFLPRLIPTLLSNMVYADDDESLDDAEEDESFPDRDQDLKPRFHASRLHGSQTGDDDDDDDAVNVWNLRKCSAAGLDVLSNVFGDSILPTLMPLIEQNLARTDDNSWKERETAVLCLGAIAEGCIGGLYPHLPQIVAFLIPLLDDKFPLIRSITCWTLSRYSKFIVQSLDHPNGREQFDKILMGLLRRILDTNKRVQEAACSAFATLEEEASEELVPHLEVILQHLMCAYGKYQRRNLRILYDALGTLADAVGAELNQAKYLDIFMPPLITKWQQLSNSDKDLFPLLECFTSIAQALGPGFAQFAEPVFQRLILLQLVRCMIENSLFVRWTYCLDLQKVLALVLKVLLHRAV

SEQ ID NO: 226826 - protein, 386 aa, Zea Mays
MEHCTAFICTSAQWPHSITTTRRVAYHRSANSSFSAPQRRRRSTLYVMNAASTSAPISPQNITQLPRTNSTVIKSISSDKPSSAMEQLDIERGVCIPFRKYTPEMVLQSAFFYVYRVRKKVLDSRGSILSLASRGVEIIWKLGFYWSSLVYDFLVGQDEEIVPYRARQLRNLLCDLGPSFIKAGQVLANRPDIIREDYMNELCILQDDVPPFPNQVAFSIIEEELGQPIERLFSKISSETIAAASLGQVYRATLRETGEDVAIKVQRPGIEPIIYRDLFLFRTLASFLNGISLQKLGCNAELIVDEFGEKLLEELDYTLEATNIEDFLENFKDDPTVKIPQVYKQLSGSRVLVMEWIDGIRCYKRSWNRYGRFSHGWSECCFASVT

SEQ ID NO: 226827 - protein, 365 aa, Zea Mays
MGEAEERCSAGAGCSFSLTCLEDGADLDTGGSAAESADGGKLAASLYGDAEEDQEYIDHLVSKESSFCRSPSSSLCSPVVSDVSDAGAETCPCPSSMAASSHEWFRCARRATVEWVFETQAYFGFSHRTAYLAVSYMDRFCLHRCMDRSVMPWAARLLAVACVSLAAKMEEYRAPALPEFRADDEYDFSSVSIRRMELLVLSTLGWRMGDVTPLDYLPCLSSSRLRRGGDGGLVAAKAAALIFSTAEAASVLDYRPSTVAVAAVLAAAHGAVTKEALESKMSSLSPSSLLDKDDVHACYSTMMLNESSSATPSKLLAAKRPAPSASGSTGAGSPYESVDADSSSFAAAADSNKRARLVELPAVGR

SEQ ID NO: 226828 - protein, 91 aa, Zea Mays
MLLGVILIQVAEGSTVANFPVTLFQRAKGNPTLAVIFSLDYGCPGILHGVEFISGLINLGCQTSPQCAGQEGKYCFAHSYTEMEAPAVYLV

SEQ ID NO: 226829 - protein, 1528 aa, Zea Mays
MAEPYQLNGILNGMPNLSHPSSPSEVDEFCKALGGNSPIHSVLVANNGMAAVKFMRSIRIWALETFGTEKAILLVAMATPEDLKINAEHIRIADQFIEVPGGTNNNNYANVQLIVEIAERTRVSAVWPGWGHASENPELPDALDEKGIIFLGPPSAAMAALGDKIGSSLIAQAAGVPTLPWSGSHVKVPPESCHSIPEELYRNACVSTTEEAVASCQVVGYPAMIKASWGGGGKGIRKVHNDDEVRALFKQVQGEVPGSPIFIMKVASQSRHLEVQLLCDKHGNVAALHSRDCSVQRRHQKIIEEGPITIAAPDTVKELEQAARQLAKCVQYVGAATVEYLYSMETGEYYFLELNPRLQVEHPVTEWIAEINLPAAQVAVGMGIPLYNIPEIRRFYGMDHGGGYHNWRTISAVATKFDLDKAQSVRPKGHCVAVRVTSEDPDDGFKPTSGRVEELNFKSKPNVWAYFSVKSGGAIHEFSDSQFGHVFAFGESRSLAIANMVLGLKEIQIRGEIRTNVDYTVDLLNATEYRENKIHTGWLDSRIAMRVRAERPPWYLSVVGGALYEASSRSSSVITDYVGYLSKGQIPPKHISLVNLTVTLNIEGSKYTIETVRGGPRSYKLRMNGSEIETEIHSLRDGGLLMQLDGNSHVIYAETEAAGTRLLINGRTCLLQKEHDPSKLLADTPCKLLRFLVADGSHVDADTPYAEVEVMKMCMPLLLPASGVIHFVMPEGQAMKANDLIARLDLDDPSSVRRAEPFHGSFPKLGPPTAISGKVHQKFAASVNSAHMILAGYEHNINEVVQDLLNCLDNPELPFLQWQELMSVLATRLPKDLRNELDGKYKEYELNPDFCKSKDFPARLLRGVIEANLAYCSEKDRVTNERLVEPLMSLVKSYEGGRESHARVVVKSLFEEYLSVEELFNDNLQSDVIERLRLQHAKDLEKVVYIVFSHQGVRSKNKLILRLMEALVYPNPSAYRDQLIRFSALNHTSYSELALKASQLLEHTKLSELRTSIARSLSELEMFTEEGERLSTPRRKMAINERMEDLVCAPLAAEDALVALFDHSDPTLQRRVVETYIRRLYQPYLVSGSIRMQWHRAGLIALWEFSEEHLKQRSGQDVPLQQVENPIEKSWGVMVVIKSLQFVATAIDVALKETSQYGIGVRSVSNSNHVHSNQSNMLHIALVGINNQMSTLQDSGDEDQTQERVNKLFKILKDNTITSHLNGASVKVVSCIIQRDEGRPPMRHSFQWSVDKLYYEEDPMLRHVEPPLSTFLELEKVNLEGYNEVKYTPSRDRQWHIYTLIKNKKDQRLNDQRMFLRTIVRQPSATNSFLTGNIDNEVGHTQASSSFTSNSILRSLMGALEEIELHAHSETVRSGHSHMYLCLLREQQLHELIPFSRMTGKIDKDEGTVCTLLKHMVLNLYEHVGVRMHRLSVCQWEVKLWLVCDGQASGAWRVVVTNVTGHTCTIDIYREVEDPTTHQLLYHSATTSAGPLHGVALNEPYKPLDAIDLKRYAARKNETTYCYDFPLR

SEQ ID NO: 226830 - protein, 166 aa, Zea Mays
MYCTGGIRCDVYSTILRKKGFRNLYTLEGGVSNYLKVEGPAGWVGNLFVFDGRLSLPPATFNEEEDEEEQQENKRWVGCCYVCGSEVVELRHRNCANIDCNRLYLCCGWCAEELCGCCCSDCKVAPRLRPLLPGHQRYLKWHVYRDGRTDDENKLYGFVDDDSSGL

SEQ ID NO: 226831 - protein, 398 aa, Zea Mays
MANAADDPMADEARVEDAFTQEITDYSYVPRYHVLSWMETVEGMVAGVAALPPVYLILNRDLLETGWGWKRLVPYRPGYVEWHVFKKYLGDYFDHNREAFLCAEQKPDPFGWIIAKKSALIAAAKLCLKMEKALLRYCASFLTPDDKRLILRIKDQAKQMIQSEGDQSLVVTICLEVVGAERAVVVQLVGPVRRAAARGGRSPRAEEVRREERAEAEDAAGQQVLQRGEVLVLVLEQGLGLGALHEEHIGMVLQAMVQMGVLVPTGDMTVVRRTAQFFLNSFQECLTAQRKEREMATAELGFKKQLTKEEKFEKRKQRLAAIGEDLLAIAADQPFRFPATFTFVVRAFSVLDGTGKGLDPRFHITEIAKPNAKELLRFNDAGVEIVVKVCGETCVFLL

SEQ ID NO: 226832 - protein, 115 aa, Zea Mays
MVQMGVLVPTGDMTVVRRTAQFFLNSFQECLTAQRKEREMATAELGFKKQLTKEEKFEKRKQRLAAIGEDLLAIAADQPFRFPATFTFVVRAFSVLDGTGKGLDPRFHITEIAKP

SEQ ID NO: 226833 - protein, 359 aa, Zea Mays
MLTEIYDTCSCLLMMPVWCQGYLLETGWGWKRLVPYRPGYVEWHVFKKYLGDYFDHNREAFLCAEQKPDPFGWIIAKKSALIAAAKLCLKMEKALLRYCASFLTPDDKRLILRIKDQAKQMIQSEGDQSLVVTICLEVVGAERAVVVQLVGPVRRAAARGGRSPRAEEVRREERAEAEDAAGQQVLQRGEVLVLVLEQGLGLGALHEEHIGMVLQAMVQMGVLVPTGDMTVVRRTAQFFLNSFQECLTAQRKEREMATAELGFKKQLTKEEKFEKRKQRLAAIGEDLLAIAADQPFRFPATFTFVVRAFSVLDGTGKGLDPRFHITEIAKPNAKELLRFNDAGVEIVVKVCGETCVFLL

SEQ ID NO: 226834 - protein, 368 aa, Zea Mays
MLTEIYDTCSCLLMMPVWCQGYLLETGWGWKRLVPYRPGYVEWHVFKKYLGDYFDHNREAFLCAEQKPDPFGWIIAKKSALIAAAKLCLKMEKALLRYCASFLTPDDKRLILRIKDQAKQMIQSEGDQSLVVTICLEVVGAERAVVVQLVGPVRRAAARGGRSPRAEEVRREERAEAEDAAGQQVLQRGEVLVLVLEQGLGLGALHEEHIGMVLQAMVQMGVLVPTGDMTVVRRTAQFFLNSFQECLTAQRKEREMATAELGFKKQLTKEEKFEKRKQRLAAIGEDLLAIAADQPFRFPATFTFVVRAFSDGTGKGLDPRFHITEIAKPNAKELLRFNDAGVEIVVKASFNIWSKLLTYLYDSTSPKG

SEQ ID NO: 226835 - protein, 164 aa, Zea Mays
MVQMGVLVPTGDMTVVRRTAQFFLNSFQECLTAQRKEREMATAELGFKKQLTKEEKFEKRKQRLAAIGEDLLAIAADQPFRFPATFTFVVRAFSDGTGKGLDPRFHITEIAKPNAKELLRFNDAGVEIVVKERIEGDWRSLLSIEQFTHACFLFFGRDNVCNHE

SEQ ID NO: 226836 - protein, 376 aa, Zea Mays
MADDQKSRWKKEVDWLLSVADHIVEFVPSQQVAENGTSVEIMITQQRQDLQMNIPALRKLDAMLLEYLDSFAGKQEFWYASKDADGPGKGSTPRQDDKWWLPTVRVPPDGLSGAYSKWLQNQKDLVAQVLKAAMAINANVLMEMEVPESYTESLPKNGKSTLGDSVYRLITDDHFDPEELLRSVDSSDEHSIVDLKNRIEASAVIWQKKMTHNKDSKLPWGHSHEKRGMFEGRAENVLLLIKHRFPGIAQSALDISKIQCNKDVGLAILESYSRTLESLAFTVMSRIEDVLSADLAARDLRNTESMRIAASLASDDTDKVVSDAKAEVEKTGRMEPVSPALSDLVGPKLTKISPVATKRFSYLENLGGTRSPIARH

SEQ ID NO: 226837 - protein, 652 aa, Zea Mays
MGNNHGVTVELEGLGGGGTIEIEVKYKSYDDIEREKQWWRIPFVSDFLVKSSLGSALRMVLGSESINASQFVKSAFGQLSSFTYTYLPKPSSLESGVDVSKSDEESSDGPTNSNELQQQNIDSEIISDSHSHSEVQSPTAVVNSEGNSSSDMKKSDEYFWRALNNVLNQNVLQNFGFSLPEVKQLGGFDLLSSLGLKSRNIAEQEYLESGLAMADTSTNGGSETTSENTVGVENENRTLTTKEEVQSSFPDINKVSRDVLSQTENILGALMILSKNLSPHDQSVPTTGTNGKYDMIREEQGASAADSVQKADTVSSALLSIDAQEAEDMRRLFASAETAMEAWAMLATSLGRNSFIKSDFEKICFLDNISTDTQVAIWCDSSRRRLVVAFRGTEQSRWKDLRTDLMLVPAGLNPERLGGDFKQEVQVHSGFLGAYDSVRNRIMTLIKYAIGYDDEEDAENIPRWHVYVTGHSLGGALATLLALELSSSQMAKNGAIFVTMYNFGSPRVGNRRFAEVYNAKVKDSWRIVNHRDIIPTVPRLMGYCHVEAPVYLKFGDAKDAPVNNSILDDEDQGDVIGEYTPDVLVTEFMKGEKQLVEKLLQTEINLLRSIRDGSALMQHMEDFYYVTLLEVFENYFCFSHTKLCQKLLKVSN

SEQ ID NO: 226838 - protein, 575 aa, Zea Mays
MLAAPAALHLLLPAPPLPPPHYHHHHVAFPAPPLHASLPCSRRPRRRPPRHGVARASAAMAEEASSSGPTKFSVRIPVGDREILVETGHIGRQASASVMVTDGETILYCSVCLSDTPNDPSDFFPLSVHYQERLSAAGRTSGGFFKREGKTKDHEVLVCRLIDRPLRPTMPKGFYFETQILSWVFSYDGIHSPDCLAITAAGIAVALSEIPNKQTIAGVRIGLINNQFIVNPTTEQMENSELDLMMAGTDSAILMIEGYCDFLTEEKLLEAVEAGQVAIREICKAIDVLVQSCGKKKMVDAISLPPPELYRHVEDISGDELMKALQIKGKIPRRKALSALEEKVISILSEQGYVSKDGLSGGTESLADIVEDEDEDEIVDDGEVDEGDVHIKPVSRKPLQLFAEVDVKLVFKEISSKYLRKRIVERGKRSDGRSPWELRPINSQCGLLPRAHGSALFTRGETQSLAVVTLGGYQMAQRIDNLVDTEDSKSFYLQYSFPPSCVGEVGRIGAPSRREIGHGMLAERALEPILPLEEDFPYTIRVESTITESNGSSSTSRCWGSYKVSCCWNCNGPGP

SEQ ID NO: 226839 - protein, 84 aa, Zea Mays
MSVLLLDSIVDKHAIDIENGYLKMVKEMITASAKPTSTKSANEKHFLYDIVANGRNGIDVDKFDYVGRDCRACGLGCNFQYWRL

SEQ ID NO: 226840 - protein, 353 aa, Zea Mays
MDDPRWRRCGGPRGSVPKLVDPEQGVDAGAGRACASTTRTRGGGGGEGVREARSGGRAGEEGQLVLATEVSSRREGDGTGDGGVRVGSEEDAGATQRAPSRSSCGAVQLPRGHAIPTSERHNPHDAGALAPGVRVLGDGVGRGEPHRGADMGEFCPSPQGDSALAAPPLTLSSPSPATAVRPSYGSCDRRYVKLVFDNLHGSISVDPLALQFVDTEEFQRLRDLKQLGLTYLVYPGAVHTRFEHSLGVYSLAGKAINNLKTYQGEELGIDHVDMQTVKLAGLLHDIGHGPFSHLFEHEFLPRVDPGSSWSHEDMSVLLLDSIVDKHAIDIENGYLKMVKEMITASAKPTSTKV

SEQ ID NO: 226841 - protein, 378 aa, Zea Mays
MPPSHPCAASADSRRCRLRARRRRYGSRRRRSSSRPQWRCPAPCYTAPPWRLWSPSTSRVCTGPYCLRRRFLRFRSPRMTATSIPSPQAICEDLKLELVLQEASMDNKTIILTTLNAAWASPGSVIDLFIDSFRRGVGTSSLLRHLVIVAFDFKAYEHCVKIHPYCYALPTKDVDFSEEKRFQTTGYLEMMWKRLDFLRLVLEKGYSFVFSDADIVWFRNPFPHFYTDGDFQIACDHYVGNATDLRNIANGGFNYVKSNDQSIEFYKFWYSSRFRYPGYHDQDVFNFIKHDRYTTDIGLTIKFLSTTYFGGICEPSRDLNKVCTMHANCCIGLQSKIHDLRIMMEDWSNYMSMPPSLKQFRALSWRVPQNCSLSLLSL

SEQ ID NO: 226842 - protein, 786 aa, Zea Mays
MPPLRREVEASTNQVAEQHMQFYDLPWKILCEVMNVELKAEPDNDEVYAQLTLLPESKQPEENGSSEEMPASPPAALARPRVHSFCKTLTASDTSTHGGFSVLRRHADECLPPLDMTRQPPTQELVAKDLHGVEWRFRHIFRGQPRRHLLQSGWSVFVSAKRLVAGDAFIFLRGDSGELRVGVRRAMRQQANVPSSVISSHSMHLGVLATAWHAVNTGTMFTVYYKPRTSPAEFVVPCDRYMESLKRNYPIGMRFKMRFEGEEAPEQRFTGTIVGNVDPDQAGWAESKWRYLKVRWDEASSIPRPERVSPWQIEPAVSPPPINPLPVHRPKRPRSNAVASLPESSAPTKEAAPKVTLETQQHALQRPLQTQDNVAPKSVFGDNSELDSAHKSSLRPSGFDLDKSTIGMQRKLGSDIWMRMNRPDGYSEMLSGYQPPNEGARNSQGFCSLPDQIAAGRPNFWHTVNAHYQDQQGNHNLFPGSWSMMPSSTGFGMNRQSYPMIQEVGGMSQSCTNTKFGNGVYAALPGRGIDRYPSGWFGHTTPGGRVDDAQPRVIKPQPLVLAHGEALKMKGNSCKLFGIHLDSPAKSEPLKSPPSVATPAAEKWMADGIDADKSPEPHKTPKQLGATQVDPVPERCPQASRGTQCKSQGGSTRSCKKVHKQGMALGRSVDLTKFNGYTELVAELDEMFDFNGELKGCSKEWMVVYTDYEGDMMLVGDDPWNEFCSMVHKIFVYTREEVQRMNPGALNSRPEDSGLANSTERGSASTAAAREAPGYQSASSLNSDNC

SEQ ID NO: 226843 - protein, 933 aa, Zea Mays
MPSVQDPVQTPQSPRVHGDEEEEGSDDIESEFASSIAGRSNIVHPYRVSVAESSINSWDIDSVSITNSGASVHFYEEHVGTPTNHHALVVHPNTGEIMRYNPLQTRPINPNRDLALYGYGSVAWKNRVEWKTKQQNKMQKVSSDGEGSDLNDFDSDCDIPRCAEIICEIWFAFSWILDQFPKWHPIQRETYLDRLSLRYEKEGKPPELARIDVFVSTVDPMKEPPLIIANTVLSILAVDYPVDKVCCYVSDDGAAMLTFEALTETCLFARKWVPFCKKHKIEPRAPEWYFAQKIDYLREKVHPEFVRERRAMKREYEEFKVRINTVVANSCKVPEGGWSLPEGAPWHGNNVRDHAGMVQVITGNDCVMDDAGNKLPWLVYVSREKRPGHDHHKKAGALNALLRTSAILSNAPFVLNVDCDHYMNNSKALREAMCFLMDPVLGEKICYVQFPQRFDGIDQHDRYSNHNVVFFDINMKGLDGIQGPIYVGTGCVFRRHALYGYDAPTATKPPSKTCNCWPKSCCLCCGSKRKCSKAKKKQEHQKKVKCRNASKQVHALEVAGRETAPPVPREKFEKRFGQSDAFLASTLQDNGEGCHFDMLKSLDDCIHVLSCGYENKTQWGKEVGWIYGSVTEDILTGFKMHCHGWRSVYCMPKRPAFKGSAPINLTDRLHQVLRWALGSVEIFLSKHCPIWYGYRCGLKPLERLSYINCVIYPWTSIPLLIYCALPAFCLLSGKFMVPEMNVYSSILFIALFVSIAATSILEMQWGGVGIDDWWRNEQFWVIGGVSSHLFALCQGLLKVLGGVSTKFRVTLKGGGTDEFSELYEFKWTWLLVPPMTLLLLNVVAVLAGVSKAVTDGYEAWGPLLGKLFFSFWVVLHLHPFLKGVIGRQDRVPTVVVVLSMLLASILSLLWVRVSPFATKFDGPVLEVCGLDCE

SEQ ID NO: 226844 - protein, 454 aa, Zea Mays
MDFRPISQVAPNTERNILRSIIIKREYEEFKVRINTVVANSCKVPEGGWSLPEGAPWHGNNVRDHAGMVQVITGNDCVMDDAGNKLPWLVYVSREKRPGHDHHKKAGALNALLRTSAILSNAPFVLNVDCDHYMNNSKALREAMCFLMDPVLGEKICYVQFPQRFDGIDQHDRYSNHNVVFFDINMKGLDGIQGPIYVGTGCVFRRHALYGYDAPTATKPPSKTCNCWPKSCCLCCGSKRKCSKAKKKQEHQKKVKCRNASKQVHALEVAGRETAPPVPREKFEKRFGQSDAFLASTLQDNGEGCHFDMLKSLDDCIHVLSCGYENKTQWGKEVGWIYGSVTEDILTGFKMHCHGWRSVYCMPKRPAFKGSAPINLTDRLHQVLRWALGSVEIFLSKHCPIWYGYRCGLKPLERLSYINCVIYPWTSIPLLIYCALPAFCLLSGKFMVPELPAS

SEQ ID NO: 226845 - protein, 315 aa, Zea Mays
MKSGTQGALTGVGLSIGYPMAINGSPSGVAVMTATPGGPAEKAGILPGDTILAIDNRSTEDMDIYDAAERLQGPEGSSVDLSIRSGTNTRHVVLKRQTVNLNPVRSRMCEIPGSKDSSKIGYIKLTTFNQNAAESVKEAIKTLRDNNVKSFVLDLRNNSGGLFPEGIQIAKIWMDKGVIVYICDSQGVRDIYEADGADTIAASEPLVVLVNKGTASASEILAGALKDNKRAVVYGEPTYGKGKIQSVFGLSDGSGLAVTVARYETPAHTDIDKVGVIPDRPLPASFPTDEDAFCSCLRDSTAACNLNAAQLFAKS

SEQ ID NO: 226846 - protein, 196 aa, Zea Mays
MVVQPEERNMYDQYCLVNHLKESYGVATIRKTLAQVEAQGQVLTDGTLVVDGRTVAVVYFRAGYAPTDYPSEAEWRARLLMEQSSAVKCPSIAYHLVGTKKIQQELAKPNVLERFLDNKDDIAKLRKSFAGLWSLDNEEIVRSAIQKPNLFVLKPQREGGGHTDQTPEGTGGGACGVHTDAEDFSKSISYSSSQGR

SEQ ID NO: 226847 - protein, 165 aa, Zea Mays
MVDGTTIDWKVFMQVLNSPWDVCYDPAEEAVYIAMAGQHQIWKHNLHDGVTKVISGDGYERNLNGSSATSTSFAQPSGISLAFEMHELLVADSESSSIRVVNLKTGGSRLLAGGDPVFPEYLFRFGDYDGTGSDVLLQHPLGVVYANDNQVYIADSYNRKVVTLF

SEQ ID NO: 226848 - protein, 166 aa, Zea Mays
MLLYRLLTIWQIRLGSVMCFGVTAGAYILTLFASKYRERVLGLILVSPLCKGPTWTEWLYSKVISNLLYYYGMCGLVKECLLQRYFSKEVQGFSELPESDIVQACRSLLDQRQSMNVWRFVQTMNQYVNISHLYTNDDCAVEKLGGEVTAYLICFELIFRRYDLTE

SEQ ID NO: 226849 - protein, 215 aa, Zea Mays
MSCFQGLLFCPEAASLLLHNFCIYHISPPGHELGAAPISPNAPIPSVDDLADQVVDVLDFFGLGSVMCFGVTAGAYILTLFASKYRERVLGLILVSPLCKGPTWTEWLYSKVISNLLYYYGMCGLVKECLLQRYFSKEVQGFSELPESDIVQACRSLLDQRQSMNVWRFVQTMNQYVNISHLYTNDDCAVEKLGGEVTAYLICFELIFRRYDLTE

SEQ ID NO: 226850 - protein, 215 aa, Zea Mays; identical to SEQ ID NO: 226849

SEQ ID NO: 226851 - protein, 265 aa, Zea Mays
MAGSSPPRLRRPSSAYEHHIQTNHGPVSVAVYGDHDKPALVTYPDIALNHMSCFQGLLFCPEAASLLLHNFCIYHISPPGHELGAAPISPNAPIPSVDDLADQVVDVLDFFGLGSVMCFGVTAGAYILTLFASKYRERVLGLILVSPLCKGPTWTEWLYSKVISNLLYYYGMCGLVKECLLQRYFSKEVQGFSELPESDIVQACRSLLDQRQSMNVWRFVQTMNQYVNISHLYTNDDCAVEKLGGEVTAYLICFELIFRRYDLTE

SEQ ID NO: 226852 - protein, 132 aa, Zea Mays
MLLYRLLTIWQIRLGSVMCFGVTAGAYILTLFASKYRERVLGLILVSPLCKGPTWTEWLYSKVISNLLYYYGMCGLVKECLLQRYFSKEVQGFSELPESDIVQACRSLLDQRQSMNVWRFVQTMNQRYDLTE

SEQ ID NO: 226853 - protein, 906 aa, Zea Mays
MASRFWGQGDSESEEEEVEEVESEQGSDSDDDGGRGGAGRGAQNRYLKNQEDDSDESDTGHRVIRSLRDKRNEEMRSIVDQMRNAMKINDWVSLQESFEKLNKHLEKVVRVNESTEVPKMYIKALVLLEDFLAEALANKEARKKMSSSNSKALNAMRQKLKKNNKQYEEQIQKCREHPESFEDEAADDKDVDDDDADESDAEIEDPDKIAMSESEEEQDEEDDDKDGWEQKRSKKDKLMDKQFLKDPSEITWDIVDKKLKEIIASRGKKGTGRIERVEQLTFLTRVAKTPAQKLEILFHVISAQFDVNPSLLGHMPVNVWKKCVNNMLLVLDILQQYPNIVVDTSFEPDENETQKGADYNGTIHVVGDLVAFLERLDSEFLKTLQCTDPYTKDYVQRLREEPLFLVVAQNVQDYLERVGNFKAAAKVALRRVELVYYKPQEVYDAMRKLAEQPEDCVDDDDAEAGDEHKAVDDNRGPSPFVVIPEAVHRKPTFPESGRTLMDGLMFLIYKYGDERTKARAMLCDIYHHAISDEFSVARDLLLMSHLQDGIQLMDISSQILFNRVMAQLGLCAFRAGLINEAHGCLTELYSTGRVKELLAQGVQQSRYHEKTPEQERLERRRQMPYHMHINLELLEATHLICAMLIEVPNMAASTYDKRRPMSKTFRRLLEVSERQTFVGPPENVRDHVMAATRALNKGDHQKAFSVINSLEIWKLLRNREHVLEMLELKIKEEALRTYLFSYSSSYESLSLNQLTTMFDLSEQHAHSIVSKMMMHEELHASWDQPTKCIVFHSVDQTRLQGLLFQMADKLSVLVEINERAYEARTGGTLEGVPPRRRGEGQDNMGKWQDNFVSSQGRQGGGNRFGYSGRGAISGQSGGGHQRDRGNQGYRGGYGGVSRFQDARGRS

SEQ ID NO: 226854 - protein, 724 aa, Zea Mays
MASRFWGQGDSESEEEEVEEVESEQGSDSDDDGGRGGAGRGAQNRYLKNQEDDSDESDTGHRVIRSLRDKRNEEMRSIVDQMRNAMKINDWVSLQESFEKLNKHLEKVVRVNESTEVPKMYIKALVLLEDFLAEALANKEARKKMSSSNSKALNAMRQKLKKNNKQYEEQIQKCREHPESFEDEAADDKDVDDDDADESDAEIEDPDKIAMSESEEEQDEEDDDKDGWEQKRSKKDKLMDKQFLKDPSEITWDIVDKKLKEIIASRGKKGPSPFVVIPEAVHRKPTFPESGRTLMDGLMFLIYKYGDERTKARAMLCDIYHHAISDEFSVARDLLLMSHLQDGIQLMDISSQILFNRVMAQLGLCAFRAGLINEAHGCLTELYSTGRVKELLAQGVQQSRYHEKTPEQERLERRRQMPYHMHINLELLEATHLICAMLIEVPNMAASTYDKRRPMSKTFRRLLEVSERQTFVGPPENVRDHVMAATRALNKGDHQKAFSVINSLEIWKLLRNREHVLEMLELKIKEEALRTYLFSYSSSYESLSLNQLTTMFDLSEQHAHSIVSKMMMHEELHASWDQPTKCIVFHSVDQTRLQGLLFQMADKLSVLVEINERAYEARTGGTLEGVPPRRRGEGQDNMGKWQDNFVSSQGRQGGGNRFGYSGRGAISGQSGGGHQRDRGNQGYRGGYGGVSRFQDARGRNQSIPSGRGGDGGARMVNLNRMGRV

SEQ ID NO: 226855 - protein, 1955 aa, Zea Mays
MSSIASQLKAIKSALGAAPEPARRPVTRPSVLFDAKEAADIDLRAILPIALSGLEHLTSVDERFAKYSNTLFRETSLEVNREQLTPKENDKLNKSISTYLRLLAGYLHLPSALKTLEYLIRRYLVHVYNSDELLLSALPYHDTHAFVRIVQLVNLGNSNWAFLGGVKSSGAPPPRSVLVQQCIRDKAVLETLCNYATPTKEFSHSKTVVCFCTAVIVECLGAVPKLDTDVVQRVLGFVFDSLNPAVTRDQEYKAGALMIVGVLGTRATLAPKLVQNLILFVARTAQHDAFESVDLPWLRVSVMALISLVQSQSVHVFPKKPLMVLKDIRDFSGILSVLSSEYNIEKFIRLYVESLIDYSIVDGTCHTHLIETIESLPMKNFIESVVCKILGNCIKVSRATGIPDINHTELWAKKIFKAIERKYPLELRDAIHKFLENSETNSPGGDSLAEVFGILFDENKNLPTEISDSNIWFSLDHPKATVRQSALSKVATSGIFNNRTLNPQKFINMQDAILRSLYDDDLSVVQAALSIEGLAAVANPDSLLKAYDCVLTKCIKIINKGGSKALKASDVAVSCLEKLVTEYQSHHMEHAKDIATLVFRLLIVHPKTLRVNIKALELAKKIRWEFYASSSLVYDGVDFDKMKNMSADSIASINMNNIKAFAETFLADPNKHVEWLANSGSGSRFSKTLFLLIVLQTLVSTEALDEQVNLCHACLPVLKDECHHIQPKDSDVGDEISITNLEMCSLELVKHFFNRDTEALNVRILVCIFWGIVRVQSSCIKQNPVVGSGGNTMLDDLFLFFLVSPAKNIFQKHLQYLVNCIGAPFQFISKYFLDEDLSERVQVESLLVFASICSKCASSDNNSLDESICVQLLLGFPSIILPLAHVNKDIRASAIKCIEGLSLVWQRLSTSVPRNGNNTKLPQCLSSPTFGSFLELLVNQKTMICSDAKFLPAYISSMLSPCKDILVPENLHERFDPHTKDTILTFILRSALRLPPYGKFMVLSVLKGVGSILFHAEDVKSLFFDLLDRRDQYQNRHNCKQILSTHEMHTLCLLLEVLFSTPDHVNIGFNMFEPLMKALKVDASSPGDSVVVMPCLTVLQNLQPGFFDNLKTDTKEKVVGRLISLVRTESFVVRNAARDALLRINVHSSTLVKFIELISTLGDARGHSKRIKRNEDRDLNVFCNFAEIFGENSVASILVSLLDILFLKKDVKQRSRLLQPLFQILSKLLSDQWVSVIVSQYNDQQDTSSEIPDLSSFVKEVQHLVLLALKDITDTLQSGHHDAMVSSSDVGLLIDCVRSIQDIGTRNHGFSLIASLGKACPQLVSESIVDLFVAIGDAIKQDDSHSQRVLEDLLSVLVPCWLSRTTSIEKLLQIFIKALADVPEHRRLTLMVYLLRTMGKENNLSTVIMHLLHSVVERISHSFSVHHGDDYRLAMSQEWEYGLAVNVLDQFSYKLWFPCLSKLLKNIRVHEKQDLHLMLHLAMRLILFKLQDTELNFELESEEAANSIQGSLGALMEEVILCGVYARDKKRDICTDITKEVRDFANTILKTITGWMRASTYLMGITLLLDHSDNHVKRKTLRILSETARGNSLVQKNQRKARKLKHISGTTIKVDKSSGPYFSKLCLKILELIDRVGDSDTKVKVAAISSLETLAKEYPSDNPVYSNCLATIIDQIGSDEAAVSSALIHTVGSLVNVIGSKALPQLPLIMKNIMLMSHQISCCPSGNYAHGSTRTAAELSNQDITVLLSALTTIEVIVEKLGEFVNPYLKEILDLVVLHPECSTQMHAKLDAKAARVRELLTVKVPVRLILSPLLNLYSLTANCGDASLTLAFSMLASLVGTMDRLAVGTYHSKIYEHCLAALDLRRQHPDSLKNINMVEQSIIHAIISLTMKLTEGTFRPLFLRTLEWAEAEVDESSSKKSLDRAIVFYKLVNKLAEKHRFMFTENSIPKIKII

SEQ ID NO: 226856 - protein, 1214 aa, Zea Mays
MICSDAKFLPAYISSMLSPCKDILVPENLHERFDPHTKDTILTFILRSALRLPPYGKFMVLSVLKGVGSILFHAEDVKSLFFDLLDRRDQYQNRHNCKQILSTHEMHTLCLLLEVLFSTPDHVNIGFNMFEPLMKALKVDASSPGDSVVVMPCLTVLQNLQPGFFDNLKTDTKEKVVGRLISLVRTESFVVRNAARDALLRINVHSSTLVKFIELISTLGDARGHSKRIKRNEDRDLNVFCNFAEIFGENSVASILVSLLDILFLKKDVKQRSRLLQPLFQILSKLLSDQWVSVIVSQYNDQQDTSSEIPDLSSFVKEVQHLVLLALKDITDTLQSGHHDAMVSSSDVGLLIDCVRSIQDIGTRNHGFSLIASLGKACPQLVSESIVDLFVAIGDAIKQDDSHSQRVLEDLLSVLVPCWLSRTTSIEKLLQIFIKALADVPEHRRLTLMVYLLRTMGKENNLSTVIMHLLHSVVERISHSFSVHHGDDYRLAMSQEWEYGLAVNVLDQFSYKLWFPCLSKLLKNIRVHEKQDLHLMLHLAMRLILFKLQDTELNFELESEEAANSIQGSLGALMEEVILCGVYARDKKRDICTDITKEVRDFANTILKTITGWMRASTYLMGITLLLDHSDNHVKRKTLRILSETARGNSLVQKNQRKARKLKHISGTTIKVDKSSGPYFSKLCLKILELIDRVGDSDTKVKVAAISSLETLAKEYPSDNPVYSNCLATIIDQIGSDEAAVSSALIHTVGSLVNVIGSKALPQLPLIMKNIMLMSHQISCCPSGNYAHGSTRTAAELSNQDITVLLSALTTIEVIVEKLGEFVNPYLKEILDLVVLHPECSTQMHAKLDAKAARVRELLTVKVPVRLILSPLLNLYSLTANCGDASLTLAFSMLASLVGTMDRLAVGTYHSKIYEHCLAALDLRRQHPDSLKNINMVEQSIIHAIISLTMKLTEGTFRPLFLRTLEWAEAEVDESSSKKSLDRAIVFYKLVNKLAEKHRSLFTPYFKYLLEGSIQYLSEDDALGGSKHKKKKTKLVDVQVEQKDKLLGLKLWNLRALVLKSLHQCFLYDNDQKILDSSNFQVLLKPIVSQFVVEPPKSVESVLDAPSIEEVDETIILCLGQMAVTARTDVLWKPLNHEVLMQTRSDEVRPKMLGLKVIRYMVQHLKEEYVVLVPETIPFLGELLEDVELPVKTLSQEILKEMETLSGESLQQYL

SEQ ID NO: 226857 - protein, 179 aa, Zea Mays
MVAIHWEAQLQWAMRRSGSGCTTLCFMSHGDVNGVVFASIPAPIFAALYCSTKDLGTGIAEDASTEDDDFSGDLPPEFENIMIFNGVETESDIAPPVLEENKDAVVSATKTAKSLDGFALKTGQEEEGPEEVDATEKAMEVVDNVVKSLDEEVESKEMQKQQPHDYNSMSLGVVTGHLI

SEQ ID NO: 226858 - protein, 491 aa, Zea Mays
MKDPAHRTKVVLRRLPPAIAQQAVVDQVDARFAGRYDWACFRPGNASQKNHRYSRLYLNFKHPEDVVEFAEVFNGHIFVNEKGAQFKAFVEYAPSQQVPKSNVKKDGREGTVTKDPEYLEFLEFISKPTEHLPSAEIQLERKEAERAAAGKEAPVVTPLMMYVRQQRAAKSMAQRPGSRLSRKVAGVVTSSSSPKRSFEKRRSSTYVVRDSIKEKPTYIMVPKREEHTQREKIVSGNSGDATSGGASGSGQSSDKIVILKGRGRVDSNTPDGAAQQSSTPVKNIPPSSSRLDKRSEANGRIIKTVLSNKEVRSSNPSQHEQEGQMFNTEKDKRPPRALNPRTIVKDQVVENAERSHFDEKNNYLHSSAPIGEKVERHARNRDRPDRSVWAPRRYDKSPPGGVSHALSSDFSQMQSHSGDNVSQLTDGHGDRKTDTRGHGGHRHANRRGTPCDPKETKISASVPDGKNSKRGSASYGAHERQVWVQKSSSGS

SEQ ID NO: 226859 - protein, 2369 aa, Zea Mays
MAYTASSLMTRSRQDEVNKIIEISNVGIYCHQLEEEQDLCHVGALENDHSRDYLVNPFCVTVSVLANKAAKLDGTPQYNMTAELTALALSVDEIQLQQILNLCDYFTICALRTKYGRYRPSQSSLSKRCKGWYRMWWQYAQNSVLADVRRRLKKTSWRYLKQRLNHQLRYVKLYRMKLELLQKGQIVSEDILQELENMDRECDIDDILNYRTIAEQQLQVVDGSVRRTLRESLVKSSIDTHSPGSPRSDEQLAGASQGWLNWLSLGMLGVGGTADSSSFAGVISEDIIKDIYEGTEFRPVSSAENCLKKENYYSLFVRLSISQIVTTVTSRRFGTKLVDTMFSGLGMECKIWDDAATILAWLDSLRVINPLNKTKILWAEKCSTGDGLGAPVVSIQVDFPKSNERSEASTRVVVQEFNAIYEPEFFVNVLYIYNVFSAFQFQHDRVLSSLNRFNNLGTRLVSKLKYMSANRKKLIWDLRIYHFVIRIPSQNCERKELAMVIDAGDVFIQSKDTIDDISRTQESNSFLDHISKSLPSYFSDDLLLGIQLDELYNQFELGLTGFQVKVLLPDRHNVSSTLIKLDASIALRLCVFLDEPVLKQLEVGFIVSSIDAYLSQTMYSTIVNLPRMKETNLFKNSVFDNTKTHVPKKLALNVSVSLKLAKLGLHVDLDGNFEESSGLIVGIEDIDIRYAICELSDLSLAMKTVNVTFRYWKDKSDSHVLCLSGNLTRCPENSVETCLDLHYRTHKHDDQIHHVYRLILCDVDLHVNPSVIGQIRMFLRKLDSGPSIGSDVESTMIGQSSMKSGAANGILPMFFLSNLCGADGTVFAGVSVDHFPFLVADHSCGYNFGCLGTQNVEAQESLYSKNEHCHDTSGLNGYHASDLTSNTYGKTQRSDCSSGSSNDPKNASRTVLDLSLISVRIHFPESCGTLVTITIPESISTLTYFDASSWDLLLSANNLTLASPWTPPNVNELVWGTASHRNASVLNVRVKKDLPALSTEVCVGIQNVCCVLPSKLLAMFVGFFLLDDWNRIAEQEFLVADNNLEGLRESHDCVTYKFDISDCVVFFPVEEQGLSCLKLEVPHFFCEFIANGSSVEFAKRIPKEFFSSECIVSRRVDVICIYARNASISLLIVSDQTDFMLKLDENVPKRIHSLIEKLDADVWIQVPCKDIPYSQQPTSPTSVMSKISRCNLIAEDLYFINGMETVIGVVDQLISIGNESKMYKGNASQFLDHRSFCEGNPDPNECTNLTISIKDLMILLGQSKAKGLALERIATANMEFDVSAVLVGEKPERIDFDVVSLTLQSPGGYTLISIVSDGPLSPVFFKFTKHHTGQDEILLSVPLFEIWLYLQDWNTIINHSHSYIKTEVNSMPVEHAAALSQFPEMVSSPLIASEFGSPDDFNLVVTCETISGVLHIPIWGKEENHTSNHMGVTPASFPMEVGTHETDDIQYCEPKGCKFVTLTFDTKHFVVMSGDSCINFRCDLERLKVLLEMIQENKGTSVPFVHISKVKSSGYVRQSERNLEHLSVDLQAEYMDVSFSHQIFNFWHNMELKFPAASSASSFYSVAFKAGLRKGSLLLSDGRWSSHGPVIETLLKNLTVQFSQMKDRTEVSAFVDLLVNYNNIDKVMWEPFVEPSRFQLNMLRKCGDCGLDISPSTDVCLSSSKQLNLNISEPLIEALLRLNQMITDSLDPSNGSGIWEDPGILRLNHDDVRTRRYAPYFLSNDTSLPFRFKVYRGAVNSDDIGSFSVIDENSVPAGYAVPIYVEETPDEFFFQHREARSSDHLIEKRMSALSHYMISIEFDGTSGPSKPMSMDLVGIYFFEVNFSSSKKPILGEESLGAFSSNAKGNDGLIVPVVLDVSLQNYSKRIRVYSTVILYNATSMPLELRFDIPFGLASKVSCPHHNFHQKNQIWDFSRNFTLQVIGPIPPNKEIPLPVHLSEAGQIRWHPVGRTYLWSETRSLSSLLSRENRVGFMKSSVCYPSHPSNDPFRCCVSVEEYNVPSSVSTKKKQLCSERLNTQVSGSSTPNTFKQNLTRTHFIRHVKLNTPLLIKNYLPVYISLAIDNGGSARVISLKEVGSASILFVDPSNDLGITIDIQDYRSLNIKFPRAESFSTTAKLNGFKFSITESITFYSNLSNFPLNVMLEKSMDARSGARELYLSVPFLLYNCTDLLLTVTESSSERSGPTLVIPPSFELDGYARHMLEKGGLSLVNPSVQCFTGKMPQIYLMDGHCSSSDISCTRNSESVKKDLDNSVKAYMFAPDGHTPATELSVKLNASPPNNGTETTRRNWSNPFLLVPASGSTNVTIPQSSTSGAFLVAVASIPVSTELFGRTRAIAFRPRYVICNACSNDLFFRQKGTRFSKHLSSG

SEQ ID NO: 226860 - protein, 2580 aa, Zea Mays
MFEGVVSQVLYGLLRRYVKGIQKEQLKIGIWKEEILLENVELILEAFDYLQLPFALKNGRIGKLSIRIPWKKLGWDPIIIVIEDVYVCACPREDSEWSSDSLDKRELAGKLAKLNAIELAKFSRRVTDNQTGQSFLSYISAKILDSIQVSMRNVHIVYMDTHNGQGNFVFGLEFTSLSIQTDTQKQSFTISLMTRSRQDEVNKIIEISNVGIYCHQLEEEQDLCHVGALENDHSRDYLVNPFCVTVSVLANKAAKLDGTPQYNMTAELTALALSVDEIQLQQILNLCDYFTICALRTKYGRYRPSQSSLSKRCKGWYRMWWQYAQNSVLADVRRRLKKTSWRYLKQRLNHQLRYVKLYRMKLELLQKGQIVSEDILQELENMDRECDIDDILNYRTIAEQQLQVVDGSVRRTLRESLVKSSIDTHSPGSPRSDEQLAGASQGWLNWLSLGMLGVGGTADSSSFAGVISEDIIKDIYEGTEFRPVSSAENCLKKENYYSLFVRLSISQIVTTVTSRRFGTKLVDTMFSGLGMECKIWDDAATILAWLDSLRVINPLNKTKILWAEKCSTGDGLGAPVVSIQVDFPKSNERSEASTRVVVQEFNAIYEPEFFVNVLYIYNVFSAFQFQHDRRQPVGRWSSGGCGMRGGDMRQLWLGGEVLSSLNRFNNLGTRLVSKLKYMSANRKKLIWDLRIYHFVIRIPSQNCERKELAMVIDAGDVFIQSKDTIDDISRTQESNSFLDHISKSLPSYFSDDLLLGIQLDELYNQFELGLTGFQVKVLLPDRHNVSSTLIKLDASIALRLCVFLDEPVLKQLEVGFIVSSIDAYLSQTMYSTIVNLPRMKETNLFKNSVFDNTKTHVPKKLALNVSVSLKLAKLGLHVDLDGNFEESSGLIVGIEDIDIRYAICELSDLSLAMKTVNVTFRYWKDKSDSHVLCLSGNLTRCPENSVETCLDLHYRTHKHDDQIHHVYRLILCDVDLHVNPSVIGQIRMFLRKLDSGPSIGSDVESTMIGQSSMKSGAANGILPMFFLSNLCGADGTVFAGVSVDHFPFLVADHSCGYNFGCLGTQNVEAQESLYSKNEHCHDTSGLNGYHASDLTSNTYGKTQRSDCSSGSSNDPKNASRTVLDLSLISVRIHFPESCGTLVTITIPESISTLTYFDASSWDLLLSANNLTLASPWTPPNVNELVWGTASHRNASVLNVRVKKDLPALSTEVCVGIQNVCCVLPSKLLAMFVGFFLLDDWNRIAEQEFLVADNNLEGLRESHDCVTYKFDISDCVVFFPVEEQGLSCLKLEVPHFFCEFIANGSSVEFAKRIPKEFFSSECIVSRRVDVICIYARNASISLLIVSDQTDFMLKLDENVPKRIHSLIEKLDADVWIQVPCKDIPYSQQPTSPTSVMSKISRCNLIAEDLYFINGMETVIGVVDQLISIGNESKMYKGNASQFLDHRSFCEGNPDPNECTNLTISIKDLMILLGQSKAKGLALERIATANMEFDVSAVLVGEKPERIDFDVVSLTLQSPGGYTLISIVSDGPLSPVFFKFTKHHTGQDEILLSVPLFEIWLYLQDWNTIINHSHSYIKTEVNSMPVEHAAALSQFPEMVSSPLIASEFGSPDDFNLVVTCETISGVLHIPIWGKEENHTSNHMGVTPASFPMEVGTHETDDIQYCEPKGCKFVTLTFDTKHFVVMSGDSCINFRCDLERLKVLLEMIQENKGTSVPFVHISKVKSSGYVRQSERNLEHLSVDLQAEYMDVSFSHQIFNFWHNMELKFPAASSASSFYSVAFKAGLRKGSLLLSDGRWSSHGPVIETLLKNLTVQFSQMKDRTEVSAFVDLLVNYNNIDKVMWEPFVEPSRFQLNMLRKCGDCGLDISPSTDVCLSSSKQLNLNISEPLIEALLRLNQMITDSLDPSNGSGIWEDPGILRLNHDDVRTRRYAPYFLSNDTSLPFRFKVYRGAVNSDDIGSFSVIDENSVPAGYAVPIYVEETPDEFFFQHREARSSDHLIEKRMSALSHYMISIEFDGTSGPSKPMSMDLVGIYFFEVNFSSSKKPILGEESLGAFSSNAKGNDGLIVPVVLDVSLQNYSKRIRVYSTVILYNATSMPLELRFDIPFGLASKVSCPHHNFHQKNQIWDFSRNFTLQVIGPIPPNKEIPLPVHLSEAGQIRWHPVGRTYLWSETRSLSSLLSRENRVGFMKSSVCYPSHPSNDPFRCCVSVEEYNVPSSVSTKKKQLCSERLNTQVSGSSTPNTFKQNLTRTHFIRHVKLNTPLLIKNYLPVYISLAIDNGGSARVISLKEVGSASILFVDPSNDLGITIDIQDYRSLNIKFPRAESFSTTAKLNGFKFSITESITFYSNLSNFPLNVMLEKSMDARSGARELYLSVPFLLYNCTDLLLTVTESSSERSGPTLVIPPSFELDGYARHMLEKGGLSLVNPSVQCFTGKMPQIYLMDGHCSSSDISCTRNSESVKKDLDNSVKAYMFAPDGHTPATELSVKLNASPPNNGTETTRRNWSNPFLLVPASGSTNVTIPQSSTSGAFLVAVASIPVSTELFGRTRAIAFRPRYVICNACSNDLFFRQKGTRFSKHLSSG

SEQ ID NO: 226861 - protein, 351 aa, Zea Mays
MWTCLMARSPIQSLHRIGHHGVHMAGPNHLADKRSNKYSIIFNNREKESLVVFIDSEDEITFSLHLNEGSANKFAHVDAINTPLALQPCCFLKERLLMQQEMSDTTRQHQTVRENRGCFFNATDEKELLNAIFKPAVEYPHADNLAGKETRQRLSTRMSYKILEENPWQLYTTIRVIKMSRPMEDMIKVHDVPHPLLKSLGVKNLPAVIGRTVNGEELLLKDGISVKDLRSGVKELKTLLDSIEKKNKKLLSNLANKKPSGQWEEIKKIPLLTASNFEEIKKTPVCIIGVFGSNKAKGQLEAVLSEISKKTLIRGQNYNSRNVVSYALLDKDKQSAFLSSFDKSGYRKING

SEQ ID NO: 226862 - protein, 772 aa, Zea Mays
MPCPISCGATSDKVAGNVTWVADGAFIHAGKVAELDSPGVMPMLSSLRYFPPDASSAAKYCYAVPAAMHARYLVRTTYYYGGFDGGGAPPVFDQIIDGTRWSAVDTAGGYARGLATYYEAVVEAAGKELSVCLARSAATAPGRSPFISALEVVPLEESVYSAVNFTAYALSTVARHSFGHNGSIIGYPDDRFNRYWEPYSDGGIPVVESQASVATEAFWNKPPEAVFRRGLTASRDKSLELQWPPAPLPAASYYLALYFQDNRGPSALSWRVFDVAVNGQPFFAGLNVSTAGCMVYGVDWPLSGQTRITLTPALESPVGPLINAAELMMVVPLGGRTHPRDVIGMQELARGFTNPPSDWRGDPCLPQGNSWTGVTCNQDPLARVTGLNLTNFRVGGSISNNIANLTAISSIWLVGNNLTGPIPDLNHLLHVVSLHLEDNGLTGPLPESLGNLTRLEELSVQNNSLQGTIPSSIRNRAAVDPRFRFQPCNPARNYSAAHDPSAASPACCPNRPVLTQDMKISTSCLVHLLNYLIVPRAHRPLCRRCISHSRLFAGDDRRLPRPNLLGFSMTTPPNPSPLLSSRPNPSLPLHRRPRFPHSPAAANTTGAASAPDWFRPRRTPDSDPSISGGRVTARDPGVRVKAKEGAEEEKDKKAKRRRWWERWSGDKESYLVDDVEPLPIPLTVPETEPMSREELDRRLSCDVEIDECKTVSYEWTGKCRSCQGTGLVSYFRKKGKETICKCVPCAGIGYVRKITLREDIQKIDELDNEKLP

SEQ ID NO: 226863 - protein, 954 aa, Zea Mays
MDLFAISPRFYYTQRPPGRPIVDERPRLNNRTNSNALLNVYLSNDDIAKLLVPLLKLRQACCHPQVGSSGLCSLQHNPLSMDEILQVLIGKAKIEGEEELRKIVVALNGLAGLAVIEQRNQEAISLYKEALALAHENINDFRVDPLLNLHINYNLAELLRISSEYLQECPLKNPAFEVAISRKRKEIDTVETNVLSVKRNKICENSVLSLTANGLEISEDKNTIGQTCMTRDVDVENVTGCHSSFECFADDCLRKTCNTITEKYLSTFTSRLVVAQKDFNASFTEVLNITKELQSEYMNWWLYALDCIEENNISADDLIKKIDNSSSKSTTGLGSWGISSRVKSIAGLKYAIQADIDSLQSSRQHLMDRLLEVDKTMANPRDEDIEGQRYCPNCYDGTGSLCIQCELDELFQRYESRLFLVKKSNNGSVIDSVEEAHDLLRRKYELNHFFRNRKSKEGPEPDYDNNNPRSARENIQVYRHPSRTETALRVIWNHSKTVLGKQYSTMAKKHLLLFEAMRKEFPQARFLSIAQTQLLRAHDEIKMSISRLQLKEKEDDPSAANIVTREELIPYNVQFTSEKFMSLSSLARVRGQLRYLKGLAVCNKKTHNQHDESLAKAGDAVDTATSCSATGQTVSDFRNEPCPICQEKVFDQKMVFQCGHFVCCKCCLYMTEQTAAQFGKRKQWIMCPTCRQRTDIENIAFVVEKPWDKHEKSIEDLAESTISVQGSYGTKFEAVTRRILRITSTDGTAKVLVFSSWNDVLDVLEHSLAANNISYVRMKGGRKSQAALSQFKGQESNINVDKVNRAACKMQPVQVLLMLIQHGANGLNLLEAQHVILVEPLLNPAAEAQAISRIHRVGQDKSTFVHRFIVKKTIEESIYKLNRSRAVCSTINRKSKNFKDEPVLTLKDVESLFPMAGPDEPLEQADQNYGDSLRSLPPSVAAGLAAERRRLMEQ

SEQ ID NO: 226864 - protein, 169 aa, Zea Mays
MALPSATVRVPWTASTFRLAPNMLVALFFLAALLAAPARSSSPSSNNGAGLQQPTLTVCSGHSTVATSGEFASFLAAVCAGAYGGGVAPHMSHSMSSYVAAENRTTMYGVAQCSPDVSASECTACLAVVGTGPPTHGVSVGAARTHCARSCIALLVTCFSNAYLCSTNR

SEQ ID NO: 226865 - protein, 297 aa, Zea Mays
MADRFYCNWVGGCLHQPRTHHVHMVPAAKTATVSERTCHRFIILNRQPDAVPEDTMRDLEKNHLDSEEEEDEDGGRTSYQLYNYLVLEAATCRFSSRNKLGSGGFGTVYKGTLENGKEVAVKRLRDSKRTIQELEREISIVASLRHKNIVRFLGYCFQEEGRFFIYEYVPNNSLDKFWYKASSQWHQRLEWATWFNVILGVARGLKFLHDKGIIHRDLKPHNVLLDHNFNPKIADFDLLRMYDQQKTHESTEKAAGTLVHIRTKIAAFNQVRRVQLRGVGAGDHHRPQDLHFRRPKL

SEQ ID NO: 226866 - protein, 385 aa, Zea Mays
MNEEHTIGDSLDEAEQEELNHEIALESTEDCTGSLCKATAFLFPKTAFDFLTNVAASLFGIHGSPSPSSVLVDPRYEIVKMAEMQPCAEETPKEEQIVKFVAQIDKPILSSEDAISKRFDVVTDCLDHHFVKENGHESVTRGWLKKVRLEWNILQNDLPDGIHVRVYEERMDLLRACIVGAPGTPYHDNLFFFDIFFPPDYPHEPPSVHYHSGGLRLNPNLYESGKVCLSLLKTWTGTGNEVWNAESSTVLQLLLSLQALVLNEKPYFNEAGYDKFVGKADGEKNSITYNENAFLLSCKSMMYVLRKPPKHFETLVKEHFTCRAPHILDACEAYLGGDLVGHAHDKAYVAEDGNKNCSTGFKIMLGKLLPKLVTAFCEAGITSDR

SEQ ID NO: 226867 - protein, 544 aa, Zea Mays
MKSNGCHIVKLSAAELSAKHGVGGCFRSLLGQLLSDVPDVADVSALASWYCEAENFDQPIIVIIDDLEQCSGDVLGEFVMMLSEWVFKIPVFFVMGIATTLDAPKKLLSSEALQRLEPCKLTLGSPSDRLNALVEAVLVKPCAGFCISHEVALFVRNYFFRHDGTITSFITALKLACSKHFSMEPLSFLCLGMVEEDSEEFWHDKLESLPQTIWKHAFDLPSNKNARNSCNMVEGLSRLLKSQKDWSSVLLCLYEAGRHDKVQLLDIFCEAASPDWQTENAPDSYLFASKVALLGVKSGSARRFIAQVMNTIRYLPTEILLHVLEVWSIHLKGMSEINDRVKELRSKGCGADSVRAKRKSTANTGNGVVLINEEAAALLQDVIRKYLVPAECLPFHEIVCFKNVDILRSALIGNPRRMIQLDLLRSQSHLKCSCCSRSGAAVSGSLHDTSILCSLAQEYGDMINLHDWYTAFEGIIKSTNSKAKGKSCSSPSKKKKKSNPTPLEGDGMIQARFCSAVTEMQVTGLVRMPSKRRPDLVQRIAFGP

SEQ ID NO: 226868 - protein, 170 aa, Zea Mays
MDCTYQPPPPSLIGIQQFLFLWDTLGDVQLTQEEDHHVWRHEASGLFSSKSCYKVLLLGSTVFEPWKRLWKTWAPPKCKFFLWLAIRNKCWTADRLQLRGLPHPDVCPMCDQAQETIQHLLTACIFARQFWHTILAAIGLGHLTPTADEEKDMAVQMSGRSSLIFLIIFR

SEQ ID NO: 226869 - protein, 428 aa, Zea Mays
MASRRGSSSCALCEGSNLPSCCALCVNARLLEYHTKLRMMRSLRDSLHARIAARLEAKSKTDEQRIWRASKAHDIMELRDRLTELKSKTAVDKTKVEQASSGLKAKTASLNLALVTLKKRQADAVAMHTSAMEIAQMNLMTITSDCMKMQSKSVKQLCRLFPMRRVIKEGEKKDNYSGPYDSICGARLPRGLDPHSIPAEELSASLGYMLHFVNIAVRILSAPVLHVSGFKGSCSNIWQRSSYWSTRQSQSKVYPLFIPRKNACTGGEETSLSESGSSNFGVDSVDSVKKQSFGSTRSNSFNLSGASSHSMERHQYLQRGISLLKTSVTAITTYYYNSLGLDVPSNLSTFEAFSKLLHTLSSSKAFRTAFELNIASRSEKQAQQLNRSIWKSSSAVSSDSSFMDSMHTTIMHSRQPPPELKPELLVHR

SEQ ID NO: 226870 - protein, 428 aa, Zea Mays; identical to SEQ ID NO: 226869

SEQ ID NO: 226871 - protein, 227 aa, Zea Mays
MQKELDYLVGAVANPKKPFAAIVGGSKVSTKIGVIESLLAKVDILILGGGMIYTFYKAQGYSVGKSLVEEDKLELATSLIEKAKAKGVSLLLPTDIVVADKFAADAESKIVPATAIPDDWMGLDVGPDATKTFDEALDTTKTVIWNGPMGVFEFQKFAAGTEAIAKKLAELTTTKGVTTIIGGGDSVAAVEKAGLADKMSHISTGGGASLELLEGKTLPGVLALDDA

SEQ ID NO: 226872 - protein, 93 aa, Zea Mays
MGEAGAEVRGDAGRAQGVQRAAAGGGGDDQMGDVRRGGHHDEVGALRLRSVQCSRALQPRGYVYTCMVFYFLVSPGFIWCTLLNSRVVINHVR

SEQ ID NO: 226873 - protein, 173 aa, Zea Mays
MAWVMHRSSSDGGSSSGWSDAAAAVVAAAEERAGWEVRPSGMVVQARDDAAGSGGAPPRPPPPPEIKVRVKYGGARHEVSVSPIATFAEEAAGAEDGAAAGGPAAELPGQGAGQRRVPGRMRRQEQVQGGARRGPRQRRAPLHRAPEERHGRERQPRHRRRRARGGQARRSGN

SEQ ID NO: 226874 - protein, 361 aa, Zea Mays
MLQVEINIHRFFSGYTTGRTHARTHWPQMLKLKDWPPSSSFDKRLPRHGAEFISALPFREYTDPRYGPLNLAAKLPAGVLKPDLGPKSYIAYGFYKELGRGDSVTKLHCDMSDAVNILTHTAEVTCQTDIGLIEKIQKDMREQDLQELYGGLNSRSELKLSPAPTECRDESVDEGLKTSYSREGNCVNRDNYNGLDINALPPDDDGDIAKDKESSPGSEWQSELGQSSDHNNGVNTTDEMYNGAHYISHNQKSTGRKVGIKPQEEKSEKADCSGTCAYLKGSSEDNPEMPIVESSEEQSTGGALWDIFRRQDSDKLQDYLRKHCSEFRHIYCNPVKKVLNPGRLNRSLVKLFSFLLDVLTK

SEQ ID NO: 226875 - protein, 701 aa, Zea Mays
MADEAEWNEAEAGIAAPGAGVAPPAPGGGEETKRKRGRPKGSLDTYKRRRRRRRTGDLVSAVPAASLGDMGHSCGCIPAPPLPPPCTVYTVRDGGVAITPQSMEDEAEGVEAESGNAGAASAARDGEETKRKRGSPEGSLNERNKDRTPKPKAKGRRRRRTDDQTLSVSAVSLGDLGLGVAAGTRSIRERRPAPNAFFDVGSDSDTEHDDDDDEEQTTIDQANHESAKTGDSVKKGGRPRKMEAGQLHTRTQISNGKSNGHTNGNPAGKKRGRGRPKKLTVEQAITRCQFSNGETNKSGAEAARSKQSRNRRISQNAKKRKRDEGKESMTKKLNKRSKMLTGENALMCHKCPYCRKNCNCKACLRMRGVEEPPKKEISKENEIRYAFHIVTMLLPWMRELRQEQLEEKEVEANIQGVSMNEIKVEQAEFDLDDRVYCDRCKTSIVDFHRSCKRCFYDLCLNCCKELRKGEIPGGEEVEYVPPEPKGRSYSFGKIHLLKDADRSKNSSNGESYNGMPAVGNSNNGLLLWKAKSNGSIPCPPKEVGGCGSTLLDLKCLFPEKMFAELEYRADKVLRSGTLAKAMVSRSDRCPCFNQSGKIRTESKSVREAASRKGSSDNFLYCPVAIGIQDDDIVHFQMHWAKGEPVVVSDVLQLTSGLSWEPMVMWRALRERSKGKAEDEQFAVWAIDCLDWCEVRSSISNV

SEQ ID NO: 226876 - protein, 149 aa, Zea Mays
MRKVNLDDVNAAFDDPEDDNEDAFEDETGPLTLNAFDLIILSQGLNLAALFDRRQDCDKLQNRFLSRNPAKVILSSMEVVAQSMGFKTHIRNYKMRVEGLNADKTSHLSVMVEVFEVAPSIFMVELQRAAGDTSEYNTIHPKGQIYIGQ

SEQ ID NO: 226877 - protein, 1288 aa, Zea Mays
MRPLPIARGRFLPDRCGVEAAAAASSSSASAAATVASISVACSTAFTWRNTSYTYQQHKYRKTMEQRLHGGPQSAARRERGGEVFAYGPETRAYLETAQHLREDETLAPFQFSLPNLPQISKSILLRRRSNFPLPGNHPVPSSLPRFRFCARLGRAAEYQAGDLYLAGAGRGGDARNPSLAAAFSNTEMAMEMSPRQSPPRTPRRAAKPRLFIKEMVLRNFKSYAGEQRIGPFHKSFSAVVGPNGSGKSNVIDAMLFVFGKRAKQMRLNKVSELIHNSSNHQNLDSAGVSVHFQEIIDMDDGNYSAVEGSDFVISRVAFRDNTSKYYINERGSNFTEVTKLLKGKGVDLDNNRFLILQGEVEQISLMKPKAQGPHDEGFLEYLEDIIGTNQYVEKIEEAYKQEKIHQNSQTLKEMEAIYSKHVKRQEDLENNMKSCKDQFKEFERKDVKYREDLKHLKQNIKKLDDKAEKDTSKRDEKTKEMEESSNLIPQLEAEIPKLQKRLNEEEKVLEQIKASSREETERFRAELTQVRTELEPWENQIIEHKGRLDVASAEKKLMKQKHDGAQAELTDAQNQMESIKEKVKTKDSYIVGLQEKIEKHLNEASEARKIEQECQKQEDSLIPLEQAARQKVAEMKTTRDSEKNQSTALKAILQAKESNEIQGIYGRLGDLGAIDVISVTLNFSNKENMKLWSAAKYDVAISTSASSGLNYIVVETINSAQACIELLRRRNREETVTCLILEKQTHLLHKIKEKVKTPEGVPRLFDLVKVKDEKLKLAFFHVLGNTVVANDLDQASRIAYTAAKEFRRVVTLGGELFEKSGTMSGGGKRVQRGMMGTAIRESFSEEAIKNAENELTKLVDELNKLREKMNNAKKQYRSMEDAKSRLEMELAKAKKEVESMNAQYIYNEKRLDSLKTASQPKADELRRMQELDGIISSEQAELERLTKCSSKLKDQASAYRQSRFHFQASELQQKVENAGGKKLKDQKTKVGNIQSELDKTSSEINRHKVNVTSGEKLVKRLTKGIEESKKDREKLSAETEKMMSMFKEIEKKAFVVQEEYKKTPEMIDNHKVELDKTKEEYTKLKKAMDELRATEVDAEYKLQDTKKLAKEWEMKVKTFKKRLDEIQINVVKHMDQIQKDAVDPDKLKATLGDEQLNDTYDMKRAMEMVALLEAQIKDLNPNLDSIAEYRTKACLYGERVDELNATTQERDDLKKLYDGLRKRRLDEFMAGFNIISLKLKEMYQMITLGGDAELELVDSLDPFSEGVVFSVRPPKEKLEKYCQFIWW

SEQ ID NO: 226878 - protein, 352 aa, Zea Mays
MECLHRFCRDCIDKSMRLGNNECPSCRTHCASRRSLRDDPNYDALIAALYPDIDKYEEEELAFNEQEMTRNQKIQETIEETFRRQSQAIGKKRSIAKETGTAFARKYRRNMRTRGRGRTTTPDIAPTSSNEEDREGENVNEVTKVPSSADDHSPDLRQKRCRKTSTSQASPARNIGSSDHSFEENDELVAAKEILATSPLRGEMLAWGKNGTRSQNRHGSAGSNGRIGRSGRIAKLVDHLCNADEMDKEFQLYLVLLPVDGQTIPHLEKPYLSCQPTLSIQHLVELSRKVEELEMYIRMDGDHGSVGSMACSIGEFDGLERLREDKLLSELHPSFASSNGDLELRYALKTRD

SEQ ID NO: 226879 - protein, 145 aa, Zea Mays
MDPLASASRHCCRHSRARAPPFSPPPPDPLAPATFDGSPQSAPFHRRNASIPFHFARRAGACRASQWLTVQLEDQPQGVGLLNEPPTVLLLPNHRQSHTLWWLRLRDSQVQRAGVAQARSRPPRSSRRPSTSLSSVHDLVVVHEH

SEQ ID NO: 226880 - protein, 275 aa, Zea Mays
MTVRQVADKLASFVAKNGRQFENITRQRNPGDTPFKFLFDKNCPDYKYYEFQLAEEERALAQSKEAEASKANSGTASFKAPGGTYRSSFEQKSNYQTPASALYGAYEGSSSQGSSSSYGDHTAPPSDPVALMEFYAKKAALEERKRPPRQSKDEMPPPPSLQEELEKFMARCNDAAAQKATKEAAEKAKIQADNIGHKLLSKMGWREGEGLGSERRGRADPVMAGDVKKDHLGVGAVQPGEVTSEDDIYEQYKKRMMLGYRYRPNPLNNPRKSYY

SEQ ID NO: 226881 - protein, 120 aa, Zea Mays
MGDFIPQEELEKFMARCNDAAAQKATKEAAEKAKIQADNIGHKLLSKMGWREGEGLGSERRGRADPVMAGDVKKDHLGVGAVQPGEVTSEDDIYEQYKKRMMLGYRYRPNPLNNPRKSYY

SEQ ID NO: 226882 - protein, 128 aa, Zea Mays
MYRIIEVRTSPQYKYICDHFYLNCKLFSIPVNFSTRISFEHFFHYIYGGGQGGDRAFKPHRTVAAEARRSHLCLADRLLPSWNLRKRREASAVKLCVEAVSWSAASTASWKGTISASSPTQCPWHSLH

SEQ ID NO: 226883 - protein, 735 aa, Zea Mays
MVSQGSNNCPLPTNTPKECDLLKAKQEPGSTSQQGIVAQHQPMQQMKSEQTPIVSQQQSMQQMKNQQTPVTNQTNSATTTAKAPVVTFHMLIPILSRYLDKARDIEVQSIFAKLRKNEVSKEYFLKTVRNIVGDKLLKQAASQYQMQAQRSPQTNPSNYSLSGQVSGQQTAPSGSVTGDEQKGYPGAHTIPMRQAIASTRPPQFRPSSSGQMRSNTGYPPSQTNLHKANEMGNMSDGKGVHMLQTRPPNNSIPVQTMQHHVQRPQTSSPVFGANSIHARPFPRPLGGPAAPFRPQMADSNPKAQLIQGAVTTVSGSVPTRSIVSGNAPVNQALGSSKVSAGMESQSQQLSAPKPLAATSLSQTQSHGIQEEPKIQIQSSVQAPPAAASKTPQRKASSGQKKPLEVLGSSPPPSSKKQKVSGGFHEQSIDQLNDVTAVSGVNLREEEEHLFSAPKEEGRVSEVARKVVQLEEEKLILQKGPLTQKLAGIMSKCNLKVIGTDVERCLSMCVEERLRGFIRSIIRFSKQRVEVEKSRHHFYPLSSDVRSHIMRVNREAREQWEKKQAEDAERIRKQNDGDGNANVDLEKDRIETRGLSKHAKTYKEDDDKMRTTAANVAARVAAGGDDMLSKWQLLAERNKQRSEGGDGSSGSVPGNMLQHRPSLKSGKDLREEHEVEKRGYSTMLGSGGVRRSPLTKVARSISMKDVVAALEREPQMSKSSLLFRLYGRPLTEPSAK

SEQ ID NO: 226884 - protein, 841 aa, Zea Mays
MDPIMKLLEDDEDESLHSGADVEAFTAALNREVEASASASASTSTSVPAGSSSQPTDHGAGLLPQEHKSLLNHDPGQWQDPVKNEIVNQESQQQEQTHAFRNDHPSRPEMVSQGSNNCPLPTNTPKECDLLKAKQEPGSTSQQGIVAQHQPMQQMKSEQTPIVSQQQSMQQMKNQQTPVTNQTNSATTTAKAPVVTFHMLIPILSRYLDKARDIEVQSIFAKLRKNEVSKEYFLKTVRNIVGDKLLKQAASQYQMQAQRSPQTNPSNYSLSGQVSGQQTAPSGSVTGDEQKGYPGAHTIPMRQAIASTRPPQFRPSSSGQMRSNTGYPPSQTNLHKANEMGNMSDGKGVHMLQTRPPNNSIPVQTMQHHVQRPQTSSPVFGANSIHARPFPRPLGGPAAPFRPQMADSNPKAQLIQGAVTTVSGSVPTRSIVSGNAPALGSSKVSAGMESQSQQLSAPKPLAATSLSQTQSHGIQEEPKIQIQSSVQAPPAAASKTPQRKASSGQKKPLEVLGSSPPPSSKKQKVSGGFHEQSIDQLNDVTAVSGVNLREEEEHLFSAPKEEGRVSEVARKVVQLEEEKLILQKGPLTQKLAGIMSKCNLKVIGTDVERCLSMCVEERLRGFIRSIIRFSKQRVEVEKSRHHFYPLSSDVRSHIMRVNREAREQWEKKQAEDAERIRKQNDGDGNANVDLEKDRIETRGLSKHAKTYKEDDDKMRTTAANVAARVAAGGDDMLSKWQLLAERNKQRSEGGDGSSGSVPGNMLQHRPSLKSGKDLREEHEVEKRGYSTMLGSGGVRRSPLTKVARSISMKDVVAALEREPQMSKSSLLFRLYGRPLTEPSAK

SEQ ID NO: 226885 - protein, 58 aa, Zea Mays
MENREQTQTNQMGHNVVCTPCAYISNTINRVSFPDGYSTIDSTNFATQDVAGPKNNTK

SEQ ID NO: 226886 - protein, 64 aa, Zea Mays
MLDGVTILRSEKVKDELILDGNDVELVSRSAALINQKCHVKKKDIRKFLDGIYVSDKGVIEEEQ

SEQ ID NO: 226887 - protein, 434 aa, Zea Mays
MKKQGDIASLFRNHAAKKQKFIASSLSPDVTQASTPQEQEKERINEEIVNPMPSAPPPPTLYDVSRLPHDPGERQPIASYHANDHDAIRRAYILRGPFQPYAHEFPNRKIGDRDRHFNFVWFQNFPWIEYSVKKDAAFCFMCYLFKSKANKGKGTSAFTSDGWNNWNKGSEALLKHVGSMSHKIAEEKYLGFINPNAAIDNKIEKWSDDDRNLYKIRLTYSPRCLKFLLHQGLSFRGHDEGEESSNRGNFIEILKFLAVNSEEVNKYVLNNAPGNCTLTSPKIQKQIIQCCAIETRKKIIEELGEEPFAILADESSDISHKEQLALCLRYVDALGRPCEHFIGVVHVDDTSSLSLKDAIEALLVSHGLTLTQIRGQGYDGASNMRGDIKGLKTLIMQESPSAYYIHCFAHQLQLVLVVVAKGNNDCVWFFDQVT

SEQ ID NO: 226888 - protein, 1753 aa, Zea Mays
MSSPTQQKCENQEETKNTISVNQTDTAYKYPTTKPKISVQIPASYTPNMAPPQFMLPVPGRSMPVAFQQKQPQVPIEFRGPGFQMHSIGSVSSSLPVKMAVPLGNAPHIQPMFVHGAQPHAFHQQSFIHHGQGFGCAPPSNCYLPQFGNMRNVQELSQQYPRSGDEHKRTIKITHPETHEELMLDRHGHSFINVPASGQMPLNNINQLPHSVQTFSPLQKVYYPRPGTYNSAHVYLPNSTDVPLASRQFSSKIQPSMHGFDSTNSNQPFTSIRPPMPISRLDATSGPLTNLHTASEISNFKGMFPSSLPAPVHVELKPPITLPAEMNSESTISNQQNYCKIGLEMSLEPVNLVYEGNNKDSVATCDISCNLIPQPVSTPQTQTRPTSVDHATPVVDPQTILTSSLPLESTTCCKSSVKAKPIEVEQSLVVPTTLSSHTKLESSHATTSVILTATSLVSKIDGTPPTNRNYRYYGNSILGKPPLIYAQEILPSKFVGSNTSPEGLGKAKVNPVLFQEKFPSELNGSVPLRKHDFMIEEHVPNEKGMCSESKTEQVDVTMPSTAFGLEDDTSVAKSGRFHAYHQPVDLHPSIYIGDIQTSDDSQQPSPDLEIITSQSENKQNNSRVDSARDVKNAAPISTSAISQGKTEQERIGLEISNPCSITAALVAQPKKVVLESTKAKSTNGRRKKRKETLPKGSGHKYYDLDSAHSSLNENVESFVTSEDVQCSLATDLKLNFTCEAAKDNSTGGNDCQNRSDLFSWENTTENSADKLKLFGGTHSKSGAEVNKDKSEFDHKRYSRDFLLTFAQSCIELPAGFMIGFDISEAVMSVHVGAPFIDNTQLNSNHARIKDRGSRGSRHMTGKFDDDKWRKQFFSTVSGRNLLSDNFYQPAFSNRDAVQHVGNGSVRSLSQSQPLSQYSGEVLSGAMKVVSRRSMSRGSVDERWQHRTNVQGISSPSQVSMPIMHKAEKKYEIGKGIDEEGSKQRQLKAILNKLTPQNFEKLFAQFKELNIDNVVTLTGVISQIFDKALMEPTFCEMYASFCFRLAGDLPNFVKDDEKITFKRLLLNKCQEEFERGEREQAEANKAEEEGGAKQSEGEREEKRIRARRRMLGNIRLIGELYKKKMLTERIMHECINKLLGEYQNPDEEDLEALCKLMSTIGEMIDHPRTKVHMDFYFGLIHKLSENVKLSSRIRFMLEDVIDLRKNKWRQRRKVEGPKKIEEVRRDAVKHKFGQSTRFGSSPNYNSSVTCISSGLRPGPPDARYQSSNRVLHVPLHQRRAHKSIRLGPQGDLGRGISICGKQHVSNDILPEVTLNSHHGQTSENSRDSSFTGVTSNPTGFKAGNTSWGMVDLSSPVPSTIGQTHTSSTVRKEMCAEAHTFPEEVLQEKSILTIKEFYSAKDEKEVALCMKELNAPGFYPSLVSLWITDSFERKDLERELLAKLLVYLCTAQEHLLSQRQLLQGFQHVLSTLEDAVTDAPKATKFLGQIFARVVLEDGISLTEVGGLLQEWDGREEPAGQHALEDSLASEVLGSMLESIRVERGDNAVDEIRAKSNLQRRGVLIMFPSFSRRASCKKQEDPDSFEWAKKFLLSGALSAFVEPNMETVPIKIPSKCMLPPSQELHEEPQSPLPAEAVNRKKQSILIDTEVRSARLKEKARGFKTCSGIRKNCSCCARTSPPSISHKIIKKLGAEFCKVNPSKLCPNALNNSRSFSSAIQRPRASSSSRAELRATSEDQRDESEDEDDAGSRPSAGM

SEQ ID NO: 226889 - protein, 1820 aa, Zea Mays
MYRNQFRSDRLNDHATTARRPGRGSGSSSHWVVSGGRGSTAPATRLRSPPYRSGRPGSVQQQYRPRSPASVPIQGNAIGCAPPCGSGASAEHTGPVNQETFGSLDNVKPSNFPAQSDGLSCVSAEETWPADSPTPTLQTKGYSSPSFTLQFGTFNSGVINKQETTSCTSSAPPDLNGSKHEKACHGLHYCKPNTASSPPIQELQKQEARDDLVIGGEADLIGKYEVHVPELHETHTMLNSVSPSSKVCTDSRKVLLRTMSSPTQQKCENQEETKNTISVNQTDTAYKYPTTKPKISVQIPASYTPNMAPPQFMLPVPGRSMPVAFQQKQPQVPIEFRGPGFQMHSIGSVSSSLPVKMAVPLGNAPHIQPMFVHGAQPHAFHQQSFIHHGQGFGCAPPSNCYLPQFGNMRNVQELSQQYPRSGDEHKRTIKITHPETHEELMLDRHGHSFINVPASGQMPLNNINQLPHSVQTFSPLQKVYYPRPGTYNSAHVYLPNSTDVPLASRQFSSKIQPSMHGFDSTNSNQPFTSIRPPMPISRLDATSGPLTNLHTASEISNFKGMFPSSLPAPVHVELKPPITLPAEMNSESTISNQQNYCKIGLEMSLEPVNLVYEGNNKDSVATCDISCNLIPQPVSTPQTQTRPTSVDHATPVVDPQTILTSSLPLESTTCCKSSVKAKPIEVEQSLVVPTTLSSHTKLESSHATTSVILTATSLVSKIDGTPPTNRNYRYYGNSILGKPPLIYAQEILPSKFVGSNTSPEGLGKAKVNPVLFQEKFPSELNGSVPLRKHDFMIEEHVPNEKGMCSESKTEQVDVTMPSTAFGLEDDTSVAKSGRFHAYHQPVDLHPSIYIGDIQTSDDSQQPSPDLEIITSQSENKQNNSRVDSARDVKNAAPISTSAISQGKTEQERIGLEISNPCSITAALVAQPKKVVLESTKAKSTNGRRKKRKETLPKGSGHKYYDLDSAHSSLNENVESFVTSEDVQCSLATDLKLNFTCEAAKDNSTGGNDCQNRSDLFSWENTTENSADKLKLFGGTHSKSGAEVNKDKSEFDHKRYSRDFLLTFAQSCIELPAGFMIGFDISEAVMSVHVGAPFIDNTQLNSNHARIKDRGSRGSRHMTGKFDDDKWRKQFFSTVSGRNLLSDNFYQPAFSNRDAVQHVGNGSVRSLSQSQPLSQYSGEVLSGAMKVVSRRSMSRGSVDERWQHRTNVQGISSPSQVSMPIMHKAEKKYEIGKGIDEEGSKQRQLKAILNKLTPQNFEKLFAQFKELNIDNVVTLTGVISQIFDKALMEPTFCEMYASFCFRLAGDLPNFVKDDEKITFKRLLLNKCQEEFERGEREQAEANKAEEEGGAKQSEGEREEKRIRARRRMLGNIRLIGELYKKKMLTERIMHECINKLLGEYQNPDEEDLEALCKLMSTIGEMIDHPRTKVHMDFYFGLIHKLSENVKLSSRIRFMLEDVIDLRKNKWRQRRKVEGPKKIEEVRRDAVKHKFGQSTRFGSSPNYNSSVTCISSGLRPGPPDARYQSSNRVLHVPLHQRRAHKSIRLGPQGDLGRGISICGKQHVSNDILPEVTLNSHHGQTSENSRDSSFTGVTSNPTGFKAGNTSWGMVDLSSPVPSTIGQTHTSSTVRKEMCAEAHTFPEEVLQEKSILTIKEFYSAKDEKEVALCMKELNAPGFYPSLVSLWITDSFERKDLERELLAKLLVYLCTAQEHLLSQRQLLQGFQHVLSTLEDAVTDAPKATKFLGQIFARVVLEDGISLTEVGGLLQEWDGREEPAGQHALEDSLASEVLGSMLESIRVERGDNAVDEIRAKSNLQRRGVCA

SEQ ID NO: 226890 - protein, 1975 aa, Zea Mays
MYRNQFRSDRLNDHATTARRPGRGSGSSSHWVVSGGRGSTAPATRLRSPPYRSGRPGSVQQQYRPRSPASVPIQGNAIGCAPPCGSGASAEHTGPVNQETFGSLDNVKPSNFPAQSDGLSCVSAEETWPADSPTPTLQTKGYSSPSFTLQFGTFNSGVINKQETTSCTSSAPPDLNGSKHEKACHGLHYCKPNTASSPPIQELQKQEARDDLVIGGEADLIGKYEVHVPELHETHTMLNSVSPSSKVCTDSRKVLLRTMSSPTQQKCENQEETKNTISVNQTDTAYKYPTTKPKISVQIPASYTPNMAPPQFMLPVPGRSMPVAFQQKQPQVPIEFRGPGFQMHSIGSVSSSLPVKMAVPLGNAPHIQPMFVHGAQPHAFHQQSFIHHGQGFGCAPPSNCYLPQFGNMRNVQELSQQYPRSGDEHKRTIKITHPETHEELMLDRHGHSFINVPASGQMPLNNINQLPHSVQTFSPLQKVYYPRPGTYNSAHVYLPNSTDVPLASRQFSSKIQPSMHGFDSTNSNQPFTSIRPPMPISRLDATSGPLTNLHTASEISNFKGMFPSSLPAPVHVELKPPITLPAEMNSESTISNQQNYCKIGLEMSLEPVNLVYEGNNKDSVATCDISCNLIPQPVSTPQTQTRPTSVDHATPVVDPQTILTSSLPLESTTCCKSSVKAKPIEVEQSLVVPTTLSSHTKLESSHATTSVILTATSLVSKIDGTPPTNRNYRYYGNSILGKPPLIYAQEILPSKFVGSNTSPEGLGKAKVNPVLFQEKFPSELNGSVPLRKHDFMIEEHVPNEKGMCSESKTEQVDVTMPSTAFGLEDDTSVAKSGRFHAYHQPVDLHPSIYIGDIQTSDDSQQPSPDLEIITSQSENKQNNSRVDSARDVKNAAPISTSAISQGKTEQERIGLEISNPCSITAALVAQPKKVVLESTKAKSTNGRRKKRKETLPKGSGHKYYDLDSAHSSLNENVESFVTSEDVQCSLATDLKLNFTCEAAKDNSTGGNDCQNRSDLFSWENTTENSADKLKLFGGTHSKSGAEVNKDKSEFDHKRYSRDFLLTFAQSCIELPAGFMIGFDISEAVMSVHVGAPFIDNTQLNSNHARIKDRGSRGSRHMTVQHVGNGSVRSLSQSQPLSQYSGEVLSGAMKVVSRRSMSRGSVDERWQHRTNVQGISSPSQVSMPIMHKAEKKYEIGKGIDEEGSKQRQLKAILNKLTPQNFEKLFAQFKELNIDNVVTLTGVISQIFDKALMEPTFCEMYASFCFRLAGDLPNFVKDDEKITFKRLLLNKCQEEFERGEREQAEANKAEEEGGAKQSEGEREEKRIRARRRMLGNIRLIGELYKKKMLTERIMHECINKLLGEYQNPDEEDLEALCKLMSTIGEMIDHPRTKVHMDFYFGLIHKLSENVKLSSRIRFMLEDVIDLRKNKWRQRRKVEGPKKIEEVRRDAVKHKFGQSTRFGSSPNYNSSVTCISSGLRPGPPDARYQSSNRVLHVPLHQRRAHKSIRLGPQGDLGRGISICGKQHVSNDILPEVTLNSHHGQTSENSRDSSFTGVTSNPTGFKAGNTSWGMVDLSSPVPSTIGQTHTSSTVRKEMCAEAHTFPEEVLQEKSILTIKEFYSAKDEKEVALCMKELNAPGFYPSLVSLWITDSFERKDLERELLAKLLVYLCTAQEHLLSQRQLLQGFQHVLSTLEDAVTDAPKATKFLGQIFARVVLEDGISLTEVGGLLQEWDGREEPAGQHALEDSLASEVLGSMLESIRVERGDNAVDEIRAKSNLQRRGVLIMFPSFSRRASCKKQEDPDSFEWAKKFLLSGALSAFVEPNMETVPIKIPSKCMLPPSQELHEEPQSPLPAEAVNRKKQSILIDTEVRSARLKEKARGFKTCSGIRKNCSCCARTSPPSISHKIIKKLGAEFCKVNPSKLCPNALNNSRSFSSAIQRPRASSSSRAELRATSEDQRDESEDEDDAGSRPSAGM

SEQ ID NO: 226891 - protein, 1855 aa, Zea Mays
MLIFLQETTSCTSSAPPDLNGSKHEKACHGLHYCKPNTASSPPIQELQKQEARDDLVIGGEADLIGKYEVHVPELHETHTMLNSVSPSSKVCTDSRKVLLRTMSSPTQQKCENQEETKNTISVNQTDTAYKYPTTKPKISVQIPASYTPNMAPPQFMLPVPGRSMPVAFQQKQPQVPIEFRGPGFQMHSIGSVSSSLPVKMAVPLGNAPHIQPMFVHGAQPHAFHQQSFIHHGQGFGCAPPSNCYLPQFGNMRNVQELSQQYPRSGDEHKRTIKITHPETHEELMLDRHGHSFINVPASGQMPLNNINQLPHSVQTFSPLQKVYYPRPGTYNSAHVYLPNSTDVPLASRQFSSKIQPSMHGFDSTNSNQPFTSIRPPMPISRLDATSGPLTNLHTASEISNFKGMFPSSLPAPVHVELKPPITLPAEMNSESTISNQQNYCKIGLEMSLEPVNLVYEGNNKDSVATCDISCNLIPQPVSTPQTQTRPTSVDHATPVVDPQTILTSSLPLESTTCCKSSVKAKPIEVEQSLVVPTTLSSHTKLESSHATTSVILTATSLVSKIDGTPPTNRNYRYYGNSILGKPPLIYAQEILPSKFVGSNTSPEGLGKAKVNPVLFQEKFPSELNGSVPLRKHDFMIEEHVPNEKGMCSESKTEQVDVTMPSTAFGLEDDTSVAKSGRFHAYHQPVDLHPSIYIGDIQTSDDSQQPSPDLEIITSQSENKQNNSRVDSARDVKNAAPISTSAISQGKTEQERIGLEISNPCSITAALVAQPKKVVLESTKAKSTNGRRKKRKETLPKGSGHKYYDLDSAHSSLNENVESFVTSEDVQCSLATDLKLNFTCEAAKDNSTGGNDCQNRSDLFSWENTTENSADKLKLFGGTHSKSGAEVNKDKSEFDHKRYSRDFLLTFAQSCIELPAGFMIGFDISEAVMSVHVGAPFIDNTQLNSNHARIKDRGSRGSRHMTGKFDDDKWRKQFFSTVSGRNLLSDNFYQPAFSNRDAVQHVGNGSVRSLSQSQPLSQYSGEVLSGAMKVVSRRSMSRGSVDERWQHRTNVQGISSPSQVSMPIMHKAEKKYEIGKGIDEEGSKQRQLKAILNKLTPQNFEKLFAQFKELNIDNVVTLTGVISQIFDKALMEPTFCEMYASFCFRLAGDLPNFVKDDEKITFKRLLLNKCQEEFERGEREQAEANKAEEEGGAKQSEGEREEKRIRARRRMLGNIRLIGELYKKKMLTERIMHECINKLLGEYQNPDEEDLEALCKLMSTIGEMIDHPRTKVHMDFYFGLIHKLSENVKLSSRIRFMLEDVIDLRKNKWRQRRKVEGPKKIEEVRRDAVKHKFGQSTRFGSSPNYNSSVTCISSGLRPGPPDARYQSSNRVLHVPLHQRRAHKSIRLGPQGDLGRGISICGKQHVSNDILPEVTLNSHHGQTSENSRDSSFTGVTSNPTGFKAGNTSWGMVDLSSPVPSTIGQTHTSSTVRKEMCAEAHTFPEEVLQEKSILTIKEFYSAKDEKEVALCMKELNAPGFYPSLVSLWITDSFERKDLERELLAKLLVYLCTAQEHLLSQRQLLQGFQHVLSTLEDAVTDAPKATKFLGQIFARVVLEDGISLTEVGGLLQEWDGREEPAGQHALEDSLASEVLGSMLESIRVERGDNAVDEIRAKSNLQRRGVLIMFPSFSRRASCKKQEDPDSFEWAKKFLLSGALSAFVEPNMETVPIKIPSKCMLPPSQELHEEPQSPLPAEAVNRKKQSILIDTEVRSARLKEKARGFKTCSGIRKNCSCCARTSPPSISHKIIKKLGAEFCKVNPSKLCPNALNNSRSFSSAIQRPRASSSSRAELRATSEDQRDESEDEDDAGSRPSAGM

SEQ ID NO: 226892 - protein, 526 aa, Zea Mays
MDPTQYYENRLKTLDSLKAAGVNPYPHKFPVGISVVEYIEKYKTLNNGEKLTDATECLAGRIMNKRTSSSKLFFYDLYGGGMKVQVMADARTSELDEAEFSKYHSSVKRGDIVGICGYPGKSNRGELSLFPKKFVVLSPCLHMMPRQKGEGSSVPVSWTPGMGRNIENYVLRDQETRYRQRYLDIMVNHEVRHIFKTRSKVVSFIRKFLDDREFLEVETPMMNMIAGGAAARPFITHHNELNMRLFMRIAPELYLKELVVGGLDRVYEIGKQFRNEGIDLTHNPEFTTCEFYMAYADYNDLMELTETMLSGMVKELTGGYKIKYHANGVTNSPIEIDFTPPFRRIDMIKDLEAMANLNIPKDLASDEANRYLIEACAKYDVKCPPPQTTSRLLDKLVGHFLEETCVNPTFIINHPEIMSPLAKWHRSRPGLTERFELFVNKHEVCNAYTELNDPVVQRQRFEEQLKDRQSGDDEAMALDETFCAALEYGLPPTGGWGLGIDRLTMLLTDSQNIKEVLLFPAMKPQE

SEQ ID NO: 226893 - protein, 1841 aa, Zea Mays
MASDDGDKDILLLVHQVPLDMEDVPAPRLAHLLAPLHRAPPPPPPPPFRSPPPPQAAASAEHRLSFRGWLGIPRHWDDWVAKLRPLHARLWRRLGIHDAVLASTLRFKRDASAILHLASFWSPATATFAFPWGEATVTLQDVALLAGFPALGAPATAPLPPQWRPDEAALNGVRLGFNRSACKKAHHSAWVKHFLTDDNADTVFEHAAFLALWLTRFVLPGHPESTMRQAVFPIAVRLARGDRVALAPAVLASIYRDLREIKAFLIATGAAATTGNADMISSLSVYSPLYILQLWMWERFPALRPAKVNPLVDGDPLAARWHDLSRKLNPAQIREALSTGCNFVWQPYVSSMEHTGWVHSSDLAEDDELASLAQFLHPCELVGMDCIEQYLPHRVARQFGLDQDVPADVHRANQDWAIAWQTYQLEGKNVAFFIPHSEPGITTRYAQWWRQQLLPSGIDAATASAPVEWKTSKRKVKKTPAAMEAEAEKERKMKKARVSPTYTDKKRKLEELYDAKLSDWLPTARNEISDTTSDMESEEALLPNVGTTNDDIVLLMPRKQTTTAPVRALMDNDMILALGERGNFMVDEPPDIQSEPEAVVPATLDEEIVKIPEVISLDIPDKPEEGATAVMEEQKEATSVSDRSEEASALVIGEVEEKVAIEGAICVTGMNPSGNNSATVMEADERNAVPKEFGRAAKEVIEAVPQSQHEVNAGVINNSHDVVALPEEAHPVQPTNNSGGCPVVSCIMEDSKVAGDSGKIDYEYFCDFVEEQREIPCVQEISGENSRMGEKEREETSHESPQLEIVECVQDIVLRETDYDVNQKIVYPAVEDVATSDSMSTSLLGVPEPENAELNKHPYLAIKDEEDIPMEAARGEVAEMEQISTSAKGGAEEHGDFSELDHMGRADAKLHLHLNSEVPEKIDEIECKEVAGTMRLTGRYSDQKLGDVPEVGYTEDENIRGLVVNTSDRKPSEVSQVEPAKLEHSKDLVKEETDKSENIPGLECIGLEETRGDLMEECANTKSDNVPELENTGLGGTHGPIEDTDGRLKEIHDVNAELDKHNVHESDIDRSEDIMQIDPLTQDKATWLAKEETEDKTTKVQEVKYEQLRNEPPIQEDSKEKPCADSKDLSENVVVQSKEVDKLKQAGEGCQALMEKDMENASGAFVLEQTEDGHRKSLIETSINNDSEITLVEQLDGQSESLTRTGTVEIHGETIKAQDNEFYKDVVEDSNDSTNEKDVVEDSNESINAKMPCSSATVQLKEDKMEVFHEGKMEEPCAQDAELSNQREPSSDATAMEIEAVALEQDSRIICKNMEATTVEGSHTLDSGLSSDLAKVNETHAAREIKNQEVLDVDMKVAMSVCGEYQINSIGMEDVKSTKGSQNQECLDQKEDHIMEERVECEVREGSGVSYEEACELGGGRVKASGVAVDVSGPVLNKEACNTEELQAREDKKRHGVGHVNEKRVLEETSMIDTGELKSDSTVMEISMAGLRQGTLNQCASSSEKEEAVQEKHDQGLVDENTNRGSADNDALECGGVNPDVAITMFHETILTTEAVNIAGSKISSENQQKEAPFEVHSITEVEGSESNESSRKEPEGALALPQEPGNLVKVKQESLENETEMSIFRENDKVSGKDQASAEFIIDPSNTDERRENDIGRPDESAKGCERLTSDSINTVHSKFGKSSNEEDKRTQNTRSTDPKDIKESLGRIRAEPSNRVHTTSVGYYSQHAAHDPISSCKEIKVPLRDGARDSGRDRALELVVTSPREETPRWRQEQYALQILEDVQNSRIAERSRMEMEIRVLKAQVSSMERQVMNLDHFSEVKSRSSLNQQMVHLHKPYF

SEQ ID NO: 226894 - protein, 1840 aa, Zea Mays
MASDDGDKDILLLVHQVPLDMEDVPAPRLAHLLAPLHRAPPPPPPPPFRSPPPPQAAASAEHRLSFRGWLGIPRHWDDWVAKLRPLHARLWRRLGIHDAVLASTLRFKRDASAILHLASFWSPATATFAFPWGEATVTLQDVALLAGFPALGAPATAPLPPQWRPDEAALNGVRLGFNRSACKKAHHSAWVKHFLTDDNADTVFEHAAFLALWLTRFVLPGHPESTMRQAVFPIAVRLARGDRVALAPAVLASIYRDLREIKAFLIATGAAATTGNADMISSLSVYSPLYILQLWMWERFPALRPAKVNPLVDGDPLAARWHDLSRKLNPAQIREALSTGCNFVWQPYVSSMEHTGWVHSSDLAEDDELASLAQFLHPCELVGMDCIEQYLPHRVARQFGLDQDVPADVHRANQDWAIAWQTYQLEGKNVAFFIPHSEPGITTRYAQWWRQQLLPSGIDAATASAPVEWKTSKRKVKKTPAAMEAEAEKERKMKKARVSPTYTDKKRKLEELYDAKLSDWLPTARNEISDTTSDMESEEALLPNVGTTNDDIVLLMPRKQTTTAPVRALMDNDMILALGERGNFMVDEPPDIQSEPEAVVPATLDEEIVKIPEVISLDIPDKPEEGATAVMEEQKEATSVSDRSEEASALVIGEVEEKVAIEGAICVTGMNPSGNNSATVMEADERNAVPKEFGRAAKEVIEAVPQSQHEVNAGVINNSHDVVALPEEAHPVQPTNNSGGCPVVSCIMEDSKVAGDSGKIDYEYFCDFVEEQREIPCVQEISGENSRMGEKEREETSHESPQLEIVECVQDIVLRETDYDVNQKIVYPAVEDVATSDSMSTSLLGVPEPENAELNKHPYLAIKDEEDIPMEAARGEVAEMEQISTSAKGGAEEHGDFSELDHMGRADAKLHLHLNSEVPEKIDEIECKEVAGTMRLTGRYSDQKLGDVPEVGYTEDENIRGLVVNTSDRKPSEVSQVEPAKLEHSKDLVKEETDKSENIPGLECIGLEETRGDLMEECANTKSDNVPELENTGLGGTHGPIEDTDGRLKEIHDVNAELDKHNVHESDIDRSEDIMQIDPLTQDKATWLAKEETEDKTTKVQEVKYEQLRNEPPIQEDSKEKPCADSKDLSENVVVQSKEVDKLKQAGEGCQALMEKDMENASGAFVLEQTEDGHRKSLIETSINNDSEITLVEQLDGQSESLTRTGTVEIHGETIKAQDNEFYKDVVEDSNDSTNEKDVVEDSNESINAKMPCSSATVQLKEDKMEVFHEGKMEEPCAQDAELSNQREPSSDATAMEIEAVALEQDSRIICKNMEATTVEGSHTLDSGLSSDLAKVNETHAAREIKNQEVLDVDMKVAMSVCGEYQINSIGMEDVKSTKGSQNQECLDQKEDHIMEERVECEVREGSGVSYEEACELGGGRVKASGVAVDVSGPVLNKEACNTEEAREDKKRHGVGHVNEKRVLEETSMIDTGELKSDSTVMEISMAGLRQGTLNQCASSSEKEEAVQEKHDQGLVDENTNRGSADNDALECGGVNPDVAITMFHETILTTEAVNIAGSKISSENQQKEAPFEVHSITEVEGSESNESSRKEPEGALALPQEPGNLVKVKQESLENETEMSIFRENDKVSGKDQASAEFIIDPSNTDERRENDIGRPDESAKGCERLTSDSINTVHSKFGKSSNEEDKRTQNTRSTDPKDIKESLGRIRAEPSNRVHTTSVGYYSQHAAHDPISSCKEIKVPLRDGARDSGRDRALELVVTSPREETPRWRQEQYALQILEDVQNSRIAERSRMEMEIRVLKAQVSSMERQVMNLDHFSEVKSRSSLNQQMVIPNLLPLY

SEQ ID NO: 226895 - protein, 223 aa, Zea Mays
MPLKNGKTASGPLIKPIHFKNSAAEKVMSNGKVNLTSKNNPEVNGTAKSSESNRCKTGQFVGPSKNNADNTISCGERGQQSERIHDANGNGQSIHHSQYFGEISNGNAMPTSAQQETSHGNATPARQETNNSNGTPAQQETSNGKASHAEHYSERSSHQEEHANFSGNKRRLEEDKFQEMLAELANSELRMSVWTDDVYSFMRSQKRRRIQSSDISQDFDAMS

SEQ ID NO: 226896 - protein, 150 aa, Zea Mays
MWTCCTSSCFLTQVFHSVHNSTAQCIDLEIKIQQRHKPNIIDTTARSRRQGGAGAVVDAAGQNVAVVAGDGEVVVHAAIPALLVLQQQPRVVERRQLHEPKVAVPHVAPSRPRGRVVGEAGAAAAHHDVRRRREGAGVEVGPLGHARVLR

SEQ ID NO: 226897 - protein, 150 aa, Zea Mays; identical to SEQ ID NO: 226896

SEQ ID NO: 226898 - protein, 507 aa, Zea Mays
MDLVHKDDEARIKLENAAIERSKAVDSAVLGKYSIWRKENENENSDSTVRLMRDQIIMARVYSTLAKSKNKNDLYQKLQTRIRESQRAVGEANADADLHHSAPEKIRAMGQVLSKAREELYDCTAITQRIRAMLQSADEQVRSLKKQSTFLSQLAAKTIPNSIHCLSMRLTIDYYILPLEERKFPRSENLENPNLYHYALFSDNVLAASVVVNSTIMNAKEPEKHVFHLVTDKLNFGAMNMWFLLNPPGKATIHVENVDEFKWLNSSYCPVLRQLESAAMKEYYFKADRPTTLSAGSSNLKYRNPKYLSMLNHLRFYLPEVYPKLDKILFLDDDIVVQKDLTGLWDVDLNGKVNGAVETCGESFHRFDKYLNFSNPHIARNFDPNACGWAYGMNIFDLREWKKKDITGIYHKWQNMNEDRVLWKLGTLPPGLLTFYKLTHPLDKSWHVLGLGYNPSIDRSEIDNAAVVHYNGNMKPWLELAMTKYRPYWTKYIKYDHPYIRGCNLSE

SEQ ID NO: 226899 - protein, 5038 aa, Zea Mays
MGSPFVLTATLRKSYEVALMAVGQKWPVLLYGPVGAGKSALINKLAHIVGNRVLFIHMDEQMDGRTLLGSYVCTEKPGEFKWAPGSLTQAIVKGFWIVFEDIDKAPSDVRSILVPLLEGSNTFSVGHAEAVEVAESFRFFATVTTSKNDVSHDLPGRLTFSALWRKVMVGEPNQSDMVNIIKGCYPSLEPISSKLIDTFEKVNSLGSYQFGSLNLAGGLSDGVLHRFSLRDLLKWCKRILGTDLNFEDLRFASSGCKLIYHETLIQKGPFADIRRALEILERVACSIKFNEPILLVGETGTGKTTTVQNLAAWLKQPLTVVNLSQQSDISDLLGGFKPTDARSICFPLYMEFKDLFSRSFSAKDNEAMIRYCDEFVMNKNWKKLLTTLERYVAKAQKLIEGSKSSSGSKRKRPLPAHVVSDWDTFSSRLNMACSQIGSATGMSFQFVEGAFISALRKGHWILLDEVNLAPPETLQRIGAVLDGERGTLCLAERGDVDYVERHPCFRIFACMNPATDAGKRELPYTFRNRFTEYFVDDLMDDDDLRLFVRKYLDGLNAANGVIDSIVRFYKVAKKECEERLQDGANQKPQFSLRSLSRALGYIKNAEKKFGFRKAIYDGFCMFFLTLLDPPSGKIMKNLIVSLLLDGRVPPNISFVDYFTDKPLQLGGCESDDFLQSYVLTQSVTEHIINLARAVYIRRYPVLLQGPTSSGKTSLVRYLAAKTGHEFVRINNHEHTDLQEYLGTYVTDSQGKLQFQEGALVKAVREGHWIVLDELNLAPSDVLEALNRLLDDNRELFIPELQETIPAHPNFMLFATQNPPMLYGGRKMLSRAFRNRFVEVHVDEIPEDELATILEQRCRIAPSYAKRMVEVMKELQTHRQNSRVFAGKHGFITPRDLFRWANRYRTFEGKSYEDLAKDGYLLLAERLRDVNEKVVVKEALERHLRVKLNIADLYNSEVTREDNLFIDVIKLRVQDCVGNITWTKSMWRLYFLIERCYRSREPVLLVGETGGGKTTVCQILSAVLGLKLHILNCHQYTETSDFIGGFCPIRDRSRIAIEFKDLVAKIKQMKMFFYVAGNVPLETDVSGADSVISHLDEILDRYRKKKYLFPEVSAQDLGAMEQIKLDLMHLHKRWQAIFLWQDGPLVQAMKNGDLFLIDEISLADDSVLERLNSVLEPERKLSLAEKGGSVLEKIVAHPNFFILATMNPGGDYGKKELSPALRNRFTEIWVPAVIDVDELRSITFGRFTKTDFSCLGDCIVNFWKWFNQLHIGRTLTIRDLLSWISFINVTEQNLGPEQALIHGLFLILLDGLSLGLNVSKTEATEMRNTCLSFLLEELQKVGGTAVDSYLNDLNNYGWGDNMKKKDIDHGCLEDHFGIAPFYIPKGHFPCKQQDFEIMAPTTSKNVLRVLRGMQLPKPLLLEGSPGVGKTSLIVALAGFSGHDVVRINLSEQTDMMDLLGSDLPAQGGNGMEFSWSDGILLQALKNGSWVLLDELNLAPQSVLEGLNAILDHRAEVFIPELGQTYKCSSSFRVFACQNPSSQGGGRKGLPKSFLNRFTKVYVDELSEEDYLFICKSRYGSLISESFIRNLIHFNSRLYMDTMVYRKYGQQGSPWEFNLRDIIRSCEMIAGSPNPMMDDSFLNTVYLQRMRTLVDRHEVVKLYEDVFKKKISIHQPKMLHVNPHCLVVGSASIRRNNIQSYKVQNNQLNIFPGVLNSLEAAMHCIQQGWLCILIGQNSAGKTSLIRLLAQLSGNTLNELNLSSATDVSELLGCFEQYNFFRHYKTVLSEVEHYVDVYFSLSIDTNQKNFVAERRGLFTKWFEFVAAKGHSSIKTSKLMSGNASLPSLSLLAEIVEQMKCDLEMFDFSIPLTKDDLSETLKSINNLQQNGAAHQPVRFKWVAGDLIRAIERGEWIVLDNANFCNPTVLDRINSLVEQERSIMVNECGLVDGNPVVIKAHPKFRMFLTVNSNYGEVSRAMRNRGVEIFLMDQSWNLKGFSNVPGDSERKDVIRFLISCGIPRMELVSSMCEAHMYAKGEGSRVGVNITLLEITRWVQLFQQLIVKGNQFLWSLHLSWEHTYLPCLGEINGSGIVEEGKNKFLTNFDRSEILARNFSFLTVFDGCSTSLHSGLSLSLPGGWPIEQKLRDLIWYSKETCVMRNCMFLQSLGAQYAAYQISSLNDNSLLLGQISLIHPSILPAASLRELQFPTVNGQPVKICVTGAFNSYLADQMLFFAANWVMEQCTKNDLELYGKWFNWYNSLVQPYCNFFESYWYILEQESEHPIWHNILEYYREIVAYHNIDIVTQHIPLLSKKLLDMAGCDSLKACQNRLHRSFKALGLLRLTLQQWQIETKCPDLSVLECTLLPALKSLRCLEGEVLKTIAKSWKRLKIYSLLLDYHRSIWKMMIASQLEGLPIVWNLLRKEILKLQQKFPVEVDVFLMECVNLNNINDTNFQYGKPTLWDYGGHPHLPSSSEIFDKMQELLSFTTDVWPRKNLLNIELDDRKQLTDAMLSANKDLRHLAMEGVSMACIATMKTEEDVLAVVPQLDEVHKRLVGKVNSVRDNLGLLSKTSVPEFKFCCSVSSEILCNIYGFNGWLASLPLLNLKSLNLDTLLLQQLCKCTQKDSSETHEILVNSEYLLKYAMDYSLGSSSRSPLDYIQHQIIWWICHDWAKVDNAHLKVASCILEMWYNYHSSLWTYCSGSPKCLFSVTHDDSCDLAHLTKMDAINTIIQQDLHVVDYLKSGVMLKVASRNLWEGVSCLGNFVSSLHSAADSLFKQIIFVHKKHFEEENYNQLESLLFQQSRRLIEKEDLDTVCALLSSSSCRVLASLSESDKLVESLLMDLYSSYSRDSLLHTGAAWVRIGELRFRLLLSSYSPDPTFKSRYKHSHILEKITLVKLEEKVRHDCEELAGSNSPEDSHDNELLQLLEIKEKDTRAKVVFRPRQSKHKSLIAACLEFEDRLSECKDLLASLTCEGLGQLEVDRVCNWQIISMNFIKRLTEDYREYVDLIQPIQVAVYEMKLGLAIALSGSLQREYLKKIKEDDINRVLGAIYAFMQFPSGSFTERVVTDVTDDLTNYTITGQLGTLNSCSGDVDMLKKLAAMSSQLNVCKVAGKVKSLSEMLASVHHIFLVRTADCVSCSLVMDKSSYASLKDTFDHFTSMWINMKYRLKAKESDDSQYFKFKSRMISIDDIFKDVPLLSDMESEDSILDNEEKLEHEFFKITESIDDDNGVVEDNWDLIPESALKCIVTIHDQLFGSPDLFEKRRKCQVSDAQKVQSFIESYELGTRILKDLPELTCSMFDEKLMPEHLFRVCLEYQRSCAKTHQDCSGYNAYKDPNPPVLFKMVESLTTLQERVNSYLDEWPDHPGLLKILDLIASLLAMPLSTPISKVLLGLQLLAGKAQTLQENDSKFFVKDHLASIFLLVYSWQRLELDCWPILLEEVQTKYELNAAKLWFPLRALLTQTSGIPVDDDLSIIRSVEEFVQTSSLGEYKRRLHILFAFHGEISAGASLGSYSSNAVKKIQNILYSVFGYYMQFLSLVHGKIEEGKKNIEKELKDHVKLYSWEQAPYSSASIENFKRTRQKIFKLLQRFNDILKSPVIFLLNEEATSRKIPCWLDPQRPESHLPVDSEKFNKRFLWYHKWASETSLSLQTLQQSNGSTVGVPTAKDMVYDVKHWQNEIELNDRLQFFWISLERICGAANFGSTVKHGKKNQKKTALSNLFKTLEECGLSKHRPMSHEWGDELAAPSPLFLEQSYDSAHLLQQINSQKMLEDVSINHSTLLNTDNWKHANQQYFKCLAMMQQLRQVSLKFNKDLGLEEVNKAMSFMSHLLTVLSEQRHLAYNLFDQRNQFKHAIFLLGSGGKSKSLSSSQNVLLSSMWQQKKLFDAVITLITDSNLLLRSFKDCHYNSCNNFIEVEGISSLLGKFILNFSESKELLDECLLGSTNIFAGAYKSMPHSATEMEQLFTDNCQHIDSLLDGYLPGSNNIFPDAYKSIPLATTEMEQLFADNCQLIDSLREDMKVLCHRDLSVGSVKKVLISRLEELLEKGKMAMENRRHVEENHKLCLKLEASYIEILKETFMLVVGAVRKLTDHEVCSNGTEKSPVGNVASWKDTLQTCIMNLKLDDICVAGEKIRILVRLLVDYKPDIRTSIELHLMHLHAWLSVILSSAEGILSELLEAHITTSEMTLALGDLFIHLFTDGFGSTEDTAEDADELQQDAVGSGTGMGEGDGQKSVSSDIDDESQLGDSKDLTCKADPAPKNDDKAVEMQDGFNAQLSDVSEDLEGKDSGGEDEDTLDNQMGDTGDASEVVGKKSWDKDEDDDPKTSIEKYESGSSAKGTQQDDREMRAKDDGSIEEEDPMEMDSEEGKNNNLEHDPSTHDETELNTDEVMDKADAYDDRTGPELPEPENDSIDVDMVEQEQTDEINADNEDIGTEEAEQADQRLDASDDMEEGDMAQHSDGVVDNEGEHVEDANTDAGEMDSHQLDKADSLMPLSQGLQPDNMQINSNGESEANLANSSDMHGAVAPSVNFSGNEVPNMEISMPNTGNDSILSSNSKPDMQNDAQQHIKQTNPFRSIGDALEDWKERARVSADTQDHQPETGKDSSENTTEFRYVPEGEESTSQALGAATADQINYDNQINQSFLEDESCIRNLEHSDERTPDNPEVPYLQTSQALPNKSENANELDGREIQTDASVQNLVERTDHTFQDLVSFKQPPADDKIALIDLTTDRELPSQMDLDITDAETKRSNAVWKNLELATMKLSQELAEQLRLVMEPTLASKLQGDYRTGKRINMKKVIPYIASHFRRDKIWLRRTKPNKRNYQVVIAVDDSRSMSEGKCGKFAIEALVTVCRAMSQLEVGQFAVASFGKKGNVSVLHDFDQIFNSEAGVNVISSLSFEQDNKIEDEPVSDLLTHLNVMLDTAVARARTPSGQNPLQQLILIISDGKFHEKENLRRHVRDVLNRKRMVAYVLLDSPEDSIINLKEACFRVGEKVELKKYMDSFPFPYYVMLQNIEALPRTLADLLRQWFELMQSANE

SEQ ID NO: 226900 - protein, 117 aa, Zea Mays
MVNKGKVISLPCHAIIHVVHPQRPLLRSRHTDKDQPPATTTYSGTTSVYPEWPSFQAMHPFGHYPMPTNGHVETHGAAPSAPEMNGKSEPGRTSAPSANGITSHKFLFLGVQVTDFL

SEQ ID NO: 226901 - protein, 639 aa, Zea Mays
MLRAAAAAAAIFPARVAAAPAAAAAEELRYPLLRVIGTLRGSRGSVLLGRRVRFCSNSSASDSEVAAADAEANAEDATVAEEEAGSKASSAIVPTSTNIDDCLSVIALPLPHRPLFPGFYMPIYVKDQKLLQALIENRKRSAPYAGAFLVKDEEGTDPNIVTGSDSEKSIGDLKGKDLLKRLHEVGTLAQITSIQGDQVVLLGHRRLQITEMVEEDPLTVKVDHLKEKPYNKDDDVIKATSFEVISTLREVLRTSSLWKDHVQTYTQHIGDFNYQRLADFGAAISGANKLLCQEVLEELDVYKRLKFTLELVKKEMEISKLQQSIAKAIEEKISGDQRRYLLNEQLKAIKKELGLETDDKTALSAKFRERIESKKDRCPSHVLQVIEEELTKLQLLEASSSEFSVTRNYLDWLTVLPWGNYSDENFDVHRAQKILDEDHYGLSDVKERILEFIAVGKLRGTSQGKIICLSGPPGVGKTSIGRSIARALNRQFYRFSVGGLADVAEIKGHRRTYVGAMPGKMVQCLKSVGTANPLVLIDEIDKLGKGHSGDPASALLELLDPEQNVNFLDHYLDVPIDLSKVLFVCTANVIETIPNPLLDRMEIIAIAGYITDEKMHIARDYLEKNTRQACGIKPEQPHT

SEQ ID NO: 226902 - protein, 528 aa, Zea Mays
MLHCTYLRRPFPVLCSPTPYLMSKEPCCSHHLHQAKRVSSVLSQLRAPTPGTMSDSSDFAELLWENGQAVVHARTRKHPPQQAAFPPFTFTCSSRAQQRQPVPPLLKTGGGLFADFSSATAGLDAPRDNADLDDTVPWIHYPIPIVDEASPAAPALADSFIPDFFSELHAAAATTSLGPLPPPPPPPPAVQHTGDDNDNRSTPVPNPTTGRGPEPSKETHRAPVPGPAGRPEPQPQAELAPARKPRQESGGGEALMNFSIFSRPAAMARASLRQRPPQTGTDKASNATTSTRVESTVLQSASASGPRTAAAPAVFVDQRTAWPSQQPKEVRFPCAAAAPPPTPTAGNLQQERPSNNNMTPPQKEVETRKASEAAGATATSSVCSGNGAGTGKDDESWRQQKRKTLQAECSASQDDDPDDESGGMRRSCSRGAKRSRTAEVHNLSERVSPMPICHAIDLELEPGAVHLNSPHCNACNAMQQQTCRGEGTGSMKKCVPCKSSSPTATRLTRPPCWTKRSSTSKPSSFKCR

SEQ ID NO: 226903 - protein, 270 aa, Zea Mays
MRRKNPFLCLICVVDETRSGGLTEQEGELGAETLRRAVFEARREMKEARNHYHTRGSSRGGGGTTAERDLVLQWGNRKRLRCVKVQRRDVEAAATVAAEKAAISQRRAAATAAQHHPDGHTHHRVFRNTEEFAIMKSPARQQQNSRIDAVASPDRECPGRGNNNNNGGPQTCPDDKKGSSSGSEGSIWPKFAVTLSNREKEEDFLVFRGSKLPQRPKKRAKVIQRTVNFVCPGTWLCDLTLERYEVREKKVSKKRPRGLKAMHDLDSDSE

SEQ ID NO: 226904 - protein, 1207 aa, Zea Mays
MASSQHVEMEAAKLLHKLIQESKDEPAKLATKLYVICQHMKLSGKEQSLPYQVISRAMETVVNQHGIDMDALRSSRIPFAGGPQAGDSSGVMSKDKEVIGNQSPMVGSDASQSSGQAGLWQLPSGSTDMIRHGASISGRVPTGPNRGDFSAADIHQGSMSQKSGRSSGIESPASLQMEDTRSMNSHDSLKSDEKTSKKTSSKRKRMDSKGAGDLRSEDNSKSDVISTGQNTRKGKQVGKAGRQGQPSMGIEHEQQPHKLQGGTGQVPPIHGGAPFLRTRSEGPSGRTMDKTKPSNPFSMGQIPNFPEGLASTGAPIELQKSIQGGASLFNPGFGWNQNPQVQTLKNSQGSIHNLVRSGVTVEGKVNVGAQGAFNSASAPQMEFPTVPPYNPSSFGASSQFLDKGKELVSSIISTEPHSSKVASQPGISHGSPMQERQGMIRVPQRGEASFQERRPSSLPSRSTGPSPMSHISSNTPFKEQQLKQLRAQCLVFLAFRNNLQPRKVHLEIALGRGPPAESDSAGQRGSEGRVSDALGKENGSSRENSGVFCRQTDISRLPATSAGSIAEDDSLSKDPENATKKIKLAEQEKSLMEVENVQQASVMQGTSSEMRSQETASQNPYRPQQSYYQGDTRRIASDIHRTDAEILNQNLSWGGQGSTALGGTRQLLNQETKESLAPSKSHHMPVDGYNSNIQGIDRTPEIAGAGNDVENCSHVADIVPEQAADEGDEDLSEHEDLLSSPKHTMTEKWILDYQKRIYNEKQKRTLEQHKVHSRMSATYEELKESVNSSEDLSAKTKSVIELKKLQLLPLQRRVRSEFLLDFFKPNTSDLERIKSLKKHRHGRRVKQLEKIEQKMKEERQKRIRERQKEFFADIEAYREKLEDNFKVKRERLKGFNRYIKEFHKRKERIHREKLDRIQREKINLLKNNDVEGYLRMVKDAKSDRVKQLLRETEKYLQKLGNKLQSAKSTDGRSSFVTDKSDTANDIEDESYQPQHYLESNEKYYQLAHSVKETVNDQPSYLQGGKLREYQMNGLRWLVSLYNNNLNGILADEMGLGKTVQVISLICYLMETKNDRGPFLVVVPSSVLPGWESELSFWAPSINKIAYAGPPEERRRMFKEMIVHQKFNVLLTTYEYLMNKHDRPKLSKIQWHYIIIDEGHRIKNASCKLNADLKLYRSSHRILLTGTPLQVFSPIYATCRTCVLYQED

SEQ ID NO: 226905 - protein, 1264 aa, Zea Mays
MMMSDDDDAEPQLNAVEGYYFVDSKNEKEPVCFSTLPFWFGDTDDLPDGKKKLVLRGTGDPGVKVYDEVVACRLGLEGKQPEFAVLTAKGRRWIRLIRPLNSYEEMIRTVLITAQMLHFLRRKPHEPEKTLWNHLCKVFNKFDVPPSEDDFRNHCSLMKQFAAKDPVLAKSEILRVFIEGKSRKKFTEVGADHIDVKQPFITDDEGIDEMNVEDVDNESDEDDDEYLFDSICAICDDGGDILCCDGPCMRSFHAKEGSGEDSCCVTLGYTEAEVEAMKLFLCKNCEYKQHQCFICGVLEPSDGEAAKVFLCNNATCGHFYHPKCVAQQLHPINIDEASELEKKITEGFSFTCPIHWCFHCKGLEDRTQEPLQFAVCRRCPKSYHRKCLPSEISFDENEEDDIIIRAWELSKRILIYCLDHEIDSELETPVRDHIKFPKIEKPLQFVKKGSSLLPKKKKRTYSETVLEQSPKDTVKRKSKVHMLEREQNKQDTREVSAKSFTQNLVDTPVKKKAKLKEKIQLPYVAKDHFISSPKSVKEQEQELVPLPLSAIRKSSFPKVDSETEKRVITILGNKVSSLTIKDVTRNCSLPSTHVYSGRLTDKIPLGKIERSVQAVEAALKKLENGGSVNDAKAVCEPEVLRQLARWHIVDRLHWYVETGDMIVDFCCGANDFSRLMKEKLDKVQKKCHFKNYDLIQPQNRFCFEKRDWMTVQPNELPHGSQLIMGLNPPFGVKASLANKFIDKALTFKPKLIVLIVPKETKRLDQRRTPYDLIWEDSECLSGKSFYLPGSVDLNDKIVEGWNASAPPLYLWSHPGWTKKHMQVAEEHGHTCMGKIACHVEESNLSDDLSVRKQSDATNKLNSRSGKETPFNDRMSNLLDDGSARKQARSEEEKRTLGKIEHHVKKANIPDNLPVKKEPEASSKVMSHSGKDRKIGRYNRRRHDNRSSKGTPDHTESLPPEKQVEVAYEETRVIPSKKIAHNEKKSAQYNYEQTAAGMPNMRSRGGDSDMSISPPVSCNARSKPMSYSLTRPIEHLDTNAHLLAEEPSDSVLNRVPNHDSYLAIKEEYCDGFKRKNDPIFSHIDDSSRMRGSSIEEVTKPYITAPNSDPWSKGDGSFYRHPSSEDLNANADVLMPGYSARYGQIGGDSNPQASMVPLATDSRLHGGTVADNYLSARYSLGSSGARVSQPAPTVPPFGLSGASSQRGSVMDRYSYGLSGPTGTQRSVIDRYAPSLDGTNTTRSRSSLPEQYPFGQPGSSGGGWPHH

SEQ ID NO: 226906 - protein, 594 aa, Zea Mays
MPSLPLALPPAPALAPLPRRQGPRLLTHRSGLPIDRLVPAILSCKRRATAMQRGALLTRAVVARLYLVVLNIDTHRCWARDYYNNYAQFRWVGDSVHCASAIRSVACAERSGVSLQDPQPIVGILIQPDTFGTRLLIAYERGLLVLWDVSEDRAVSVRGYGDLRMKGQINGAQGDSGEDQLNTTIDDSEEEREICSLCWASREGSTVAVGYITGDILLWDMTTKSSRQEKQSDVSSNVVKLQLASGSRRLLVIVLHWSAGLLFIKHDFGCWDNKWSVCIYKLREHTGGSSFHFVSESKQEGRQEREYEMTLKRTLQSICLLTVHPNTTTSVVLQVEDSNNSFTLLVVWMTQKVLHCSLSPLPAYEPAFDWENERSLIFGQRVPESIPAISNSGLKITVKIRTCQEWRNKTMKTTTESRSWPSRLSRTCLFNTEKPNQEPSPHTEKNQARASGQAPATPVSAIITLHNSTQKCEIYVFYKALQEESIVFSLVCMPVNEGDAYLSQFYMMEGEAETVVGSCSKPCGPLEDYYIPYYILKPGAQQVFDLSKEAPDKVLHRLYANLERLKMEGHFLAVQIWRTLRLIAVMVQLAGCLG

SEQ ID NO: 226907 - protein, 394 aa, Zea Mays
MALMRGLQRAVASRTHPPGSRTPPLSEMLPSLVRARSAPLRRLVSTFSSTLAVLPRVPHVISSGGNLNLPFSAHPSPARDGPSGPAGGAQRGISFSTRAVDARDEAASSSAAADSDLSAPYLSVRIRCRRHDVEVLSEALLSFGASSVTVDDISDAENLDEISITSLYADGEDVDSSVRSAARSAGVNYSPVYETSVGKQCDWIATVQETYESTEVADGLWVVPKWRTPPDPEATNIIIDPGTGVLGIAALKMGATQSTGIDIDPQAIASASENLLLNGLHSNQMPVYLVSTNAQPSCLPSFIDKSEEHHSTNNLDLKLSRGTYDVVAANILLNPLLELVEDIVGYAKPGGIIAVSGILEEQVPKIKEVYSRYLDRILVSEMDGWACLQGTRRV

SEQ ID NO: 226908 - protein, 594 aa, Zea Mays
MEPVKEGEFEEERRKGQNLLPALHMNSAAPAPIKRAGRPASALLGLLLALHLAIAKEQYHEFVVKEATVTRLCGTQQQRIMTVNGQFPGPTVEVAEGDALIVRVRNRGSYNVTVHWHGVRQMRTAWADGPEFVTQCPIRPGTSYTYRFTVAGQEGTLWWHAHSSWLRATVHGALIIRPRAGVPYPFNAGDTPAREITIILGEWWNMNPIDVVRTATRTGAAPNISDALTVNGQPGDLYKCSSNGTTTFSVTSGETNLLRFINAALNTELFVSLAGHTMTVVGADASYTKPYATPVILVAPGQTTDVLVTFDQPPSRYYLAARAYASAQGVPFDNTTTTAIFDYGTGASNSSSPAMPTLPAYNDTATATAFTTSLRGLRAADLPARVDESLFFTVGVGLFNCSSGQTCGGPNNTRFAASINNVSFVLPSTTSILQAHYAYAAGGATPAGVFTADFPANPPVRFDYTAPNVSRALWQPVPGTRLVLQGTNVFAAENHPIHLHGYDFYILAEGFGNFDAAADTASFNMDDPPMRNTVGVPVNGWAVIRFVADNPGVWLMHCHLDVHITWGLAMAFLVEDGVGELQSLEAPPSDLPIC

SEQ ID NO: 226909 - protein, 331 aa, Zea Mays
MTVIKLKSGGLWVHAPIAPTKECIQMLKELDAPVEHIVLPTFAYEHKIFVGPFSRKFPKAQIWVAPRQWSWPINLPLEFFGIFRAKPLKDEDDATPWVAEIEQKVLSSPEVGIGPYVEVAFYHKPSRTLLVTDAVIFVPQQPPECISKESLLASAKNGLAVKLLSKGKEVPDEPVVDNKLNRQKGWERMVLQILFLGPSNLLEPNASFAQMSQKLIVSPIVKTLVFSKVPEKVRDWVDRIAADWRFRRIIPCHFAAPINASRSDFLAAFAFLDEFLPERAAAAPGLSLLLASFMGKAASYFPPDDMKTLSSLDEFLVSVGAVKKTVSGRKR

SEQ ID NO: 226910 - protein, 352 aa, Zea Mays
MAAAAVASSSTPRPLRLAQRGAVSAHASHHVSAPPHRSRRPRLSVSASAGVEGTSGSERFYFNFTGFPFPLGPFLNRRTIRTEAVKGSIWLFEQEQALGFSSVSTNIRMTVIKLKSGGLWVHAPIAPTKECIQMLKELDAPVEHIVLPTFAYEHKIFVGPFSRKFPKAQIWVAPRQWSWPINLPLEFFGIFRAKPLKDEDDATPWVAEIEQKVLSSPEVGIGPYVEVAFYHKPSRTLLVTDAVIFVPQQPPECISKESLLASAKNGLAVKLLSKGKEVPDEPVVDNKLNRQKGWERMVLQILFLGPSNLLEPNASFAQMSQKLIVSPIVKTLVFSKVPEKDVEGLNWDDEGW

SEQ ID NO: 226911 - protein, 351 aa, Zea Mays
MAAAAVASSSTPRPLRLAQRGAVSAHASHHVSAPPHRSRRPRLSVSASAGVEGTSGSERFYFNFTGFPFPLGPFLNRRTIRTEAVKGSIWLFEQEQALGFSSVSTNIRMTVIKLKSGGLWVHAPIAPTKECIQMLKELDAPVEHIVLPTFAYEHKIFVGPFSRKFPKAQIWVAPRQWSWPINLPLEFFGIFRAKPLKDEDDATPWVAEIEQKVLSSPEVGIGPYVEVAFYHKPSRTLLVTDAVIFVPQQPPECISKESLLASAKNGLAVKLLSKGKEVPDEPVVDNKLNRQKGWERMVLQILFLGPSNLLEPNASFAQMSQKLIVSPIVKTLVFSKVPEKVLALGSSPALV

SEQ ID NO: 226912 - protein, 331 aa, Zea Mays; identical to SEQ ID NO: 226909

SEQ ID NO: 226913 - protein, 332 aa, Zea Mays
MAAAAVASSSTPRPLRLAQRGAVSAHASHHVSAPPHRSRRPRLSVSASAGVEGTSGSERFYFNFTGFPFPLGPFLNRRTIRTEEQALGFSSVSTNIRMTVIKLKSGGLWVHAPIAPTKECIQMLKELDAPVEHIVLPTFAYEHKIFVGPFSRKFPKAQIWVAPRQWSWPINLPLEFFGIFRAKPLKDEDDATPWVAEIEQKVLSSPEVGIGPYVEVAFYHKPSRTLLVTDAVIFVPQQPPECISKESLLASAKNGLAVKLLSKGKEVPDEPVVDNKLNRQKGWERMVLQILFLGPSNLLEPNASFAQMSQKLIVSPIVKTLVFSKVPEKLLL

SEQ ID NO: 226914 - protein, 376 aa, Zea Mays
MAAAAVASSSTPRPLRLAQRGAVSAHASHHVSAPPHRSRRPRLSVSASAGVEGTSGSERFYFNFTGFPFPLGPFLNRRTIRTEAVKGSIWLFEQEQALGFSSVSTNIRMTVIKLKSGGLWVHAPIAPTKECIQMLKELDAPVEHIVLPTFAYEHKIFVGPFSRKFPKAQIWVAPRQWSWPINLPLEFFGIFRAKPLKDEDDATPWVAEIEQKVLSSPEVGIGPYVEVAFYHKPSRTLLVTDAVIFVPQQPPECISKESLLASAKNGLAVKLLSKGKEVPDEPVVDNKLNRQKGWERMVLQILFLGPSNLLEPNASFAQMSQKLIVSPIVKTLVFSKVPEKVQCVWLTGSLSDEIQTHVQRDAGRIRLWYKVQNLSS

SEQ ID NO: 226915 - protein, 180 aa, Zea Mays
MVQAWESSAPDENKTPKKRFWQSGQSAIAQTISLLLQKAWLFQADNMEGSALPPLSCVNDASVLLEFVMSSVTCMEETESLKVFELVATWANAVANWDSWEMEDQGVFNTIKEAVNFHQRFDLDGLFLKTHFVRCHSTRYSFCHGSVLIHAGHSSRSKVILSPYMVRLVVLYSKHNLPSV

SEQ ID NO: 226916 - protein, 167 aa, Zea Mays
MAAAARQRGTVKWFNDTKGFGFISPEDGSEDLFVHQSSIKSEGFRSLAEGEEVEFSVSEGDDGRTKAVDVTGPDGSFVRGGGGGGGGGGGYGGGGGGCFKCGEPGHMARDCSSGGCYNCGQAGHMARDCPSGGGGGGGRFGGGGGGGGDRSCYNCGEAGHIARDCPT

SEQ ID NO: 226917 - protein, 778 aa, Zea Mays
MERLEVDGDFIAAGNWKAVTAESVLTKFENSRQGLLESLHQVEETIPEAVGSKITMIAQELEKAGFVLDQSEKQVGDEVSELIQNEPKSNGFLDENELEFLHQIAFRVGITSSVAALTERRALRRLLERAHAEEDLKKESIAAYLLHLIRKYSNIFKSETNDSTNSLCSSPSCSSSKLSSSTDLHGNCQILEKRLPSVGSLSPKQIGGLSGTGSMPLPPEELRCPISLQLMYDPVVIASGQTYERACIEKWFHSGNTTCPKTRKQLSQLLRTPNYCIKGLIASWCEQNGVPVPAGPPESPKLEHLSISSLESTTCAATDGANTNTVLFEDTTAKDDAKSESEVSKEMFSRQNSGEATSKLRIHEEVSPENCSALQSSKEAAPDACGVEDSVDVEKGKGSHQDSKDDVPVSERCEQWLHVLNKNDAESMSEKHKLVEQIRILLKNDDELRNYAGANGITEPLIHFLKMAIHRGGVQSQEVATMALFNLAVNNDGNKRLLLSAGVIPLMEQMIQKHETCEAAIAMYLNLSCIPEAQAIIGSSVAIHFLVNSLGEGGPRSDTCRMDALLTLYNLSLHAPNIPPLMASGIIENLRRVLVPSSPWTDKALAVLLNLALTRRGKEEIAASAAMVGAIVLIVDNGEPGEKEKAVSCLYVICSGDEGSSQTVLQEGVIPALVSVTANGTARARDKAQRLLRLFREQRQRELELEEMQPRVELHEVASRAAVQQQREEEEEEMALAVLPAAAPSKPSGGGKKPRLCRSGSRRFTKVFTCLLKKWSLR

SEQ ID NO: 226918 - protein, 288 aa, Zea Mays
MWEPVHHQLWSLCSVYVLSVYSSLSTLQSGFLLRTKDHQKCLRATLAYITVASFLLGALCSGIAGFVGMWVSVRANVRVSSAARRSAREALQIAVRAGGFSAIVVVCMAVFGVAILYSTFYVWLGVDSPGSMKVTDLPLLLVGYGFGASFVALFAQLGGGIYTKAADVGADLVGKVEQGIPEDDPRNPAVIADLVGDNVGDCAARGADLFESIAAEIISAMILGGTMAQRCKIEDPSGFILFPLVVHSFDLVVSSVGILSIRGTRDSGLISPIEDPMAIMQKGYSVTI

SEQ ID NO: 226919 - protein, 148 aa, Zea Mays
MHGGLSPELNKLEQILNLSRPTDVPDTGLLCDLLWSDPSNEATGWAINDRGVSYTFGPDKVSEFLEKHDLDLICRAHQVVEDGYEFFASRQLVTMFSAPNYCGEFDNAGAMMSVDETLMCSFQILKPARKVLGGSTNNKSGFQSSRGW

SEQ ID NO: 226920 - protein, 140 aa, Zea Mays
MSKRQGPPKHQNRYAWKPNLGQKINETEPGGRFRPLSEITGVCQRCRDQIDWKRRYGKYKPIVEPAKCQKCNKRNVRQAYHNVCRDCSKDLGICAKCCTCVNELVGRDANEEESERKSLEEAVRGARERERRTLLRIKLN

SEQ ID NO: 226921 - protein, 467 aa, Zea Mays
MEESDAAEGVAVQLIDGEGEFAAAAAERFMAAAGVAGCGLSYAVVSIMGPQSSGKSTLLNQLFGTNFREMDAFRGRSQTTKGIWIARCVGVEPCTVVLDLEGTDGRERGEDDTAFEKQSSLFALAISDIVLINMWCHDIGREQAANKPLLKTVFQVMMRLFSPRKTTLLFVIRDKTRTPLEHLEPVLREDIQKIWNSVAKPEAHKDTPISEFFNVQVTALSSFEEKEEQFREQVQQLRQRFSNSIAPGGLAGDRRGVVPASGFLFSSQQIWKVIRENKDLDLPAHKVMVATVRCDEIANEKFGCITSDTEWLDVESAVQSGPVPGFGKKLSNIVEVHLQEYDKEAFYFDEAVRKGKRQHLESRILNLVQPAFQKMLTHLRMKALEKFKAGLNSSLESGKEFAISARDNTECSLKDFEQGCADAIIKQANWDCSKILEKVRRDIEDHALSIRERKLSELTTHAKVMRN

SEQ ID NO: 226922 - protein, 562 aa, Zea Mays
MVATVRCDEIANEKFGCITSDTEWLDVESAVQSGPVPGFGKKLSNIVEVHLQEYDKEAFYFDEAVRKGKRQHLESRILNLVQPAFQKMLTHLRMKALEKFKAGLNSSLESGKEFAISARDNTECSLKDFEQGCADAIIKQANWDCSKILEKVRRDIEDHALSIRERKLSELTTHAKEKLRKALAEPVESLFDAADQTTWTSIRNIYKRETEAILPEFLKTICGFEMEYAQAEEMVSKLRDYARSVVQSKAKEESSKVLIHMKERFTTVFSHDKDSIPRVWTGKEDVHAIAKEARAAALKLLSVMAAIRWDDEPDRIESIITSTLLEGSVVSKIASAASADPLASTTWEQIPPEHTMITPSQCKLLWKQFKSETEFTITQAVSTQQAHRRGNSKLPPPWAIVAIAILGFNEIMTLLRNPIYVFLLFVGYLMVKALAVQLDVSREFQNGVVPGIISVSAKLLPTIQNLVNKVAAEQQDEHRHPHQQHPQVAEPLQPQMQPPPLLLSPRSPMSELRRLHMPSSPRKVASSSSSPSSSSSSAVSSPRHVGEDQKPRPGAAAPENQS

SEQ ID NO: 226923 - protein, 582 aa, Zea Mays
MKFTLEHGLKIVMSSPSMLVMVATVRCDEIANEKFGCITSDTEWLDVESAVQSGPVPGFGKKLSNIVEVHLQEYDKEAFYFDEAVRKGKRQHLESRILNLVQPAFQKMLTHLRMKALEKFKAGLNSSLESGKEFAISARDNTECSLKDFEQGCADAIIKQANWDCSKILEKVRRDIEDHALSIRERKLSELTTHAKEKLRKALAEPVESLFDAADQTTWTSIRNIYKRETEAILPEFLKTICGFEMEYAQAEEMVSKLRDYARSVVQSKAKEESSKVLIHMKERFTTVFSHDKDSIPRVWTGKEDVHAIAKEARAAALKLLSVMAAIRWDDEPDRIESIITSTLLEGSVVSKIASAASADPLASTTWEQIPPEHTMITPSQCKLLWKQFKSETEFTITQAVSTQQAHRRGNSKLPPPWAIVAIAILGFNEIMTLLRNPIYVFLLFVGYLMVKALAVQLDVSREFQNGVVPGIISVSAKLLPTIQNLVNKVAAEQQDEHRHPHQQHPQVAEPLQPQMQPPPLLLSPRSPMSELRRLHMPSSPRKVASSSSSPSSSSSSAVSSPRHVGEDQKPRPGAAAPENQS

SEQ ID NO: 226924 - protein, 297 aa, Zea Mays
MAGASSDLSPFLSVSTPRKRVKSRWEPVVDENVTNKVEQIAKGLISSNVHSTLDPKNRIPNPVRGSSWDRGKFLQSCQASSNKVNQRPAKKQKMASNLSQIQNGSASSDSEKEHDLTKHYASATALANSPEEKKRREHRSKRFEKSKDSSLKSRNASANNDGMASFRARRAISSLRTRTYEEGTLAVEDMDWDALTVKGTCQEIEKRYLRLTEAPDPAKVRPEDVLEKALAMVETSEKNYLYKCDQLKSIRQDLTVQRIQNELTVKVYETHARLAMQAGDLPEFNQLVKRSQTRCSC

SEQ ID NO: 226925 - protein, 478 aa, Zea Mays
MAGASSDLSPFLSVSTPRKRVKSRWEPVVDENVTNKVEQIAKGLISSNVHSTLDPKNRIPNPVRGSSWDRGKFLQSCQASSNKVNQRPAKKQKMASNLSQIQNGSASSDSEKEHDLTKHYASATALANSPEEKKRREHRSKRFEKSKDSSLKSRNASANNDGMASFRARRAISSLRTRTYEEGTLAVEDMDWDALTVKGTCQEIEKRYLRLTEAPDPAKVRPEDVLEKALAMVETSEKNYLYKCDQLKSIRQDLTVQRIQNELTVKCQSQLKRLYAQGIKGCYFEFSAYNLLCVMLHSNNKRDLLSSMASLSKEAKQDAAVKHSLAVHASVLSCNYVQFFKLYKKAPNLNSCLMDLYVERMRFEAMKCMSRSYRPTVPVGYVAQILGFLRTDTGCATNGDDGLEGCEKWLKAHGTVLSEDSSGELQIDTKASSSTLYMPEPENAVAHGDASLAVDDFFARTDGQLKRGSSDGPTVDTP

SEQ ID NO: 226926 - protein, 775 aa, Zea Mays
MASHGIGAAAGSDAPHAEVVTMGQTNPSPYPPVSSSHHSWSSATGSVSWNNTVDKLSQDTVYYDPQRDVSVSGGNQNVGSSAPHVAQASMGITDAAHSHVPYSSSDQHGYNPVEYANYYYSYPQAANDSSVQQGANQHPGAAYQPLTSFQNSGSYIDPTSNTYYNAGDHQTVPGYGSSSYYFQNNTWNGGSTGNNFAQSYQNYSPSDTNAQQSSTSVPANSLPYQQQYNQWPYYYNQSVPSASSNPVAGNSTTDNLAVNTPSSYSYPNSQPPPPGTTSWKSNSSASVAPPMQVPGVLEHQNQYGNQAEGHYNQGPGVQWSQNHYAYQTQPYPQKINSNYSQLSNPEDQLRTVDSNGPSTNLSSNHVSENFKPNLLDSVTMNTSSESKIQVPINPRIAQGFSMVIPKNEKKSSGLDLSRKPAYVSVSMPANDAKASQVGPDARSIPFSLRNYAMRNLNRCKNDTQRAACRSIMEEITKKAFAEGTLLTKNWDTEPLFPLPESVVGMAGASSDLSPFLSVSTPRKRVKSRWEPVVDENVTNKVEQIAKGLISSNVHSTLDPKNRIPNPVRGSSWDRGKFLQSCQASSNKVNQRPAKKQKMASNLSQIQNGSASSDSEKEHDLTKHYASATALANSPEEKKRREHRSKRFEKSKDSSLKSRNASANNDGMASFRARRAISSLRTRTYEEGTLAVEDMDWDALTVKGTCQEIEKRYLRLTEAPDPAKVRPEDVLEKALAMVETSEKNYLYKCDQLKSIRQDLTVQRIQNELTVKLISGL

SEQ ID NO: 226927 - protein, 269 aa, Zea Mays
MDDFWRIAKVLHQRLSRAADWKEWRPVYKALVVLEFLLTHGPEDVPSEFLADMRAMHDLRSFNYVDDKGFNWGTCMQRRTDSVLLLLTDADRLREARRRAIRVSHEVRGGGVGGGSPTSSSSPSSASSSASSRTSRTWSFGGSSHYSDGPAMCLTCASDADYRHDKKCDAYTADDDCWASSNHKSSRWAARLDESDGEDQHQGLMDDAWDAHLVEDSTSTWSARLLGSLSLSTSRASGFQSLSQPEQRRSSKKLQGQLQRQLSADYTRP

SEQ ID NO: 226928 - protein, 233 aa, Zea Mays
MHNLRSVSKPNAKLYLGLPFTPNRQCEALFGPTEGPTRSADVSLTLSTTRPHCSCSLDAVTSRMDGADIPSHSAADGDRPPENADDGGVEDERAAAPPPERCGALASAIAGVLAGALREHEERAAATARSQDEVAAAIDRLNGELDRLLENAPTMVIMHHSARISSIRKRISAMNMLLKSIQRRIDSMDRIISTDHSSPVQKAGNEVGTSYGFQYHEVSGGEVSFSWALVLWF

SEQ ID NO: 226929 - protein, 636 aa, Zea Mays
MAFTALSLLYHLSITVSLVLARGIIIAGVVDIAPRPTPLPLPPQPLLAPSPTPRPPGLGAPTRTPPLPLPLPSPRPPRTPPTTTPLPRPWLGAPSPARVPRPPRLGAPPRTPVLPSPRVGAPSPAPPPVRPPQLGAPLPTPVAPTPQLEDPSRGPILPRPPLKGVPPSTPPLVAPRLGAPLPSPPVPSARKGTPPPPPQFRVPIRSPVIPPPQKGIPPSAPLIPAPRLGVPLPSPPVQQPPRTPILPPSRKGAPPSIPPLSPPKLGAPLPSPLFPPPRLGAPPRTPILAPPPQVRAVFPSPRSPPPRLGAPLPTPLLPPQYAAAPPPPPSPSPPMVVPSGPKVPALLAFGDSIVDTGNNNYLVTVVKANFPPYGREYPNHKATGRFSDGKITVDFLASALGLKETLPPYLNKSLTLEDLKTGVSFASAGSGYNNATCRTSSTMTIERQLQLFSEYKAKVGGIHERALFVVCSGSNDIVEHFTLADGADRPRRAADRADRGAAGGVRALAAAHRRRGSDAVRHGPQPAGALVQPEAEPGGGQAVREVPRRQHLLRRPLLRPRRRGPALPGSRVQGRQGRLLRLRRPGGGPALQHRQPYLPGPLQVRVLGQLPPHREGVQAHDGRLPHKIHEIHTLAS

SEQ ID NO: 226930 - protein, 424 aa, Zea Mays
MERYSDMRPKAEVSYLGRGSRFSSRNQSSEERTNHSSDKPGSSTRFNPTKARIGGNQGRPRYVCDSFKSPSSKVSPAGSSKFPLSKFEERRRQPFVPGFDIAESSRRKADAKQLQGSKKIAAENDSSDNLRGESEGFTTEQVVKPEGSHVVGHSGVSAYTVGSLVQTASLGSRTHRQKHKEVNLGTPGASSSTLTNRSTIPGNSTMGVRPAYGHVNGGQIHGLKNLGCSSVPDAQPSGCPSESVISRRRFEFMRKRAFDQESSSRSVNLSLGHSTPTDIRRIRMNEQSLCQQIPRSSSRSHQESAGSVRTRRPSPHATRMSVPDGRADGVLSLHESSTKDVQPAQEHLSLEEVSTESSIRPFFVEFDNNIFSSSHLRRSSTRAERGRPSSLFEESPRQMFHSLMGERDRHRHITMEGITEVYFL

SEQ ID NO: 226931 - protein, 169 aa, Zea Mays
MASDPTREGRNPSHPSPLLPFHLPSLAFCGTAVLCCLGVSTSSRRRQGIRYDAALPSESQAAPRTLPVAIPDAGVLERRRLLRLLVLGGQDRSAGRVRGGRRGWEAAMRAPVPCVLHRPVAWAEELVSSMQSVCRAFQGLKHWGCWKPRSGLQTILAFVYVHCSFPYMH

SEQ ID NO: 226932 - protein, 524 aa, Zea Mays
MEEDKSIFPWDEEQIPEEIVAQAPEPGTIIAKVEHPGIGATEMILSNGMRICYKYTDFLDDQVVFTGFAYGGLSELSEAEYTSCSMGSTIAGEIGTFGYRPSVLMDMLAGKRAEVGTKVGAYMRTFSGDCSPSDLETALQLVYQLFTTNVEPREEEVKIVMQMAEEAIYAQERDPYTAFANRVREINYGNSYFFKPIRISDLKKVDPIRACEYFNNCFKDPSAFTVVIVGKIDPAISLPLVLQYLGGIPRVQDATQPLSRDDLRGLPFKFPATIIREVVRSPMVEAQCFVQLAFPVVLKNTMMTEDIHYVGFLSKLLETKIMQVLRFKYGQIYSVNVAVFLGGNKPSRTGDVRGDISVNFSCDPDISSKLVDFVLEEISCLQTEGPSEEDVLSILEIEQRAHENGLQENYFWLDRILRSYQSRLFSGDIGSTFAFQEEGRIKVRDALTPQSMQSALQRVIPFPCRKQYTVVILMPKSSCWASVKSMLSWSSNGVSRDAKILAGMAGALVLAVSLWRYSRSSLKS

SEQ ID NO: 226933 - protein, 381 aa, Zea Mays
MLYEDKSNWEQNYIGDLHIANGNQDLHYDSESGVSFSDSFASEYVAPSDGLFAPLEYLASQFPGFSAESLAELYYANGCDFNHTIEILTQLEMQVDATPNHTLNLPHSTPNFSTGDFPALPTAEDQNGFNQGNVDVLGMFNGRSSSAMPTGAGDFVSAVRKLASQNSGQWKFKKGPEYGNGISALSVPKQYSSSTKQSSGNKFQSISSGRVAPWLETGDAVASMYSESRGEARDFARVRNTCFEQARQAYLVGNKALAKELSMKGQAYNVQMKAAHEKAREAIYRQRNPVSSQRGGGDHLIDLHGLHVNEAIHILKGELTALKSAARAAGERMQVMVCVGTGHHTKGSRTARLPIAVEQFLLDEGLQYTQPQAGLLRVMVY

SEQ ID NO: 226934 - protein, 289 aa, Zea Mays
MQVDATPNHTLNLPHSTPNFSTGDFPALPTAEDQNGFNQGNVDVLGMFNGRSSSAMPTGAGDFVSAVRKLASQNSGQWKFKKGPEYGNGISALSVPKQYSSSTKQSSGNKFQSISSGRVAPWLETGDAVASMYSESRGEARDFARVRNTCFEQARQAYLVGNKALAKELSMKGQAYNVQMKAAHEKAREAIYRQRNPVSSQRGGGDHLIDLHGLHVNEAIHILKGELTALKSAARAAGERMQVMVCVGTGHHTKGSRTARLPIAVEQFLLDEGLQYTQPQAGLLRVMVY

SEQ ID NO: 226935 - protein, 289 aa, Zea Mays; identical to SEQ ID NO: 226934

SEQ ID NO: 226936 - protein, 372 aa, Zea Mays
MHHSEGQALCSGESCLTESPGRRFTAVSPHLRGKIDLVYFSLDPTCGSLQHWVSGRLFNSDAMPRRSQRLKDTTTNSNTSQIGGNGTDHLSGSRYEVIDEMWTDNMSGTSSSVSTADGRSFEQDRAERILLQDSKVALGIRELLGLFRTLGEGFRLSCLFKCQEALEVYRKLPESQFNTGWVLCQVGKAYFELVDYLEADHYFELAHRLSPCTLDGMDIYSTVLYHLNEEMRLSYLAQELISIDRLSPQAWCAVGNCFALRKDHETALKNFQRSVQLDSRFAYAHTLCGHEYSALEDYENSIKFYRCALQVDERHYNAWYGLGVVYLRQEKFEFAEHHFRRAFQINPRSSVLMCYLGMALHSLKVDIIDRQQ

SEQ ID NO: 226937 - protein, 401 aa, Zea Mays
MPPPLFRNVHAYQNTISGDAPTKQKANGVSQPLRRKYMDEARLKKVSGRLFNSDAMPRRSQRLKDTTTNSNTSQIGGNGTDHLSGKLRVNSSTQSKLCSTAIRSVQVRKGKPRATENFDEGSRYEVIDEMWTDNMSGTSSSVSTADGRSFEQDRAERILLQDSKVALGIRELLGLFRTLGEGFRLSCLFKCQEALEVYRKLPESQFNTGWVLCQVGKAYFELVDYLEADHYFELAHRLSPCTLDGMDIYSTVLYHLNEEMRLSYLAQELISIDRLSPQAWCAVGNCFALRKDHETALKNFQRSVQLDSRFAYAHTLCGHEYSALEDYENSIKFYRCALQVDERHYNAWYGLGVVYLRQEKFEFAEHHFRRAFQINPRSSVLMCYLGMALHSLKVDIIDRQQ

SEQ ID NO: 226938 - protein, 286 aa, Zea Mays
MLSVTFLKSFHDRLYFPCQNEERHAVPYGISNTSEQPELCSSIELCTCSSIGLEIEDPKEAGLCGNSDAGFPSWLAQLVGKPTISSIFDSGNEILDHNDFRCISNFHSNMFSSNSSCLNSMSTPEQSYKVGAKGLLDSSFGLSCLAGLEEYSTDAELPDDSDRFLQVLDQLPVKFISSGFSNNDSRIWDHRSSNAEPPFNQDWGTTQPWSSVHQLQPHSDSGTVLGFMPNGSAYSDLVERHHSLMLVQGNLSTDVLGATDLSFFGSCSSLDNITEAPTLSSDGITW

SEQ ID NO: 226939 - protein, 376 aa, Zea Mays
MDRLQRRNPSSRTHATSLKHPRPPRVPTFQPQPASRSLQEPEPSSPDGRQRKRVRFANEAGSHCISGKQVVNIHEDAKNKPHVCDAKTAEYKFFKKLCEQPGHSSLSYKHSHQSLESNVYRQKQGSRNVTAPKKLHVHDNTVYCDEPLATPAKNEEIPGEKISVQSSHSEYDDKDTPQVGPHDRLLGIHVLTPISHTSFDVTGISVNVDREPISGHIFSGKRSKLLKIAAKTMSMGSAELFQRRSEFIVGILQRLGTNNIMRKQEGSMSHRKMDCRHALAIPEGHFDNLIDYKRSNFNPLAKLRNGKIPSSYASDEACEFMALPSGYNQGPGSIVDQKNDLSHGGSGASECMALPWACVNDTLSSDRKGDMLLLMN

SEQ ID NO: 226940 - protein, 521 aa, Zea Mays
MFTSGSTGKPKGVCGTEKGLLNRFLWMQRRNPLCSDDVLLFKTSVSFVDHLQEFLSAVLTCSTLVIPPSEWRANPASLANLIKVYRISRMTLVPSLMEIILPTLAEKLSDGCNPLKILIFSGEVLSVSLWKRVYEFLPEATIINLYGTTEVSGDCAFFDCKKLPTILEQEELNSVPIGFPISNCEVSLVTNDGLSDEGEISVSGACLFTGYLADPMTSNCPEGSEVLAYYRTGDFARRLKTGELIFLGRKDRIVKIYGHRFSLEEVESTLRDHPDVSDAAVTFQSNGSLDFKAYLVLRSNNKFLKCTQGYSGLHSSRDIIAPLRNWLIMKFPLAMVPRLFIPMKSLPLTLSGKIDYVKLSSLVCAFEPCEIHPESSPADPHMQVIKKAFSDALLVHEVSEYDDFFSLGGNSITAAHVAHKLEIDMRLLYIYTTPSKLFHGLLGEHSHVIPPTPEFHNRKKLRKYASISDSFGPVSEYLDSNFHDQGQISKEGAYDHFAGNHWQTMDTKFSLTKGVVYWPLQ

SEQ ID NO: 226941 - protein, 559 aa, Zea Mays
MRHCGARGAHHGAAGSVTNPHLRPPTGTPLACSTTLMRSRPALAAHLRRLLLLSPSAHLIIIRRAMASAAAAQAQPGGAPPATAEYEEVLGRLSSLITQKVRANSANRGNQWDLMEHYVKILELEESIARMKVIHVAGTKGKGSTCTFTESILRSCGFHTGLFTSPHLMDVRERFQLDGVNISEEKFLKYFWWCWNKLKEKTDDDIPMPAYFRFLALLAFKIFSAEQVDVAVLEVGLGGKFDATNVVKAPVVCGISSLGYDHMEILGNTLGEIAGEKAGIFKKGVPAYTAPQPEEAMTALKQRASELGVSLQVVDPLEPHHLKDQHLGLHGEHQYINAGLAVALASTWLEKQGHKDTLPLNRTDPLPDHFIRGLSSASLQGRAQIVPDSQVNSEEDKDCSLVFYLDGAHSPESMEVCGKWFSHVTKDDTRLPSSLEQSHTSRSQKILLFNCMSVRDPMRLLPCLLDASTQNGVHFDLALFVPNQSQHTKLGSNTSAPAEPEQIDLSWQLSLQTVWEKLLQDKGINTTKSSDTSKVFDSLPVAIEWLRRNARENQSTSFQ

SEQ ID NO: 226942 - protein, 566 aa, Zea Mays
MRHCGARGAHHGAAGSVTNPHLRPPTGTPLACSTTLMRSRPALAAHLRRLLLLSPSAHLIIIRRAMASAAAAQAQPGGAPPATAEYEEVLGRLSSLITQKVRANSANRGNQWDLMEHYVKILELEESIARMKVIHVAGTKGKGSTCTFTESILRSCGFHTGLFTSPHLMDVRERFQLDGVNISEEKFLKYFWWCWNKLKEKTDDDIPMPAYFRFLALLAFKIFSAEQVDVAVLEVGLGGKFDATNVVKAPVVCGISSLGYDHMEILGNTLGEIAGEKAGIFKKGVPAYTAPQPEEAMTALKQRASELGVSLQVVDPLEPHHLKDQHLGLHGEHQYINAGLAVALASTWLEKQGHKDTLPLNRTDPLPDHFIRGLSSASLQGRAQIVPDSQVNSEEDKDCSLVFYLDGAHSPESMEVCGKWFSHVTKDDTRLPSSLEQSHTSRSQKILLFNCMSVRDPMRLLPCLLDASTQNGVHFDLALFVPNQSQHTKLGSNTSAPAEPEQIDLSWQLSLQTVWEKLLQDKGINTTKSSDTSKVFDSLPVAIEWLRRNARENQSTSFQVNSRWSK

SEQ ID NO: 226943 - protein, 726 aa, Zea Mays
MPSITRGGRGGLFSTHRGALLWLRRCQSPLLSTLAGGGGRSDAPHLPVLIVGAGPVGLVLSFLLTKFGIKCAVIEKNVEFTRHPRAHFINNRTMEIFRKLDGLARDIERSQPPVDLWRKFVYCTSLSGSVLGSVDHMKQEDFDKVISPVSVAHFSQYKLVDLLLKKLEGIGFQTCFPSEIGNSTQDLVLESKILMGHKCTSLDQTDEGILVGASVNNGGMIIERKLHCGLLIGTDGARSTVRELAGISMEGERDLQKLVSVHFLSRDLGRYLSSQRPGMLFFIFNPGAIGVLVAHDLENGEFVLQVPFYPPQQMFEDFSAKVCEQIIFKLVGWEPADVHVLDIKPWAMHAEVAEKYICCNNRVILSGDAAHRFPPAGGFGMNTGVQDVHNLAWKLGLLLNGVASPSILQTYESERRPVRIFSHAFCSSNVAIFNTELSVENFKAAMSIPTTLGLDPTVANSVHQVINRSLGSIIPRNVQKAVLEGLFSLGRAQVSDYILNEKNPIGSLRLARLRSILDEGKSLQLQFPAEDLGFHYAEGALVVEASCEKTHEGEKLQHSKRASREYIPSAKVGSRLPHMLVREVPASSEGAFSTLDLVSGDKLEFVLIIAPVKESYEIARATLKIADELTLSARVCVMWPRGSTDAEVEESRSELTPWTNYIDVEEVPRVSGGSWWEMCRISRKSVLLVRPDEHIAWLTELDRVRDAESEIRRVFSHVLCLNSHRV

SEQ ID NO: 226944 - protein, 368 aa, Zea Mays
MQCSRHCIWSGHESLSNDWSSDGERACVRVRRVGAAGPDAGEPGDGEDGADQHRAGGVRGDRRDQGGAGGAVPGDGVVRGHRGVRGPGRVEPAEQRARPLRGARGAAGRRGVPRRRRAARPAGLHLHRVRADPQLPAQELHGGGAGDPVGRARRRRRPLLLVPRAPVGAAGADRAGVPEPAVGQVRGGGGRRRRPRGGQQRARRGPARRRGGLPVLPREAAQGQGLSGQQLLPQQPGKDRHLQLRLATAHGEGGAGARQGVRRERHPLGRGLLRRAPQAQPAAHAAAQQGRDQEDVPLGQPPLILLKLCTRPDGNIPDGSSRRFVSIFFHFVAVCLFDYYLMICMCFFMRLISCCILFFHVCMDYGQH

SEQ ID NO: 226945 - protein, 1764 aa, Zea Mays
MDDSELHEEENPTNSAVDDDDDEDYEEPGGGNHLLGFMFGNVDDSGDLDADYLDEDAKEHLFALADKLGPSLKDIDLMKSSPAPTDPSEQDYDEKAEDAVDYEDIDEEYDGPEVEATTEEDNVLSKKDYFSSSTVYASVNSTVSVFDDENYDEEEEPPNDNEPPGDSAAQNLSSVSIEQADTTTSSDNLAMEKIGLLSHPEENMDFEYEDLENEKGTGEGQLEPESATSLPVLCIEDGNAILRFSEIFGIQEPVRKVKTDHHKRPVDKELQIANVADNVEEDEELILRSTMQNFSTLKHIHVNEDFVESDSDESISDVTLRLKDSCLSEQPMKDVHMDIRIVQRSPTCPDFYPLEHYDWESDIIWNNSPATDQQAYAKICESEESEDTHGEDQGKDYGQASRCWDVQSKTNGSPVIKETFCCTEMPAPANYCPPGKSYPPLTNEDNLDHIMPNNLDDAVKIDTMVRLNNLSVLNRELLEGSWLDNIIWDPNEVTPKPKLIFDLKDDHMLFEILDEKNVDHLQSHARAMIVSQSTKTSTPTVDNFGDQPKPLSGRFNISNDKFYSNRKTPQQAKSHTKKRALMGIKVVHSAPAHKLQTMKPVLSNKEIANFHRPRAKWYPHENKIASQLQGPACSHGRMAVLLMSLGGKGVKILVNAEDTPVSVKLKASKKFELKPSEKIKLFCSGKELQDDISLAMQNVRPNSIVHAVRTEVYLWPKAQKLPGMGARLCTYYQKTTPTDQTAASLRNNSDGLGTVLAIDPADKSPFLGEIHSGSHQSCLETNMYRSPVFPHKVAPTDYLLVRSAKGALSLRRIDKLYVVGQQEPHMEVFSPGTKNMQNYLLNRVLAYVYREFRARERPDAIPQIRADELPIQSPLTEAIVKKRLKHCADLKKGPKGHFFWTQRPDFRVPSEEELRRLLTPESVCCYESMQAGLYRLKRLGILKLTQPVGLASAMNQLPDEAIELAAASHIERELQITSWNLTSNFVACTNQDRENIERLEITGVGDPSGRGLGFSYVRVAPKAPASNSVLKKKSAAAKGTTVTGTDADLRRLSMDAARELLLKFGVPEEQIDKLTRWHRIAMVRKLSSEQAASGITIDEIPVSKFARGQRMSFLQLQQQTREKCQEIWDRQVQSLSALDGDDNASDTEAHSDLDSFAGDLENLLDAEEFDDEDTSTADLRIDKADGMRGLKMRRCSTQAQINKEIEDDETEASLAKKLLEDDGNDVKRKKQPVELTNCGTSLVANKMKQSKTGQTIKSSGYAGALTPKENTPREGKEVENSFVEGGLSSKLKPKMALDVNETVLVKKKSVPGKDGPKEKKQGARGDSLVCGACSQVGHMRTNKLCPKYREDPEMSEMDANSVKPNSMDINHLQAKTPKRLITKVSSEVTETEGPEGIEKTKSVPVKFKVGAPDKSLERNMSVSVSLVSDKRVMDVTDSRSTGKVNKIVIPNKMKSDDFPPDTPKPSVVFRPPAEEKDVPRKKITIKQPKGIDQQRHVESRSVQEPTRKTRKIVELSSFEDKSREDDHWVGGEPSQVNSSHGRRLGLEGKISKATMENERSWRDFEERREMPQARLFDATIYASREEDHLKAKKKNKKKKKHEFKDDDLLDHRPYRNDRRVPERHRALKRSSPAPVVGYASSAKRRRGGEVELSNILEKVVDHLRGLSGSLLFLKPVTKKEASDYLDIIRYPMDLGTIRDKVRKMVYRNRDEFRHDVAQIQLNAHIYNDTRYPHIPPLADELMEVCDHLLYENADLLTEAEDAIE

SEQ ID NO: 226946 - protein, 288 aa, Zea Mays
MLHSQYASQTSKQNPGTNQQLEIEMTAEKSRRLITSDCGGGGADAKPEAPVSEGVVNGDKWPRFADLGGMEQVLDQLLVEVLVPLRRLELPNYLGVRPVAGLLLYGPPGCGKTTLAHAIANETGVPFYKISAPDIVSRVSGGSEENIRGLFQKAYRTAPSIVFIDEIDAIASKRENREMERRIVTQLMTCMDEFHQNIGGDGSDVDSSKKKPGYVIVIGATNRPDAVDQALRRPGRFNRDIYLGVPDVNLRKQILMIRGGYGPWATWAVARVVAKKCNRDFSPNKIKP

SEQ ID NO: 226947 - protein, 777 aa, Zea Mays
MMEEEERKKRMFRQLNSEHSSLSGTFTCFSVDGSKSLCKGNPSSASANSLLKIRNVQRGPQKRIAWDNELLYVPKEGITEMLRSFMDQFLSGAYNILMQSVCGDIMDEHHSIEKSDITTFFKVARFVLAFQHEKASNDQLPQLYLGLFVMNIITMSIQKSAKGIQPSGVSPSNEPDDNLPFHGDICGPVAATLNEDMFNIVISRWRETYEALKETNDYKTLSAAGSLMKNMIDMIYLVLKVLPEDSRESQTARVLLYKLFYDQTEHGLTQFLLNLFRSFDSHKQPKSDLVDLLETIHIMLQLMEKLQARGALRVAKKTKKVRRKKSTNDKKENSEPKVDNAEPNDANPTDGTKCSPETLPDLRSEGPALESSPSEPGKVDTSGAHVLDTLVDTVVNIESTAHAEGDPSCTDSGVMKRNLIEEEGETSDSSVDHQPATSEVDFNVSRLISSLANNSVVQNICWLLKHYKSNSYRTNHYIICMLRRFCEDLELSPMLYQLSLLTTFYDILAEQKLSSSKEYTNIVNFLSKVVRKMLRTIKKQPLLFVDILFWKTRKECHCIDADALLNELKNDVGSKDSEIGSSKGWRDRINIADSLGDDEVDVVIPQAPYDADKDGDLSAGEHTDDFRKSSTKYKRSRLSLSDSEADEIERFLNHVSRDSVPKVPKRRGRSLFTEEQERLIRDLYEKYKDGPKCSHIIAESLDPSGKISSAQVSRKLTQLGLRNVTRRKKVAGPEGKNYTRQVMTMMTQVRENHLMKTHYKYLKADQKVRKFHWWIVH

SEQ ID NO: 226948 - protein, 1122 aa, Zea Mays
MTNDKCDKLQTLFSEDDWKLVQLVLTLFRNVLAIQEITLTQKASGEATHLLFLSDNFLELMFQENVMDIILVLTQHIDEPSGYLKEENLLLMEIYHYLFLGRDPGLIARASNKGLKDGSKSLCKGNPSSASANSLLKIRNVQRGPQKRIAWDNELLYVPKEGITEMLRSFMDQFLSGAYNILMQSVCGDIMDEHHSIEKSDITTFFKVARFVLAFQHEKASNDQKSAKGIQPSGVSPSNEPDDNLPFHGDICGPVAATLNEDMFNIVISRWRETYEALKETNDYKTLSAAGSLMKNMGSHFNLDSLSSYLKVYKKTRSVGHLALQIDMIYLVLKVLPEDSRESQTARVLLYKLFYDQTEHGLTQFLLNLFRSFDSHKQPKSDLVDLLETIHIMLQLMEKLQARGALRVAKKTKKVRRKKSTNDKKENSEPKVDNAEPNDANPTDGTKCSPETLPDLRSEGPALESSPSEPGKVDTSGAHVLDTLVDTVVNIESTAHAEGDPSCTDSGVMKRNLIEEEGETSDSSVDHQPATSEVDFNVSRLISSLANNSVVQNICWLLKHYKSNSYRTNHYIICMLRRFCEDLELSPMLYQLSLLTTFYDILAEQKLSSSKEYTNIVNFLSKVVRKMLRTIKKQPLLFVDILFWKTRKECHCIDADALLNELKNDVGSKDSEIGSSKGWRDRINIADSLGDDEVDVVIPQAPYDADKDGDLSAGEHTDDFRKSSTKYKRSRLSLSDSEADEIERNHVSRDSVPKVPKRRGRSLFTEEQERLIRDLYEKYKDGPKCSHIIAESLDPSGKISSAQVSRKLTQLGLRNVTRRKKVAGESLSTGDRTIEQQDNSLDDLNPMLGEQNHGSKAKSSRPRRKKLHTASDDHDDTSQRKSSDEDTLQVLKSRSKSKKVPLVDSSLSGSQHQEAQHDPDSDDATIGSMIRSRKKKRLSTSDFEGNVRNHQESSDNTKAKDCSPIISQHEKALQDIYPDDETIGSIIRSVKKKRSVTSNFSANIEAQESLRNINLQDETVVSNIMDASVNHGSDPVNNSDNTVEDELLDDFETELVNNGGNTVEAELLDDFEVELDDHEHTDQRITDDEIMTESGKATNSDAKGRAGLKRRHRMVIDDEDDD

SEQ ID NO: 226949 - protein, 553 aa, Zea Mays
MNQEMTTMFPSGIKALIVEDDARFIKSSSMLFSLLNFKVASCGSPISALRLLSGDKIKDVHVVLVNAEKATTCGFDFRAIVETDLCIPVIYFLPRDHVATGDEADELLRTLRDSTYVLRSPLQASDVGDLWTVVAWRKCYLENKAKKAADRRRRVVPAAVQAFLAGGYSTVGEGRNDDESRVHFKAVSAGGRRGRKRKSGGHTVVVGSSGDDQTGKGHGKMNATGGHENDDDDDGGVSSQQQQQQPVATAATSRWNQPAAGSVAPPTAAVGNMATTVTDEPEFSRGSHHHQAVSLPLMFGPFPYQGPRPQVLKQAMFVPLPRYSGTESIGGATVAADAREYGNAAGSLLQPLNLGTGPHGHDELAAMTAYTESNDPPVAEAATNPTIEEVLNNGDSFSTYSTSLMAPNQVLDDMASDVNELAMAGGAIFSNDDASFTAPQDLAAALDGGQLAPGALDAISASLMETDGNPGLELEAMFSPDQYENTLFPLEALLGLDDAPVYEDGQDYRQGGGSADDEAAGTSLIGGADDSLDVLDDYLFMDSAGDFNDDERD

SEQ ID NO: 226950 - protein, 771 aa, Zea Mays
MATMSAASHRCCASSLRALTVLFVLAALVSDVGGRHHHHVCRPYFSCGGFSNISYPFRRQGDPSGCGVQSYELVCTDTDATIRIGSGTYTVLSINSTYSYFWVVDANLDIQSSCPLPWWDYHGIPVPKNTSYPDVVKLMRNGFGLRFPSSIGDRGIRECFAESVRNFLKEPRKYQIVDILMVEELWSCFLDQHGSTNNVVTSVIIDIIKTIPICMWLLKSTHVFCRLVLMPLAVFVFLAHKYWKARITIDAVEKFLRMQQMLVPMRYAYTNIIAITGHFREKLGQGGYGSVYKGVLQPGEVHVAVKMLGNSNCNGEEFISEVATIGKIHHFNVVRLIGFCSEENSRALIYEFMPHGSLDKYIFSSEKSFSWDKLNEIALGIARGLNYLHHGCDMQIVHFDIKPHNILLDSNFVPKVADFGLAKLFPRDDSFVPLSAMRGTIGYIAPEMVSRSFGVISSKSDVYSFGMLLLEMTGGRRNADPHAGSSSQAYYPSLVYNQLSQGDVGEISEGVDMHELKKKLCIIGLWCIQMKPQDRPTMSEVIEMLEAGVDGIQMPSRPFFCDDEVICRFVLMPLIVFIFLAYKYWKTRITIDAIEKFLRMQQMLVPMRYAYTNNIAITAHFKDKLGQGGYDTIYKGVLQSGEVQVSIKMLGNSNYNSEEFISEVATIGKLHDVNGVRLIGFCSEENRRALIYEFMPRGSLDRYIFSSEKSFSWDKLNEIALGIARGLNYLRHGCDMQIVHFDIKPHNILLDNNFVPKVADFGLANQTIPKI

SEQ ID NO: 226951 - protein, 341 aa, Zea Mays
MSTKKVLCKFFMHGACLKGEYCEFSHDWSDQANNVCTFYQKGACSYGSRCRYDHVKVSRNPTVPPPRPTSSTSRRASTSLQLSSYNHPPHMVHQTDSSNQRHQISVDVLAHSASKPAWRNDFQHDIVSDDGIDWSSNQNLINQTSLKPVDLPICSFAAAGNCPYGEGCPQMHGDLCATCGKLCLHPYRPDEREEHIKLCEKNHKRLVALKRSQEIECSVCLDRVLSKPTAAERKFGLLSECDHPFCIECIRNWRSNSPASGMDVNSALRACPICRKLSYYVIPSVLWYFSKEEKEEITESYKSKLKSIDCKYFDFGTGSCPFGTSCFYKSVLCSLMSWIAV

SEQ ID NO: 226952 - protein, 344 aa, Zea Mays
MSTKKVLCKFFMHGACLKGEYCEFSHDWSDQANNVCTFYQKGACSYGSRCRYDHVKVSRNPTVPPPRPTSSTSRRASTSLQLSSYNHPPHMVHQTDSSNQRHQISVDVLAHSASKPAWRNDFQHDIVSDDGIDWSSNQNLINQTSLKPVDLPICSFAAAGNCPYGEGCPQMHGDLCATCGKLCLHPYRPDEREEHIKLCEKNHKRLVALKRSQEIECSVCLDRVLSKPTAAERKFGLLSECDHPFCIECIRNWRSNSPASGMDVNSALRACPICRKLSYYVIPSVLWYFSKEEKEEITESYKSKLKINFAGLLIASTSTLGLAHAPSEQVVSISMPTEMAAWKR

SEQ ID NO: 226953 - protein, 258 aa, Zea Mays
MVAETAAIGGRPSSQPSRVRKSAVLSVAASSASSAHQYRASPRLPFGCEREEMGLTFTKLFSRLFAKKEMRILMVGLDAAGKTTILYKLKLGEIVTTIPTIGFNVETVEYKNISFTVWDVGGQDKIRPLWRHYFQNTQGLIFVVDSNDRDRVVEARDELHRMLNEDELRDAVLLVFANKQDLPNAMNAAEITDKLGLHSLRQRHWYIQSTCATTGEGLYEGLDWLSSNIATKVSSPIMSPTISKKMMTANVYLTVTSY

SEQ ID NO: 226954 - protein, 2746 aa, Zea Mays
MAPINSGNMEQHSQRLLEPDLPVQVRLQLAMEVRDSLEMTHTPDYLNFLRCYFRAFSAILTAYTKPQATENAEHKLRNVVIEILNRLPHSEVLRPFVQDLLKLSLRVLTQDNEDNALLAIRIVFDLLRNFRPTVEAEVQPFLDFVVNIYHKFPTTVSYFFDNPNTSASMAASMPMQHLDPTADASVMMQVPGGGQLNPSARSFKIVTESPLVVMFLFQLYAKLVQTNIPHLLPLMVAAISIKGPDKVPPHLKTPFNDLKGAQTLSFLTYLLKSNADYIKSYEESICKSIVNLLVTCPPDSVSIRKELLVGLKQVLNTEYKRGLFPLIDTLLDERVLIGTGRVCIETLRPLAYTLLAELVHYVREDISLPQLSRIIYLFSRNMHDSSLTLIIHTTSARLMLNLVEPIYQKGVDQQSMDEARVLLGRILDAFVGKFRTLKRTIPQLLEEGEEGKEQPNLRMKLEVPLQTVLNLQQPLEYTKEINDYKSLIKTLAVGMKTIIWSITHAHWPRPQQQNQQSSNLSLQHFRGLREDEVRKTSGVLKSGVHCLALFKEKDDDREILQSFSQMLAIMEARDIMDMFSFCMSDLFDSMITNNQLLHIFSTLLQAPKVLRPFTDVLINFLVSSKLEALKQPDSPAAKLVLQLFRFLFIAAAKAPESCERTLQPHVPVIMEVCMRSATEVEKPLGYMHLLRNMFRALNSAKFDSLMRDLIPSLQPCLNMLLSMLDGPISEDMRDLILELCLILPARLSSLLPHIPRLMKPLVLALKGSDDLVSLALRTLEFWIDSLNPDFLEPSMANLMSEVILALWSHLRPPPYTWGTKSLELLGKLGGRNRRFLREPLALESKENPEHGLRLVLTFEPATPFLVPLDRCIHQAVGAVMQGNGLEAFYRKKALQFIRVCLDSLLNLRENVPGEGVSPGVLGTLLISNLDPSRRRNDASDMKGDLGVKTKTQLLAEKSVFKTLLVAIIAANADTSLHDEKDDYVVDICRHFAMLFHVDSPSSSQSGFMHPIGSSLPSIIMGSRSRCNTSSNLRELDPLIFLDALVEVLSSENRQHAKAALSALNIFAETLIFLARMKHTGMLRGGPSTPMLVSSPSLNPVYSPPPSVRVAVFEELLPRLLHCCYSSTWQAQMGGVMGLGALVGKVSVDTLCIFQVRVVRGLLFVLKRLPVHANKEQEETNHVLTQVLRVVNNADEANSEPRRQSFQGVVEFLAQELFNPNASMVVRKNVQACLSLLASRTGSEVSELLEPLYLPLLQPLISRPLRSKNIEQQVGTVTALNFCLALRPPLLKLSPELVNFLQEALQIAEADETIWVTRMMNAKVVLTWNKLRTACIELLCTAMAWGDLKAQNHTELRAKIISMFFKSLTCRTTEIVNVAKEGLRQVVQQQRMPKDLLQSSLRPILVNLANTKSLSMPLLQGLARLLELLSNWFNVTLGAKLLDHLKKWLEPEKLVQTQKSWKAGDEPKIAAAMIELFHLLPPAASKFLDDLVTLVIDLERALPEDQFYSEINSPYRAPLAKFLNRYVLEAVDYFLARLSHPKYFRRFMYIICSDTGDLRDALARSPQKILASAFSQFYSQSEASAAQLSSVKDEALTGAVSESITVQSSSNMVTTSESYFNGLELVSALVKLMPEWLRNNRVVFDTLLLAWKSPARLARLQNEQDLSLPQVMESKRLIKCFLNYLRHDRTEVGALFDMLSVFLYRSRIDYSFLKEFYVIEVAEGYSPNLKKTILNHFLNIFQSKQYGQDHLVVTMQILILPMLAHSFQNGQSWEVVDPTIIKTIVEKLLDPPEEVSAEYDEPLRIELLQLATLLLKYLQTDLVHHRKELIKFGWNHLKREDNSSKQWAFVNVCHFLEAYQAPEKIILQVFIALLRTCQPENKLLVKQALDILMPALPRRLPPEKNDSRMPIWIRYTKKVLVEEGHSIPNMIHIFQLIVRHADLFYSCRAHFVPQMVNSLSRLGLPYNTTAENRRLAIELAGLVVAWERQRQSEMKVAQESESQNQLGDMLNPSVIGGDPKRSSDVPSFADDLSLPDEEYKPNAAMEEMIITFLIRVSLVIEPKDKESSSMYKQALDLLTQALEVWPNANVKFNYLEKLLGNLSPTPQSKDPASALAQGLDVMNKVLEKQPRLFIRNNINHISQILEPCFGNKMLDAGKSLCSLLKMVFSAFPLEAATTPQDIKLLHQRVQELIHKNLAAVTTQQIALELNNAHSIISFSLFVLNALAEVQKNFIDPFIGLLFRVLQRLARDMGSSAGSHIRQGQRPELDSSVNSRSTIDSTVISNMKTVLKLISERVMSSSDHRKSMGQILQALLSEKGTDSSILLCMLDMIKTWIEEDCRLASSTGSVSSLNPKEIITYLHKLSLVDRKSFPPAAQEEWDAKYLQLLYSLCADSTKYPLSFRQEFFHKIERQYMLGLRAKDPEMRKRFFKLYHDTVGKTLFSRLQFIIQLQDWEAVSDVFWLKQGLDLVLAILVENEPITLAANSARVPTLMIAGPVPDRITMPQQVPDAQESMDGTTLSFDSLAARHAQFLNDANKLVVADIMAPLKELAFADPNVAYHLWVLVFPIVWVTLHKEEQVALAKPIIALLSKDYHKRQQGCRPNVAQALLEGLHLSHPQPRMPSELIKYIGKTCNVWYIAIALLESHIVHMNEAKCSESLAELYRLLNEDDMRCGLWKRKSITAETRAGLSLAQHGYWQQAQNLFYQAMIKATQGTYNNTVPKAEMCLWEEQWLSCASHLGQWEVLA

SEQ ID NO: 226955 - protein, 2786 aa, Zea Mays
MAPINSGNMEQHSQRLLEPDLPVQVRLQLAMEVRDSLEMTHTPDYLNFLRCYFRAFSAILTAYTKPQATENAEHKLRNVVIEILNRLPHSEVLRPFVQDLLKLSLRVLTQDNEDNALLAIRIVFDLLRNFRPTVEAEVQPFLDFVVNIYHKFPTTVSYFFDNPNTSASMAASMPMQHLDPTADASVMMQVPGGGQLNPSARSFKIVTESPLVVMFLFQLYAKLVQTNIPHLLPLMVAAISIKGPDKVPPHLKTPFNDLKGAQVKTLSFLTYLLKSNADYIKSYEESICKSIVNLLVTCPPDSVSIRKARYDLELLVGLKQVLNTEYKRGLFPLIDTLLDERVLIGTGRVCIETLRPLAYTLLAELVHYVREDISLPQQLSRIIYLFSRNMHDSSLTLIIHTTSARLMLNLVEPIYQKGVDQQSMDEARVLLGRILDAFVGKFRTLKRTIPQLLEEGEEGKEQPNLRMKLEVPLQTVLNLQQPLEYTKEINDYKSLIKTLAVGMKTIIWSITHAHWPRPQQQNQQSSNLSLQHFRGLREDEVRKTSGVLKSGVHCLALFKEKDDDREILQSFSQMLAIMEARDIMDMFSFCMSDLFDSMITNNQLLHIFSTLLQAPKVLRPFTDVLINFLVSSKLEALKQPDSPAAKLVLQLFRFLFIAAAKAPESCERTLQPHVPVIMEVCMRSATEVEKPLGYMHLLRNMFRALNSAKFDSLMRDLIPSLQPCLNMLLSMLDGPISEDMRDLILELCLILPARLSSLLPHIPRLMKPLVLALKGSDDLVSLALRTLEFWIDSLNPDFLEPSMANLMSEVILALWSHLRPPPYTWGTKSLELLGKLGGRNRRFLREPLALESKENPEHGLRLVLTFEPATPFLVPLDRCIHQAVGAVMQGNGLEAFYRKKALQFIRVCLDSLLNLRENVPGEGVSPGVLGTLLISNLDPSRRRNDASDMKGDLGVKTKTQLLAEKSVFKTLLVAIIAANADTSLHDEKDDYVVDICRHFAMLFHVDSPSSSQSGFMHPIGSSLPSIIMGSRSRCNTSSNLRELDPLIFLDALVEVLSSENRQHAKAALSALNIFAETLIFLARMKHTGMLRGGPSTPMLVSSPSLNPVYSPPPSVRVAVFEELLPRLLHCCYSSTWQAQMGGVMGLGALVGKVSVDTLCIFQVRVVRGLLFVLKRLPVHANKEQEETNHVLTQVLRVVNNADEANSEPRRQSFQGVVEFLAQELFNPNASMVVRKNVQACLSLLASRTGSEVSELLEPLYLPLLQPLISRPLRSKNIEQQVGTVTALNFCLALRPPLLKLSPELVNFLQEALQIAEADETIWVTRMMNAKVVLTWNKLRTACIELLCTAMAWGDLKAQNHTELRAKIISMFFKSLTCRTTEIVNVAKEGLRQVVQQQRMPKDLLQSSLRPILVNLANTKSLSMPLLQGLARLLELLSNWFNVTLGAKLLDHLKKWLEPEKLVQTQKSWKAGDEPKIAAAMIELFHLLPPAASKFLDDLVTLVIDLERALPEDQFYSEINSPYRAPLAKFLNRYVLEAVDYFLARLSHPKYFRRFMYIICSDTGDLRDALARSPQKILASAFSQFYSQSEASAAQLSSVKDEALTGAVSESITVQSSSNMVTTSESYFNGLELVSALVKLMPEWLRNNRVVFDTLLLAWKSPARLARLQNEQDLSLPQVMESKRLIKCFLNYLRHDRTEVGALFDMLSVFLYRSRIDYSFLKEFYVIEVAEGYSPNLKKTILNHFLNIFQSKQYGQDHLVVTMQILILPMLAHSFQNGQSWEVVDPTIIKTIVEKLLDPPEEVSAEYDEPLRIELLQLATLLLKYLQTDLVHHRKELIKFGWNHLKREDNSSKQWAFVNVCHFLEAYQAPEKIILQVFIALLRTCQPENKLLVKQALDILMPALPRRLPPEKNDSRMPIWIRYTKKVLVEEGHSIPNMIHIFQLIVRHADLFYSCRAHFVPQMVNSLSRLGLPYNTTAENRRLAIELAGLVVAWERQRQSEMKVAQESESQNQLGDMLNPSVIGGDPKRSSDVPSFADDLSKRVKVEPGLQPLCVMSPGGASIPNIETPGSSGLPDEEYKPNAAMEEMIITFLIRVSLVIEPKDKESSSMYKQALDLLTQALEVWPNANVKFNYLEKLLGNLSPTPQSKDPASALAQGLDVMNKVLEKQPRLFIRNNINHISQILEPCFGNKMLDAGKSLCSLLKMVFSAFPLEAATTPQDIKLLHQRVQELIHKNLAAVTTQQIALELNNAHSIISFSLFVLNALAEVQKNFIDPFIGLLFRVLQRLARDMGSSAGSHIRQGQRPELDSSVNSRSTIDSTVISNMKTVLKLISERVMSSSDHRKSMGQILQALLSEKGTDSSILLCMLDMIKTWIEEDCRLASSTGSVSSLNPKEIITYLHKLSLVDRKSFPPAAQEEWDAKYLQLLYSLCADSTKYPLSFRQEFFHKIERQYMLGLRAKDPEMRKRFFKLYHDTVGKTLFSRLQFIIQLQDWEAVSDVFWLKQGLDLVLAILVENEPITLAANSARVPTLMIAGPVPDRITMPQQVPDAQESMDGTTLSFDSLAARHAQFLNDANKLVVADIMAPLKELAFADPNVAYHLWVLVFPIVWVTLHKEEQVALAKPIIALLSKDYHKRQQGCRPNVAQALLEGLHLSHPQPRMPSELIKYIGKTCNVWYIAIALLESHIVHMNEAKCSESLAELYRLLNEDDMRCGLWKRKSITAETRAGLSLAQHGYWQQAQNLFYQAMIKATQGTYNNTVPKAEMCLWEEQWLSCASHLGQWEVLA

SEQ ID NO: 226956 - protein, 2710 aa, Zea Mays
MAPINSGNMEQHSQRLLEPDLPVQVRLQLAMEVRDSLEMTHTPDYLNFLRCYFRAFSAILTAYTKPQATENAEHKLRNVVIEILNRLPHSEVLRPFVQDLLKLSLRVLTQDNEDNALLAIRIVFDLLRNFRPTVEAEVQPFLDFVVNIYHKFPTTVSYFFDNPNTSASMAASMPMQHLDPTADASVMMQVPGGGQLNPSARSFKIVTESPLVVMFLFQLYAKLVQTNIPHLLPLMVAAISIKGPDKVPPHLKTPFNDLKGAQVKTLSFLTYLLKSNADYIKSYEESICKSIVNLLVTCPPDSVSIRKARYDLELLVGLKQVLNTEYKRGLFPLIDTLLDERVLIGTGRVCIETLRPLAYTLLAELVHYVREDISLPQLSRIIYLFSRNMHDSSLTLIIHTTSARLMLNLVEPIYQKGVDQQSMDEARVLLGRILDAFVGKFRTLKRTIPQLLEEGEEGKEQPNLRMKLEVPLQTVLNLQQPLEYTKEINDYKSLIKTLAVGMKTIIWSITHAHWPRPQQQNQQSSNLSLQHFRGLREDEVRKTSGVLKSGVHCLALFKEKDDDREILQSFSQMLAIMEARDIMDMFSFCMSDLFDSMITNNQLLHIFSTLLQAPKVLRPFTDVLINFLVSSKLEALKQPDSPAAKLVLQLFRFLFIAAAKAPESCERTLQPHVPVIMEVCMRSATEVEKPLGYMHLLRNMFRALNSAKFDSLMRDLIPSLQPCLNMLLSMLDEVILALWSHLRPPPYTWGTKSLELLGKLGGRNRRFLREPLALESKENPEHGLRLVLTFEPATPFLVPLDRCIHQAVGAVMQGNGLEAFYRKKALQFIRVCLDSLLNLRENVPGEGVSPGVLGTLLISNLDPSRRRNDASDMKGDLGVKTKTQLLAEKSVFKTLLVAIIAANADTSLHDEKDDYVVDICRHFAMLFHVDSPSSSQSGFMHPIGSSLPSIIMGSRSRCNTSSNLRELDPLIFLDALVEVLSSENRQHAKAALSALNIFAETLIFLARMKHTGMLRGGPSTPMLVSSPSLNPVYSPPPSVRVAVFEELLPRLLHCCYSSTWQAQMGGVMGLGALVGKVSVDTLCIFQVRVVRGLLFVLKRLPVHANKEQEETNHVLTQVLRVVNNADEANSEPRRQSFQGVVEFLAQELFNPNASMVVRKNVQACLSLLASRTGSEVSELLEPLYLPLLQPLISRPLRSKNIEQQVGTVTALNFCLALRPPLLKLSPELVNFLQEALQIAEADETIWVTRMMNAKVVLTWNKLRTACIELLCTAMAWGDLKAQNHTELRAKIISMFFKSLTCRTTEIVNVAKEGLRQVVQQQRMPKDLLQSSLRPILVNLANTKSLSMPLLQGLARLLELLSNWFNVTLGAKLLDHLKKWLEPEKLVQTQKSWKAGDEPKIAAAMIELFHLLPPAASKFLDDLVTLVIDLERALPEDQFYSEINSPYRAPLAKFLNRYVLEAVDYFLARLSHPKYFRRFMYIICSDTGDLRDALARSPQKILASAFSQFYSQSEASAAQLSSVKDEALTGAVSESITVQSSSNMVTTSESYFNGLELVSALVKLMPEWLRNNRVVFDTLLLAWKSPARLARLQNEQDLSLPQVMESKRLIKCFLNYLRHDRTEVGALFDMLSVFLYRSRIDYSFLKEFYVIEVAEGYSPNLKKTILNHFLNIFQSKQYGQDHLVVTMQILILPMLAHSFQNGQSWEVVDPTIIKTIVEKLLDPPEEVSAEYDEPLRIELLQLATLLLKYLQTDLVHHRKELIKFGWNHLKREDNSSKQWAFVNVCHFLEAYQAPEKIILQVFIALLRTCQPENKLLVKQALDILMPALPRRLPPEKNDSRMPIWIRYTKKVLVEEGHSIPNMIHIFQLIVRHADLFYSCRAHFVPQMVNSLSRLGLPYNTTAENRRLAIELAGLVVAWERQRQSEMKVAQESESQNQLGDMLNPSVIGGDPKRSSDVPSFADDLSKRVKVEPGLQPLCVMSPGGASIPNIETPGSSGLPDEEYKPNAAMEEMIITFLIRVSLVIEPKDKESSSMYKQALDLLTQALEVWPNANVKFNYLEKLLGNLSPTPQSKDPASALAQGLDVMNKVLEKQPRLFIRNNINHISQILEPCFGNKMLDAGKSLCSLLKMVFSAFPLEAATTPQDIKLLHQRVQELIHKNLAAVTTQQIALELNNAHSIISFSLFVLNALAEVQKNFIDPFIGLLFRVLQRLARDMGSSAGSHIRQGQRPELDSSVNSRSTIDSTVISNMKTVLKLISERVMSSSDHRKSMGQILQALLSEKGTDSSILLCMLDMIKTWIEEDCRLASSTGSVSSLNPKEIITYLHKLSLVDRKSFPPAAQEEWDAKYLQLLYSLCADSTKYPLSFRQEFFHKIERQYMLGLRAKDPEMRKRFFKLYHDTVGKTLFSRLQFIIQLQDWEAVSDVFWLKQGLDLVLAILVENEPITLAANSARVPTLMIAGPVPDRITMPQQVPDAQESMDGTTLSFDSLAARHAQFLNDANKLVVADIMAPLKELAFADPNVAYHLWVLVFPIVWVTLHKEEQVALAKPIIALLSKDYHKRQQGCRPNVAQALLEGLHLSHPQPRMPSELIKYIGKTCNVWYIAIALLESHIVHMNEAKCSESLAELYRLLNEDDMRCGLWKRKSITAETRAGLSLAQHGYWQQAQNLFYQAMIKATQGTYNNTVPKAEMCLWEEQWLSCASHLGQWEVLA

SEQ ID NO: 226957 - protein, 163 aa, Zea Mays
MSRMVASQPTKDAESSSVVNNIGLRAESREQPQVGRIAHTCSRDRPDQMPSSSSASGVGLGRRRPPIAAGGPRRSDSRWWWARLMEKNYSDAESYRARRPEERLINDYLLLESAARKVATGLAYLLLTWSTVVLLGGFVSALKLIDFWCLAAISTSFAVKFFS

SEQ ID NO: 226958 - protein, 248 aa, Zea Mays
MAGLERPRRRPPPDPVAVLRGHRAAVNDACFHPSLPLLFSGQGRDGTCKCWAIEEAGLSRKPLLTIKTSTYHFCKMSLVKSSFTHATESGSSSSASDVEPQIVPTENAECHGVNPTIGPQEHDQCTTSNGHNMLAIAGQESSQVELWDITSARKIVTLPQTCSANATDHPTKKKGLCMAVQAFIPHESAGYVNILSSYEDGSTLWWDVRKPGLPLSSVKYHSESGVQLYPLLLMDFAMVESQEVLMIK

SEQ ID NO: 226959 - protein, 72 aa, Zea Mays
MTSSIVAAASTIEVPKIVRRIVSLEKNLNEVKDKVGNNREGMGSCICLVCGCVNVTLFLLLAIVLLVVVVLK

SEQ ID NO: 226960 - protein, 430 aa, Zea Mays
MASSLLAGRGGGHHHNWGETRAPLEPIPPNPSPSQPHPRADGSKSKPRAAAGYVKFRPASLGHREARALRDRLAVELGQVRALLSRIDTWQQQGPPPRAVLRGAMRKRCGQILSRLRKDKRSVWFNAPVEVERLGLHDYHAVIKRPMDLGTVKEGLAAGRYASHDDFAADVRLTFTNALRYNPVGHEVHTFAGALLAYFERMYKEALVCLEEERKRLEPPRPVAAELPPPPAVEPVEAKAKTRAGNVRMRKPKAREPNKREMSLEEKNMLRLGLVSLPEEKMHNVLQIVRKRNNNPEMLGDEIELDIDEMDVETQWELDRFVTNFNKALKKSQRAAMLNGGVADVTSTAVAEDDTAPVGDVPTLVGNDDAESEEPVKSTTVAEQVDEYVDIGDEMPAATYQSMEIEKDAEGSLARTFFQIQNKASSCSFA

SEQ ID NO: 226961 - protein, 288 aa, Zea Mays
MKFFSGICAVWRVGLPLTQIQFHYRAGIRRCCFQVAMASWVLEIVRHRNRVEVTVSSGQTFVADAAVVTVPLGVLKVKTIRFEPRLPEWKEEAIRELTVGVENKIVLHFGQVFWPNVEFLGVVSSSTYGCSYFLNLHKATGHPVLVYMPAGRLARDIEKMSDEAAAQFAFSQLKKILPNAAEPMNYLVSHWGSDENTLGSYTFDGVNKPRDLYEKLRIPVDNLFFAGEATSVKYTGTVHGAFSTGVMAAEECKMRVLERFRELDMLEMCHPAMGDESPVSVPLLISRL

SEQ ID NO: 226962 - protein, 190 aa, Zea Mays
MNDETVYQLCKQAVSQARAGADVVSPSDMMDGRIGALRSALDAEGFHDVSIMSYTAKYASSFYGPFREALDSNPRFGDKKTYQMNPANYREALIETAADEAEGADILLVKPGLPYLDIIRLLRDHSALPIAAYQVSGEYSMIKAGGALGMVDEQKVMMESLMCLRRAGADVILTYFARHAAAVLCGMGPK

SEQ ID NO: 226963 - protein, 149 aa, Zea Mays
MDPSDSNSTAEAAVPSVNSAPAVTSGGPFKLPNGVGKPATPLADLLDLSSDDAPVTTSAPTTAPNDFLQDLLGIGLTDSSPIGGAPSTSTDILMDLLSIGSSSIQNGPPTANFSLPGIETKSVAVTPQVVDLLDGLSSGTSLPVCLFAR

SEQ ID NO: 226964 - protein, 517 aa, Zea Mays
MPPWWRSHLMWRVFFTSAVVAVVVRSAMNWCNSGKCGHFGAGGFIIWDISGGQEDYSYQELFPMAIIGVIGGLLGALFNQLTLYITKWRRTCLHKKGKRVQIFEACLISLVTSTISFVLPLLRKCSPCPKLETNSGIECPHPPGTDGNFVNFYCSQDREYNDLATIFFNTQDDAIRNLFSAKTFHEYSAQSLITFLVMFYFLAVVTFGTAVPAGQFVPGIMIGSTYGRLVGMFVVKFYKKLNIEEGTYALLGAASFLGGSMRMTVSLCVIMVEITNNLKLLPLIMLVLLVSKAVGDFFNEGLYEEQARLRGIPLLDSRPKQVMRNMNARDACKNQKVVCLPRVSRVVDIISVLRTNKHNGFPVVDRGQNGESLVIGLILRSHLLVLLQAKVDFQNSAFPCGPGVLNRHNFSDFVKPASSKGKSIDDIHLTEDELGLYLDLAPFLNPSPYIVPEDMSLAKVYNLFRQLGLRHIFVVPRPSRVVGLITRKDLLLEEDNNNVMPELQSTSGLAERQNARG

SEQ ID NO: 226965 - protein, 571 aa, Zea Mays
MKACEQSNPNSVDGHLFILSKVKICLLPLGFAAGTMRHWFDFGNKIICTILDLLKDSLKTLLDAVDDGNLDRYCIRITEYSKNIVLSGCPQVTTAFLYISVLPNDLSVSLKRRIVSSYTQVDHQTFVLYEELEKATKTLSFKNVHMVDISKCPNVHFGAAIDWLKLGFPELRVFRVSHCLSFQFDDLLYLLMRCPWIDEIDMTIDTSTVTPRHSVISSSSEVLSKAKPNQKRYGIHCSAYDRQPNSVFLNISRLTLEGRNDIDDMDLLEISVLKNSLCYINIRNCFLLTDDGISNLLMKCTKIHSMVLSYTSFGNRSIQMLCAANPSGHNSGHAHVMASYMQELHLDGCKGIDSVALSQLVSIISITKFLSLRETSLTDGALCKFVGSSLEYLDVSETVISMVSLAPVIQRNCKLNCLKTAGCCSLLLQCANVEHINGNKYGDFLQELGTTYCLEDVEMGWGFCPIRIEDLVPSFSKVRKMKIGLGTSLAENVLCALPMICPFLESLILRFQVISDRVVRRLLESATNLQRIAIWLNFHFLVANFLTPALKTLSHLGGQTWHFYTLRNVVK

SEQ ID NO: 226966 - protein, 702 aa, Zea Mays
MKACEQSNPNSVDGHLFILSKQVKICLLPLGFAAGTMRHWFDFGNKIICTILDLLKDSLKTLLDAVDDGNLDRYCIRITEYSKNIVLSGCPQVTTAFLYISVLPNDLSVSLKRRIVSSYTQVDHQTFVLYEELEKATKTLSFKNVHMVDISKCPNVHFGAAIDWLKLGFPELRVFRVSHCLSFQFDDLLYLLMRCPWIDEIDMTIDTSTVTPRHSVISSSSEVLSKAKPNQKRYGIHCSAYDRQPNSVFLNISRLTLEGRNDIDDMDLLEISVLKNSLCYINIRNCFLLTDDGISNLLMKCTKIHSMVLSYTSFGNRSIQMLCAANPSGHNSGHAHVMASYMQELHLDGCKGIDSVALSQLVSIISITKFLSLRETSLTDGALCKFVGSSLEYLDVSETVISMVSLAPVIQRNCKLNCLKTAGCCSLLLQCANVEHINGNKYGDFLQELGTTYCLEDVEMGWGFCPIRIEDLVPSFSKVRKMKIGLGTSLAENVLCALPMICPFLESLILRFQVISDRVVRRLLESATNLQVLCLHYCLGSLTSFSFQTKAPALRVLRLHWVTSWLTNDDLTILTENCNLAELSLSGCKLLDSSSQDIISSGWPNLALLHLEECGKVTVEGVSSFFNCKALEDVLLRHTVSMKNIVAGSWYIVLVNLKTQRRTILNDVTWLQLKQNFTMLLQNCSPSVHVISRTSTGVTFLR

SEQ ID NO: 226967 - protein, 609 aa, Zea Mays
MAFPADALVLEITDTSSSATAAAARAPSSPSPPPLSISDLALIESSSYFRALLGGSFSESGREHVRVGCNLEAAVQVLRYLFEPSESFNITHNNFLPLLEGALFLAVESLLVECQRWFGTIASQTSAMSVPLDFIIEVWYFAEEHGVTFVQDICQKFLAQNFAHAISGRSFNKIPYDLLCSAIKCPHLTVDSEKQLCEAILYWVSENMKACEQSNPNSVDGHLFILSKVKICLLPLGFAAGTMRHWFDFGNKIICTILDLLKDSLKTLLDAVDDGNLDRYCIRITEYSKNIVLSGCPQVTTAFLYISVLPNDLSVSLKRRIVSSYTQVDHQTFVLYEELEKATKTLSFKNVHMVDISKCPNVHFGAAIDWLKLGFPELRVFRVSHCLSFQFDDLLYLLMRCPWIDEIDMTIDTSTVTPRHSVISSSSEVLSKAKPNQKRYGIHCSAYDRQPNSVFLNISRLTLEGRNDIDDMDLLEISVLKNSLCYINIRNCFLLTDDGISNLLMKCTKIHSMVLSYTSFGNRSIQMLCAANPSGHNSGHAHVMASYMQELHLDGCKGIDSVALSQLVSIISITKFLSLRETSLTDGALCKFVGSSLEYLDVSETVVRY

SEQ ID NO: 226968 - protein, 1143 aa, Zea Mays
MTFLQRYHRCILGYICNIIEAGCFVRFLGHLTGFSPKDKAVDRWIEKLSDAFYVGQSVRSHILSVNAETARVKLALQQSMCSSMDSSFIQGYFLLDQKIAALKYSSNDWARHFGIGSLVEAEVGAIEEYGIILNFKDHLDTVGLIEHHQLGGSSVEVGSSVKGLVLDLSDGVVNLSVKPELIDSVRIVGKKKKRQRAVVADLELHEEVNAVVEIIKDSYMVLSIPEYNYAIGFSPLMDYNSQLLPHHHYDNGQRITVVVGNIPSSDSSGRLILLPKASAQYSSLSDSKRAKKKSGYKIGSLVEAEIIDIKPLELLLKFGGNLHGRIHITEILEEDSAEHPFSELRIGQKLTARIVSEAEPSGKSGKKFKWELSIRPCIVNGEFAQKEQNHTTNGIVRAYVVKVDKEWVWLTVSRNVMAHLFLLDSSSEPSELKEFQQRFSVGQAVKGRVISVNQEKRLLRLKALDNQCTQPNIDETQEPKSSVFGQTKQGDIIGGRVQKILPGVGGLVVQIGPHLHGRVHYTEIVDSWVSEPLSGFHEGQFVKCKVLSVSRSSEGSLRVDLSLRSSNLIRDSNNSRLDDLETCTSRIEKIKDLLPGTEIKGYVKNVNSKGCFIMLSRMVDARITLSNLSDEYVENPQKDFPVGMLVHGRILSTDPSSGRVEASLRKTTGSKLEKLDDISYSDLHVGDIVDGQVKRVESFGLFVTIRRSELVGLCHVSELSDEPVVDINSCYKAGDMVKAKILKIDETRHRVSLGMKKSYFDSDLTADTNDDESALMDISVAPQMVEYHNRNLVHRKAEPRASVLPLQVSLDESEGSDLEDNISNTCLEIANGTEANAKKSDKQLKKEARKQRELEISAMEERALQEDIPQTPDDFEKLVRSSPNSSFIWIKYMATLLDLADVEKARAVAERALKTIIPREEEEKLNVWVAYFNLENEYGSPREDAVKKVFQRALQYCDPKKLHLALLAMYERTEQYELADELLDRMTKRFKTSCKIWLCRIQFALKQGKDVEYIKAIVNRALLSLPHRKRIKFLSQTAILEFKCGVPEEGRSRFELILREYPKRTDLWSVYLDQEIRLGDVEVIRALFERVTCLTLPPKKMQFLFKKYLNFEKSLGKDNERIQLVQQKAIEYVQSSLPSQDNS

SEQ ID NO: 226969 - protein, 1811 aa, Zea Mays
MAPPRVTRKKGKGAGGKTDLRPDRKQFKRHHKEDAAAEQGDGNGERQQSAAPGSAALLAAASDEADFPRGGHSLLSKDEMAEARAEAEQDFEREAKKGKGKRKRSGGESSGFGVDDDLGILFGGATTGKLPRFANRITVKVGDSEIKITAAEASRARSKIEWSSSGIEGLFWTVSVARIWYKLCTSMHIKIKNISPNMKLWGVVIEVNQKDIVLSLPGGIRGFVRSEDVCDIALQENRKDSGNNLCAEVVHVGQLVPCIVLRVDDDSREGKVNKRVWLSLRLSLLYKGLALDGLQEGMVLTAQVKSIEDHGYILHFGVSSFSGFMQKDDKEDVKTERRQLMQCVVKAIDKTRAIVHLSSDEDLLSKSTIKDLKGLSIDHLIPGMMVNARVHSFLENGLMLSFLTYFSGTVDIFNLLNSFPSGNWKDDYSKNKKVNARILFVDPSTRAVGLTLNKHLLHLEVPPINLKAGDIYDKSKVLRVDKKAGLFLEIPSPTPSPGFISIRDVSDKDAKNLEKFKEGSSLRVRILGVRNLEGVAIGTIKDSAFEGSVFTHDDVKPGMLVRAKVATVEPFGAIVQFSSGVKALCPLPHMSELEHVVKPPKKFKVGAELLFRVLGCKSKRVTVTYKKSLVKSKLDVLSSYADAKIGLVTHGWITHIEKHGCFVKFYNGVQGFVSRSDLGLEAGTEAENVYHVGQVVKCRIINVIPASRKLNVSFVISHNRIAPIDTPKLGSIVSGVVERLTPAAVVVSVNGFSKGTILNEHLADHHGQAAQLKNVLKPGHEFNQLLVLDTEGQNLVLSAKHSLINCANDIPSEISQMHPGVVVHGYICNIIEAGCFVRFLGHLTGFSPKDKAVDRWIEKLSDAFYVGQSVRSHILSVNAETARVKLALQQSMCSSMDSSFIQGYFLLDQKIAALKYSSNDWARHFGIGSLVEAEVGAIEEYGIILNFKDHLDTVGLIEHHQLGGSSVEVGSSVKGLVLDLSDGVVNLSVKPELIDSVRIVGKKKKRQRAVVADLELHEEVNAVVEIIKDSYMVLSIPEYNYAIGFSPLMDYNSQLLPHHHYDNGQRITVVVGNIPSSDSSGRLILLPKASAQYSSLSDSKRAKKKSGYKIGSLVEAEIIDIKPLELLLKFGGNLHGRIHITEILEEDSAEHPFSELRIGQKLTARIVSEAEPSGKSGKKFKWELSIRPCIVNGEFAQKEQNHTTNGIVRAYVVKVDKEWVWLTVSRNVMAHLFLLDSSSEPSELKEFQQRFSVGQAVKGRVISVNQEKRLLRLKALDNQCTQPNIDETQEPKSSVFGQTKQGDIIGGRVQKILPGVGGLVVQIGPHLHGRVHYTEIVDSWVSEPLSGFHEGQFVKCKVLSVSRSSEGSLRVDLSLRSSNLIRDSNNSRLDDLETCTSRIEKIKDLLPGTEIKGYVKNVNSKGCFIMLSRMVDARITLSNLSDEYVENPQKDFPVGMLVHGRILSTDPSSGRVEASLRKTTGSKLEKLDDISYSDLHVGDIVDGQVKRVESFGLFVTIRRSELVGLCHVSELSDEPVVDINSCYKAGDMVKAKILKIDETRHRVSLGMKKSYFDSDLTADTNDDESALMDISVAPQMVEYHNRNLVHRKAEPRASVLPLQVSLDESEGSDLEDNISNTCLEIANGTEANAKKSDKQLKKEARKQRELEISAMEERALQEDIPQTPDDFEKLVRSSPNSSFIWIKYMATLLDLADVEKARAVAERALKTIIPREEEEKLNVWVAYFNLENEYGSPREDAVKKVFQRALQYCDPKKLHLALLAMYERTEQYELADELLDRMTKRFKTSCKILFV

SEQ ID NO: 226970 - protein, 1902 aa, Zea Mays
MAPPRVTRKKGKGAGGKTDLRPDRKQFKRHHKEDAAAEQGDGNGERQQSAAPGSAALLAAASDEADFPRGGHSLLSKDEMAEARAEAEQDFEREAKKGKGKRKRSGGESSGFGVDDDLGILFGGATTGKLPRFANRITVKNISPNMKLWGVVIEVNQKDIVLSLPGGIRGFVRSEDVCDIALQENRKDSGNNLCAEVVHVGQLVPCIVLRVDDDSREGKVNKRVWLSLRLSLLYKGLALDGLQEGMVLTAQVKSIEDHGYILHFGVSSFSGFMQKDDKDVKTERRQLMQCVVKAIDKTRAIVHLSSDEDLLSKSTIKDLKGLSIDHLIPGMMVNARVHSFLENGLMLSFLTYFSGTVDIFNLLNSFPSGNWKDDYSKNKKVNARILFVDPSTRAVGLTLNKHLLHLEVPPINLKAGDIYDKSKVLRVDKKAGLFLEIPSPTPSPGFISIRDVSDKDAKNLEKFKEGSSLRVRILGVRNLEGVAIGTIKDSAFEGSVFTHDDVKPGMLVRAKVATVEPFGAIVQFSSGVKALCPLPHMSELEHVVKPPKKFKVGAELLFRVLGCKSKRVTVTYKKSLVKSKLDVLSSYADAKIGLVTHGWITHIEKHGCFVKFYNGVQGFVSRSDLGLEAGTEAENVYHVGQVVKCRIINVIPASRKLNVSFVISHNRIAPIDTPKLGSIVSGVVERLTPAAVVVSVNGFSKGTILNEHLADHHGQAAQLKNVLKPGHEFNQLLVLDTEGQNLVLSAKHSLINCANDIPSEISQMHPGVVVHGYICNIIEAGCFVRFLGHLTGFSPKDKAVDRWIEKLSDAFYVGQSVRSHILSVNAETARVKLALQQSMCSSMDSSFIQGYFLLDQKIAALKYSSNDWARHFGIGSLVEAEVGAIEEYGIILNFKDHLDTVGLIEHHQLGGSSVEVGSSVKGLVLDLSDGVVNLSVKPELIDSVRIVGKKKKRQRAVVADLELHEEVNAVVEIIKDSYMVLSIPEYNYAIGFSPLMDYNSQLLPHHHYDNGQRITVVVGNIPSSDSSGRLILLPKASAQYSSLSDSKRAKKKSGYKIGSLVEAEIIDIKPLELLLKFGGNLHGRIHITEILEEDSAEHPFSELRIGQKLTARIVSEAEPSGKSGKKFKWELSIRPCIVNGEFAQKEQNHTTNGIVRAYVVKVDKEWVWLTVSRNVMAHLFLLDSSSEPSELKEFQQRFSVGQAVKGRVISVNQEKRLLRLKALDNQCTQPNIDETQEPKSSVFGQTKQGDIIGGRVQKILPGVGGLVVQIGPHLHGRVHYTEIVDSWVSEPLSGFHEGQFVKCKVLSVSRSSEGSLRVDLSLRSSNLIRDSNNSRLDDLETCTSRIEKIKDLLPGTEIKGYVKNVNSKGCFIMLSRMVDARITLSNLSDEYVENPQKDFPVGMLVHGRILSTDPSSGRVEASLRKTTGSKLEKLDDISYSDLHVGDIVDGQVKRVESFGLFVTIRRSELVGLCHVSELSDEPVVDINSCYKAGDMVKAKILKIDETRHRVSLGMKKSYFDSDLTADTNDDESALMDISVAPQMVEYHNRNLVHRKAEPRASVLPLQVSLDESEGSDLEDNISNTCLEIANGTEANAKKSDKQLKKEARKQRELEISAMEERALQEDIPQTPDDFEKLVRSSPNSSFIWIKYMATLLDLADVEKARAVAERALKTIIPREEEEKLNVWVAYFNLENEYGSPREDAVKKVFQRALQYCDPKKLHLALLAMYERTEQYELADELLDRMTKRFKTSCKIWLCRIQFALKQGKDVEYIKAIVNRALLSLPHRKRIKFLSQTAILEFKCGVPEEGRSRFELILREYPKRTDLWSVYLDQEIRLGDVEVIRALFERVTCLTLPPKKMQFLFKKYLNFEKSLGKDNERIQLVQQKAIEYVQSSLPSQDNS

SEQ ID NO: 226971 - protein, 1397 aa, Zea Mays
MLVRAKVATVEPFGAIVQFSSGVKALCPLPHMSELEHVVKPPKKFKVGAELLFRVLGCKSKRVTVTYKKSLVKSKLDVLSSYADAKIGLVTHGWITHIEKHGCFVKFYNGVQGFVSRSDLGLEAGTEAENVYHVGQVVKCRIINVIPASRKLNVSFVISHNRIAPIDTPKLGSIVSGVVERLTPAAVVVSVNGFSKGTILNEHLADHHGQAAQLKNVLKPGHEFNQLLVLDTEGQNLVLSAKHSLINCANDIPSEISQMHPGVVVHGYICNIIEAGCFVRFLGHLTGFSPKDKAVDRWIEKLSDAFYVGQSVRSHILSVNAETARVKLALQQSMCSSMDSSFIQGYFLLDQKIAALKYSSNDWARHFGIGSLVEAEVGAIEEYGIILNFKDHLDTVGLIEHHQLGGSSVEVGSSVKGLVLDLSDGVVNLSVKPELIDSVRIVGKKKKRQRAVVADLELHEEVNAVVEIIKDSYMVLSIPEYNYAIGFSPLMDYNSQLLPHHHYDNGQRITVVVGNIPSSDSSGRLILLPKASAQYSSLSDSKRAKKKSGYKIGSLVEAEIIDIKPLELLLKFGGNLHGRIHITEILEEDSAEHPFSELRIGQKLTARIVSEAEPSGKSGKKFKWELSIRPCIVNGEFAQKEQNHTTNGIVRAYVVKVDKEWVWLTVSRNVMAHLFLLDSSSEPSELKEFQQRFSVGQAVKGRVISVNQEKRLLRLKALDNQCTQPNIDETQEPKSSVFGQTKQGDIIGGRVQKILPGVGGLVVQIGPHLHGRVHYTEIVDSWVSEPLSGFHEGQFVKCKVLSVSRSSEGSLRVDLSLRSSNLIRDSNNSRLDDLETCTSRIEKIKDLLPGTEIKGYVKNVNSKGCFIMLSRMVDARITLSNLSDEYVENPQKDFPVGMLVHGRILSTDPSSGRVEASLRKTTGSKLEKLDDISYSDLHVGDIVDGQVKRVESFGLFVTIRRSELVGLCHVSELSDEPVVDINSCYKAGDMVKAKILKIDETRHRVSLGMKKSYFDSDLTADTNDDESALMDISVAPQMVEYHNRNLVHRKAEPRASVLPLQVSLDESEGSDLEDNISNTCLEIANGTEANAKKSDKQLKKEARKQRELEISAMEERALQEDIPQTPDDFEKLVRSSPNSSFIWIKYMATLLDLADVEKARAVAERALKTIIPREEEEKLNVWVAYFNLENEYGSPREDAVKKVFQRALQYCDPKKLHLALLAMYERTEQYELADELLDRMTKRFKTSCKIWLCRIQFALKQGKDVEYIKAIVNRALLSLPHRKRIKFLSQTAILEFKCGVPEEGRSRFELILREYPKRTDLWSVYLDQEIRLGDVEVIRALFERVTCLTLPPKKMQFLFKKYLNFEKSLGKDNERIQLVQQKAIEYVQSSLPSQDNS

SEQ ID NO: 226972 - protein, 69 aa, Zea Mays
MGRVNGSLNLSRAIVCERVLDRCLAPSTAGEGCDNMTMILVQFKKPFAQVKDASGAEQLTGDAGCSETQ

SEQ ID NO: 226973 - protein, 100 aa, Zea Mays
MGISRGINALAAALCMNVYVVGLNKVNKPTLPLASGEFSVPTPVLLVVAFLVMVSGHGLLASTLWQRAQQFDIENKDCITQFYMFIWKLFYAEYFLIPFV

SEQ ID NO: 226974 - protein, 283 aa, Zea Mays
MLTKIKMPLPDMMSAALALDDSVLDADQIENLIKFCPTKEEMELLKNYSGDKEALGKCEHFFLELMKVPRVESKLKIFAFKIQFQSQIRDVRKNLQTVSSACEELRSSEKLKVIMKNILLIGNTLNQGTPRGQAVGFRLDSLLKLIETRATSGRMTLMHFLCKSLAEKSPEVMDFHEDLVHLEASSKLQLKALAEEQLAVVKGLEKVEQELTASESDGPVSDVFRKTLKEFIDCSSADVCSLSAFYSEVGKSADALALYFGEDPAKFPFEQGNIHAYRPMEMV

SEQ ID NO: 226975 - protein, 2052 aa, Zea Mays
MDQYRYKNYLDNIILQLREQFADSSLMVLNFRDEGKSLISGIFSKYNITAKDYPCKYLGCPLLPLDIILHFLRLSERWLMLEGQQNILLMHCEKDGWPVLAFMLAGLLLYRKQYNGEQRTLDMVYKQAPKELLQMLTTLNPQPSHLRYLGYICRMDDGIGWPTQPIPFTLDCVILREIPNFDGVGGCRPIVRVYGQDIPTTDRSHSVISPPSKAKKHIRRYRQADNAPVKLNVGSCVQGDVVLECLHVDDGQGNERLMFRVMFNTFFIQSHILPLNFEDIDVPWDADHQFTKNFKAEVLFSEFDAESDASTEVAPDYDYDYDYDNDMDVASADEFFEAEEIFSNAESQDGNKDADTLSMVSTDYIRTPSAECWKNSPFSNFDLNIDIDGSQDNKADNLGLLLETVNDGKTCTSTEANILLNNETAVVKSTFTATIACTSTEANILLNDETAVVKSTFTATIDGDTDSGISSSTYKEDGCMFEKGSSKQDIRMGSNQDLSQIDNVLVKEVIILETNSTDDIQMIKEVIISEVTTPKQVVEGNMMETELDEAVHSSESTALGEDEDTKRPNTFFKKDEGQSARDEYAAYDNGIVIEREESRNKEKFTITGTDSLVAEPKDLPHLDSSNTSLELSSANENIDQLRACSSNVTAERRAGIDTSFSSSRSQSSNISCANILPEESNLIINHASTSVNANTDTTDSSRLVLKKKPFLPLATSSLFSPSSPRRNLLRAASTDLSFFSPSQTESKQNSVTSTSGRGDSDTSSVLPPFQLYTSLGSSSKMSLVHPTLRPIRTISSLPSLSFGTFIEMSMASSRSPKHQEHVRSPSIPQDQHLHPPMTEENDLHSGSLTLPASNQYGPQTPHPPPLPPPHDSCTQSYSSTIIYEPEQIRADGSCSYSPDYRQSVLNLGDSSLTSLSNSSIAATECPLGASDFVDEEVTSRPNIVTAMDVPFTNEDTNSLLHMTCSSPPKTLQRAEPPTLPPPPLPLVPPPSQLPLPTICSDSGSVPLVYSNPSSDCPYKEPTMLPEHKSDVPATSLEGHEASEVQFLQSDTAVELSPSEHSEYKVQHVVGSAEDTISKQVNCEQPLDQTTLSIHLRPFEVEISQGETINGVLASIIDDKEHGGIPILQLPQKLPHSGEHMKSPPPPPPPPQPPPCHATVIPSLCLSSKPPSPTEHYENPPSSPPPFSRESCVVLPPLPAPLLNHPSLPGKHINLYPPPPPPPPTLHHIAPASPCSYQPSFYADIATQPTFSEDIVIVPPPHSKGVNIIPLPPPPPRTSETLSQPLDGGQSTGPASLLEVTKENPPPPLLPPEGQMGSPLSTLCGEIVNIPIPPPSLPGGHGEVPLSTPPRGCGAIPPPPPFTKGIGGITLPIGFHSGDLSFLQSTRESKGPSCLPPPPPPPPPPPPPPLSSNGHIGDLPPPPTSVFVEASIPLPPQTGCGGDPPPPPPTGGHVGPPPPPPPLGECAWDLQPPKACVRAPPPPPPPGGYAEVLMPPPPPRGYVGAPAPPPPPGGYAGAPPPPPPPGGYAGAPPPPPPPGGYAGAPPPPPPPGGYAGAPPPPPPPGGYAGAPPPPPSYGGIGGVPPPPPPFGGLGGTPPPPPPAGFRGGAPSPPPPPGGHGGPPPPPPRGHGSGPPPPPGAPSPPMPPGMSGGPPPPPGGRGMPTPPGGRGHGLARTLGPTLQSAMRKSSLKPLHWVKVTRAMQGSLWAELQKQVEANSHAEFDVNELESLFTIAPKAKAGSKSEGRGKSLGTKSDKVQLIDLRRANNTEIMLTKIKMPLPDMMSAALALDDSVLDADQIENLIKFCPTKEEMELLKNYSGDKEALGKCEHFFLELMKVPRVESKLKIFAFKIQFQSQIRDVRKNLQTVSSACEELRSSEKLKVIMKNILLIGNTLNQGTPRGQAVGFRLDSLLKLIETRATSGRMTLMHFLCKSLAEKSPEVMDFHEDLVHLEASSKLQLKALAEEQLAVVKGLEKVEQELTASESDGPVSDVFRKTLKEFIDCSSADVCSLSAFYSEVGKSADALALYFGEDPAKFPFEQGNIHAYRPMEMV

SEQ ID NO: 226976 - protein, 120 aa, Zea Mays
MVMVSGGGGNAWAKEMTLRRRIASIFNKTQEHFPTLKDYNDYLEEVEDMTFNLIEGIDVEEIEAKIARYQQENAEQIYLSRAKRAEDLAAALKASRMNPVKAEANDTATNSDHYWRTKHI

SEQ ID NO: 226977 - protein, 284 aa, Zea Mays
MDDLTKPLDEESIKVTMDDFVNALHEITPAFGASTDDLERCRLRGIVDCGKAHKHIYQRAMLLVEQVKVSKGSPLVTCLLEGPAGSGKTAMAASVGIDSDFAYVKIISAETMIGFSESSKCAQICKVFEDAYKSQFSMIILDDIERLLEYVAIGPRFSNLISQTLLVLLKRVPPKGKNLLVVGTTSEVGFLESVGMCDVFSVTYHVPKLKKEDAKKVLHHLDVFDDGDLDAAAEALDDMPIKKLYTLVEMAAQGPTGGSAEAIYAGEKIDINHFFSILSDIIRY

SEQ ID NO: 226978 - protein, 60 aa, Zea Mays
MMMIICIFMVTPLLFEHVVVYCVVAKEYVNYQSVEIERDSPARSSSGLGSGSSSSSVTRG

SEQ ID NO: 226979 - protein, 72 aa, Zea Mays
MDWIIHLDTDELIHQAGAREYSLRRLLLDVPDNVDMVIFPNYESSIDRMTLRILLLRNVSSWSILQHTMYSQ

SEQ ID NO: 226980 - protein, 436 aa, Zea Mays
MSSWSGRRRTCRHLRAARLSRRFGYAFLNQDMLTPGKNNATAGYLVVDANGGLNQMRMGISDMVAVAKIMNASLVIPTLDHQSFWTDPSDFRDIFDIDHFKESLKEDIVIVDSLPLDYRRAKPYVRAPTSWSRASFYRDCAKVLRKFKVVRFTHTDSRIVNNGLAPSLQKLRCRANYRALQYRKEIQGLGSTLVDRLRNGSAEHYIALHLRYEKDMLAFTGCNHNLTLREAAELTGMRFKVRRWKEKDIDSEEKRLQGGCPMTPREAAVFLKAMGYPSATNIYIVAGEIYGEHSLDALKAEYPNTYTHYSLATVDELEPLELYQNRLAAVDYIVALQSDVFVYTYDGNMARAVQGHRRFEGFRKTINPDRLKFVELIDKLDEGSMSWSEFQIVVRKHHENRLGGPYERLRGASPRQEEYFYSNPVPGCLCKRVQSR

SEQ ID NO: 226981 - protein, 601 aa, Zea Mays
MAAAATTSTTTATIPPGPHRRRQPNDIERDDDTCCGGAGVDRRFPHACGAQHDDDAERGLHHAAAATPCGGTRALLLARRRRAWATAAAAAAGAPPRTAWAWTRGVVLCLLALAAVVVGFQLGSHRGGGSTDAGAGGDGGVRLLHLHRVETADADVVMEWTEENLSALARRSPQPPVPEIWTKPDSEGYSQCIERPKNHRRKNNATAGYLVVDANGGLNQMRMGISDMVAVAKIMNASLVIPTLDHQSFWTDPSDFRDIFDIDHFKESLKEDIVIVDSLPLDYRRAKPYVRAPTSWSRASFYRDCAKVLRKFKVVRFTHTDSRIVNNGLAPSLQKLRCRANYRALQYRKEIQGLGSTLVDRLRNGSAEHYIALHLRYEKDMLAFTGCNHNLTLREAAELTGMRFKVRRWKEKDIDSEEKRLQGGCPMTPREAAVFLKAMGYPSATNIYIVAGEIYGEHSLDALKAEYPNTYTHYSLATVDELEPLELYQNRLAAVDYIVALQSDVFVYTYDGNMARAVQGHRRFEGFRKTINPDRLKFVELIDKLDEGSMSWSEFQIVVRKHHENRLGGPYERLRGASPRQEEYFYSNPVPGCLCKRVQSR

SEQ ID NO: 226982 - protein, 386 aa, Zea Mays
MEARPRLLLVAAVAVFVSVSAAAGAAVVINVKNYGAHGNGVNDDTKPLMAAWKAACGSAGAVTMVVAPGTYYIGPVQFHGPCKASTLTFQLQGTLKAATDLKRFGNDWIEFGWVNGLTVAGGVIDGQGAASWPFNKCPIRKDCKVLPTNTVVRDVTSVNPKFFHMALLSVKNVRMSGLRIRAPPNSPNTDGIHIERSSGVSIVDTHIGTGDDCISVGQGNDNVEVSRVQCGPGHGMSVGSLGRYSGEGDVTRVHVRDMTFTGTTNGVRIKTWENSPSRSNAAHMVFENMVMKDVQNPIIIDQKYCPYYNCEHKYVSGVTLKDIHFRNIKGTATTPVAVLLRCGVPCQGLVLQDVDLRYKGQGATSAKCENAKAKYVGYQFPKPCSP

SEQ ID NO: 226983 - protein, 189 aa, Zea Mays
MHDEAVVHYIDMIDQTTLGHRMIKKQFNKTPRAGWQIDPFGHSAVQAYLLGAEDDILMFDYNVEERVNDFVVVAIEQDGQVHALYSTPSIYTDAKHLSNVSWPVKYDEYFPYADSKNSYWTGYYTSRPTFKRYVRVLSGYYLAARQIEFLVGRRSSLGLFTTSLEDPMAIAQHHDAVSGTTNNTRQMTT

SEQ ID NO: 226984 - protein, 144 aa, Zea Mays
MHQGRRSVVEDHLIVSHGRLACSSLAQYVASGFSRLCDHQNIMGSKVGLLRNARRWCMHDEAVVHYIDMIDQTTLGHRMIKKQFNKTPRAGWQIDPFGHSAVQAYLLGAEDDILMFDYNVEERVNDFVVVAIEQVNFQYCCHRL

SEQ ID NO: 226985 - protein, 279 aa, Zea Mays
MESANEERKEERVNGGSIAGWCRCCWFENSGGKISWREAMRTPRKGEIIVRLWRLSMGGSTSARAQYVASGFSRLCDHQNIMGSKVGLLRNARRWCMHDEAVVHYIDMIDQTTLGHRMIKKQFNKTPRAGWQIDPFGHSAVQAYLLGAEYAESWFRNMDKLIYHVNKDGQVHALYSTPSIYTDAKHLSNVSWPVKYDEYFPYADSKNSYWTGYYTSRPTFKRYVRVLSGYYLAARQIEFLVGRRSSLGLFTTSLEDPMAIAQHHDAVSGTTNNTRQMTT

SEQ ID NO: 226986 - protein, 1054 aa, Zea Mays
MTTMSDDGDRTCPLCAEEMDITDQQLKPCKCGYDICVWCWHHIIDMAEKEETVGRCPACRTCYDKDRIVKMAATCDRTVAEKNAEKKHRTQKVKPKAAPSAAATSTVESKKHLASVRVIQRNLVYIIGLPAHLCNESVLECREYFGQYGKILKVSVSRPTGPPSQQASANSNISVYITYAKEEEAIRCIQAVHNFVLEGKVLRACFGTTKYCHAWLRNMTCGNPDCLYLHDVGSQEDSFTKDEIISAYTRTRVPQMASGVSQRRTGTVLPPPGDDFSYSAVVSAKHTFKNGTLNTTSQPRLSPPNSSSGRSTLPSAASWGQRDLNARTTATGATSSQSHTKPKSESQSNPFSSSSVFSCTKTPSSWNDDTSTAAKISEGQQLSEKESRTLQPYKPGISKETQALSSLESSLDIDFSTIPSAWNDDDIVVPDVMPKGSDENQVANKNGELTHPASKSLVLSKKDIKMNITSKTPSDFVSSPAISKSDVSTSDGDHSLTNITPKCLASNAVECQSSHTAVEKMLEDIGSKDTDMEKLSAQISSVTLGGNDEIQSMAGNQQPDVMPCTSVDVLMDQNFGRDLAHPNPDELLLPSENKDSIVSCQYSSDKRLDWSLEMQNCSVTPLNDRMDSALLTDKIHSRQLDGSEQSSYSSFVEFPSTVDTSLWNDTENNAALTIDNITSSQMQPGFSSTDNTYALLNGGQDGLGTVYTHDNVSVYTHGNVSGHPGMGSHHHRAMGSLRNNSIGSFDKTISVNKYERRIISDTLSEFNPWDDSYSTANNFARMLRESKNNDVHCIAPSWKSGTGIKESRFSFARQDNQGNLFDSSLRNCGTGTEQNFSLLPQNSRGNIYQNGLAFQSLENEFSNNNSPGVLDMATTEFAFSGTSMSKISAPPGFSAPTRVPPPGFSTAFPSQDSLNPTPVFPSGILCHGGSIPPPRFSSFSSGISTQEVSKPPTRPPSPFSSRFSSQDGLDPSSRFPFSSGFSSHDGSNQSYGSTNPGLFPASYFPRTSLISHHAFCGASQKIFSGVLFRVATVIIINLSLEGTQVTWSLMILLY

SEQ ID NO: 226987 - protein, 1038 aa, Zea Mays
MTTMSDDGDRTCPLCAEEMDITDQQLKPCKCGYDICVWCWHHIIDMAEKEETVGRCPACRTCYDKDRIVKMAATCDRTVAEKNAEKKHRTQKVKPKAAPSAAATSTVESKKHLASVRVIQRNLVYIIGLPAHLCNESVLECREYFGQYGKILKVSVSRPTGPPSQQASANSNISVYITYAKEEEAIRCIQAVHNFVLEGKVLRACFGTTKYCHAWLRNMTCGNPDCLYLHDVGSQEDSFTKDEIISAYTRTRVPQMASGVSQRRTGTVLPPPGDDFSYSAVVSAKHTFKNGTLNTTSQPRLSPPNSSSGRSTLPSAASWGQRDLNARTTATGATSSQSHTKPKSESQSNPFSSSSVFSCTKTPSSWNDDTSTAAKISEGQQLSEKESRTLQPYKPGISKETQALSSLESSLDIDFSTIPSAWNDDDIVVPDVMPKGSDENQVANKNGELTHPASKSLVLSKKDIKMNITSKTPSDFVSSPAISKSDVSTSDGDHSLTNITPKCLASNAVECQSSHTAVEKMLEDIGSKDTDMEKLSAQISSVTLGGNDEIQSMAGNQQPDVMPCTSVDVLMDQNFGRDLAHPNPDELLLPSENKDSIVSCQYSSDKRLDWSLEMQNCSVTPLNDRMDSALLTDKIHSRQLDGSEQSSYSSFVEFPSTVDTSLWNDTENNAALTIDNITSSQMQPGFSSTDNTYALLNGGQDGLGTVYTHDNVSVYTHGNVSGHPGMGSHHHRAMGSLRNNSIGSFDKTISVNKYERRIISDTLSEFNPWDDSYSTANNFARMLRESKNNDVHCIAPSWKSGTGIKESRFSFARQDNQGNLFDSSLRNCGTGTEQNFSLLPQNSRGNIYQNGLAFQSLENEFSNNNSPGVLDMATTGFSAPTRVPPPGFSTAFPSQDSLNPTPVFPSGILCHGGSIPPPRFSSFSSGISTQEVSKPPTRPPSPFSSRFSSQDGLDPSSRFPFSSGFSSHDGSNQSYGSTNPGLFPASYFPRTSLISHHAFCGASQKIFSGVLFRVATVIIINLSLEGTQVTWSLMILLY

SEQ ID NO: 226988 - protein, 1177 aa, Zea Mays
MPYLFESRTTMSDDGDRTCPLCAEEMDITDQQLKPCKCGYDICVWCWHHIIDMAEKEETVGRCPACRTCYDKDRIVKMAATCDRTVAEKNAEKKHRTQKVKPKAAPSAAATSTVESKKHLASVRVIQRNLVYIIGLPAHLCNESVLECREYFGQYGKILKVSVSRPTGPPSQQASANSNISVYITYAKEEEAIRCIQAVHNFVLEGKVLRACFGTTKYCHAWLRNMTCGNPDCLYLHDVGSQEDSFTKDEIISAYTRTRVPQMASGVSQRRTGTVLPPPGDDFSYSAVVSAKHTFKNGTLNTTSQPRLSPPNSSSGRSTLPSAASWGQRDLNARTTATGATSSQSHTKPKSESQSNPFSSSSVFSCTKTPSSWNDDTSTAAKISEGQQLSEKESRTLQPYKPGISKETQALSSLESSLDIDFSTIPSAWNDDDIVVPDVMPKGSDENQVANKNGELTHPASKSLVLSKKDIKMNITSKTPSDFVSSPAISKSDVSTSDGDHSLTNITPKCLASNAVECQSSHTAVEKMLEDIGSKDTDMEKLSAQISSVTLGGNDEIQSMAGNQQPDVMPCTSVDVLMDQNFGRDLAHPNPDELLLPSENKDSIVSCQYSSDKRLDWSLEMQNCSVTPLNDRMDSALLTDKIHSRQLDGSEQSSYSSFVEFPSTVDTSLWNDTENNAALTIDNITSSQMQPGFSSTDNTYALLNGGQDGLGTVYTHDNVSVYTHGNVSGHPGMGSHHHRAMGSLRNNSIGSFDKTISVNKYERRIISDTLSEFNPWDDSYSTANNFARMLRESKNNDVHCIAPSWKSGTGIKESRFSFARQDNQGNLFDSSLRNCGTGTEQNFSLLPQNSRGNIYQNGLAFQSLENEFSNNNSPGVLDMATTGTSMSKISAPPGFSAPTRVPPPGFSTAFPSQDSLNPTPVFPSGILCHGGSIPPPRFSSFSSGISTQEVSKPPTRPPSPFSSRFSSQDGLDPSSRFPFSSGFSSHDGSNQSYGSTNPENLLRGTVQGGNSNHYQSQFGRHSSDMEFDDPAILAMGKGLMPGIGDSGLEMKNTPAFQAQLQPASSDPRFQLHVQPNVQSRQNMRFTDPMQDGLNHMNDNYLASRFLAQNQGPLSPYVQIPQQPRNSQVINGHWDGWSDLRQGNNAPMSDMSRILYPSEVNKLHMLGSNDVHNRAFGM

SEQ ID NO: 226989 - protein, 203 aa, Zea Mays
MDMIVLAITNSVVSSSLRYLRQAQSGVVSVQPPSTALQTRMENANESEEEAQRRRVQEEEDSSSRAATRWVAATAVEIELEVLECPVCYRPLKPPVFQCAVGHAVCSCCCAKLAGRNCHTCGRAAAPPASAAASRWSTSWSPSGSRAPTPGAGAPPRRRTTARKSTRRHARTPRARPTPALPFHSAQLSKVETGAVEPETWSS

SEQ ID NO: 226990 - protein, 74 aa, Zea Mays
MGPSPQANLRFCRCQGFNDGLGASLGSANRGQCCFEYGKPQHGRELLVGVISPPPCRTALWADQIRTSSLFASK

SEQ ID NO: 226991 - protein, 66 aa, Zea Mays
MAKLSNLLNKKKQGCLDCYSRNPWRQKQCRNNRSRYRLKLSEQAASSIVDSGVNEVSRALMVLVWL

SEQ ID NO: 226992 - protein, 66 aa, Zea Mays; identical to SEQ ID NO: 226991

SEQ ID NO: 226993 - protein, 166 aa, Zea Mays
MKGQHVALHDPKPEPGVIGLINIRLSPIQVAQAACEDARSVCLREYVSAPDINIYGDPNFTFPYVTLHLHLMLFELVKNSLRAVQECYMNSDKDVPPVRIIVADGEVDVTIKVSDKGGWIPRSGLPRIFTYLYSTAKNPPELDRPNTEGVTMEYHICWREWPSRAQ

SEQ ID NO: 226994 - protein, 295 aa, Zea Mays; identical to SEQ ID NO: 225163

SEQ ID NO: 226995 - protein, 386 aa, Zea Mays
MARRRAALAALLVLLLLAACTAAAAAVTVSRKQRQRHHPGGASASAARSCDPFAAAGAWVEDGSYPLYDSARCPFIRDEFACARFGRPDTAYLRYRWRLDAPCAQPAFDGAALLRMWRGKTAMFVGDSLALNQYESLLCMLHAAAGPAARTTLSPPSGKIDPSSTVRFEDYNVTVVYYLTHYLVDLVTEPHTGRRVLKLDAIDQARDWLAADVLVFDSWHWWPRTGATQPWDYIQVGDTVVKDMDRTQAFAKALHTWARWVDANLVQTDTKVFFQGISPSHYRGQDWGASPKKTCMGETRPLNATGPYPGGPIPQQAILRGVLAAMAKPVYLLDFTYLSQLRKDAHPTKYDGGIFGGDCTHWCVAGLPDTWNVLFYAALTAGQGHN

SEQ ID NO: 226996 - protein, 821 aa, Zea Mays
MTSSAGYADGGTGGLGDGDPPVPPLRKQPSRIASGMRRLASKVSAAVPEMRGLKRTHSGTQSGLRGLRFLDKTSAGKDGWKSVEKRFDEMNTEGRLQRENFAKCIGMADSNEFASEVFVALARRTHINPDDGVTKEQLKQFWEEMTDQNFDSRLRIFFDMCDKNGDGKLTEDEVKEVIVLSASANKLAKLKKHAATYASLIMEELDPDHRGYIEIWQLETLLRGMVTASAPPEKMNMASASLARTMVPSSHRSPLQRRINKAVDFVHENWKRIWVLSLWGVLCIALFVFKFIQYRRRAVFEVMGYCVCIAKGAAETLKLNMALILLPVCRNTLTRLRSTALSKVVPFDDNINFHKVIALAIAIGSATHTLAHVLCDFPRLVACPKDKFMEKLGPFFNYVQPTWPTLLASIPGWTGILLILIMSFSFTLATHSFRRSVVKLPSPLHHLAGFNAFWYAHHLLVIAYVLLVMHSYFIFLTKQWYKRTTWMYLAVPVVFYASERSIRKIREQSYRVSIIKAAIYPGNVLSLYMTKPPGFKYKSGMYMFVKCPDVSPFEWHPFSITSAPGDDYLSVHIRTLGDWTSELRNLFGKACEAEVTSKKATLARLETTVVAHGLAEDTRFPKVFIDGPYGAPAQNYRKYDILLLIGLGIGATPFISILKDLLNNIKSNEEMHDAELGCSLKTNGPGRAYFYWVTREQGSFEWFKGVMNDVAESDRDDVIEMHNYLTSVYEEGDARSALIAMVQSLQHAKNGVDIVSGSKIRTHFARPNWRKVFSDLANAHKNSRIGVFYCGSPTLTKTLRDLSIEFSSTTTTRFHFHKENF

SEQ ID NO: 226997 - protein, 747 aa, Zea Mays
MVGRCTLMIQKDYRGRWRYVLGAVETFLDAIPSAGFFQETITVVNNTLVNGTTKSGATTISTPSLHDLQIYVLFSILCIYIGVSIAPEPGASKGITGLSIVTLAENWGSEYQPTNDAGVPDPNGSIYWDFNALLGLFFPAVTGIMAGSNRSASLRDTQSSIPVGTLSATLSTTVMYLLSVFIFGALATREELLTDRLLAAAIAWPGPAMIYIGIILSTLGAALQSMTGAPRLLAAIANDDILPILNCFKAYEGSEPHVATLFTSFICVACVVIGNLDLITPTITMFFLLCYAGVNLSCFLLDLLDAPSWRPRWKIHHWLLSLVGATQCIVIMFMISWTFTVVSLALASLIYYYVSLKGKAGDWGDGFKSAYFQLALRSLRSLGANSVHPKNWYPIPLIFCRPWGKLPENVPCHPKLADFANCMKKKGRGMSIFVSIIDGDYHESVEEANAAYRQLSAYIDYKQCEGVAEIIVARSISDGFRSIVQIMGLGNLKPNIVVMRYPEIWRRENLAQIPSSFTSIINDCIIANKAIVIVKGLDEWPNEFQRLYGTIDLYWIVRDGGLMLLLSQLLLARDGFESCKIQVFCIAEEGTEAEELKADVKKFLYDLRMRAEVIVVTMKSMEAHSEISPNAKKDPQEEYASAQDRIRAYLSQMKEDAQREGRPLMEDGRQVVVNEEKVEKFLYTMLKLNTTIVKYSMMAAVVLVSLPPPPLNHPAYCYMEYMDLLVVNVPRMLIVRGYRRDVVTLFT

SEQ ID NO: 226998 - protein, 539 aa, Zea Mays
MIYIGIILSTLGAALQSMTGAPRLLAAIANDDILPILNCFKAYEGSEPHVATLFTSFICVACVVIGNLDLITPTITMFFLLCYAGVNLSCFLLDLLDAPSWRPRWKIHHWLLSLVGATQCIVIMFMISWTFTVVSLALASLIYYYVSLKGKAGDWGDGFKSAYFQLALRSLRSLGANSVHPKNWYPIPLIFCRPWGKLPENVPCHPKLADFANCMKKKGRGMSIFVSIIDGDYHESVEEANAAYRQLSAYIDYKQCEGVAEIIVARSISDGFRSIVQIMGLGNLKPNIVVMRYPEIWRRENLAQIPSSFTSIINDCIIANKAIVIVKGLDEWPNEFQRLYGTIDLYWIVRDGGLMLLLSQLLLARDGFESCKIQVFCIAEEGTEAEELKADVKKFLYDLRMRAEVIVVTMKSMEAHSEISPNAKKDPQEEYASAQDRIRAYLSQMKEDAQREGRPLMEDGRQVVVNEEKVEKFLYTMLKLNTTIVKYSMMAAVVLVSLPPPPLNHPAYCYMEYMDLLVVNVPRMLIVRGYRRDVVTLFT

SEQ ID NO: 226999 - protein, 1617 aa, Zea Mays
MSVWNYVVTAHKPTSVSHSCVGNFTSPNQLNLIIAKCTRIEIHLLTPQGLQPMLDVPIYGRIATIELFRPHNETQDFLFIATERYKFCVLQWDAEKSELITRAMGDVSDRIGRPTDNGQIGIIDPDCRLIGLHLYDGLFKVIPFDNKGQLKEAFNIRLEELQVLDIKFLHGCAKPTIVVLYQDNKDVRHVKTYEVALKDKDFVEGPWSQNNVDNGAGLLIPVPAPLGGVIIIGEEQIVYCNANSTFKAIPIKQSIIRAYGRVDPDGSRYLLGDNTGILHLLVLTHERERVTGLKIEYLGETSIASSISYLDNGVVYVGSRFGDSQLVKLNLQADASGSFVEILERYVNLGPIVDFCVVDLDRQGQGQVVTCSGAFKDGSLRVVRNGIGINEQASVELQGIKGLWSLKSSINDPFDMYLVVSFISETRFLAMNMEDELEETEIEGFDAQTQTLFCQNAINDLLIQVTANSVRLVSCTSRELVNQWNAPAGFSVNVASANASQVLLATGGGHLVYLEIRDAKLVEVKHAQLEHEISCLDLNPIGENPQYSSLAAVGMWTDISVRIFSLPDLELIRKENLGGEIVPRSVLLCTLEGVSYLLCALGDGNLFSFLLNASTGELTDRKKVTLGTQPISLRTFSSKGTTHVFASSDRPTVIYSSNKKLLYSNVNLKEVNHMCPFNTAAFPDSLAIAKEGELSIGTIDDIQKLHIRTIPLNEQARRICHQEQSRTLAFCSFKYNQSVEESETHLIRLLDHQTFESLCVYPLDQYECGCSIISCSFADDSNVYYCVGTAYVIPEENEPTKGRILVFAVEDGSLQLIVEKETKGAVYSLNAFNGKLLAAINQKIQLYKWMSREDGSHELQSECGHHGHILALYTQTRGDFIVVGDLMKSISLLVYKVDTILDKENFTLEELLDEDEIIQECKALNTRLINFLRDKAQVSQLLRYIVEEVPEDSEKKQSFKFPFIACEIFACEIDIILRTLVEDVELMDLLFSFIKPDHPHSTLLAGYFSKVVICLMLRKTAPLMNYVQEHPDIVVQLVDLIGITSIMEVLVRLIGADETIYLNFADTLHWLENTYVLEMIVDKFSSSDSPEVHANAAEILSAVTRCAPPALAAKICSPSFVGRLFHHALDESRPKSVLVHSLSVCISLLDPKRLASVSYQAFRSNLTHGTLVTASPETVDGILESLGDLLKLLDITSSQNVFPTTYGCLCPPLGKHRLKIVEFISVLLTIGSEIAEKKLISQSVIKHCIDLFFQYPYNNFLHHHVENIIVSCLEVKRNQLIDHILNDCGLVGKVLAAEKSSSLAVESNGPTLPSEGKEPPRIGNIGHITRIANKLIQFGNSNSMIQSHLQENSEWAVWQIDVLIKRNEVENVYHWACGRPTSLHDRGRDSDDDDFRDRDYDVAALTNNMSQAFRFGIYRNDDIEEAQGSHERDDEDVYFDDESAEVVISSLCLGDDQDSSLFTNSNWFTFDGDRGINDRLAASVPPSSPDSEAISLNTENTDEALTGETTGGTESLRESASLANELAEVANDNDADATDGEKILCTEEDSQASEGPVDAKEDKTGGASKAANESVPDNALPESHHTDCRCADSSESGTEEDVEIDDEKKSETAMTNE

SEQ ID NO: 227000 - protein, 603 aa, Zea Mays
MIRRHRRLRNAVMCESSMFLMSPSPSPSPPQPSRPPPEYKHFCRVCNKGFTCGSALGGHMRAHGASDVDGFGVDDDDSLDEEPTAPARCTGADQWDVAGTSSATHAYALRANPNRLIRSCQVCKNCGKEFTSWDLFLQHGKCNSSEGGEGEEGEMDGSDSLRSSLPASEAGGGGEEDPAVAAAAWSKGKRSRRVVRTDDPSSTMVSAERCTSGDEDEELANFLVMLSSSKSNNNDDQTIVITADHHKEPVCASTGEGGGGGEPLPFQSQTISLFTQTQTQEPVVPLLPSTVAATVSQYIAPISRGVFECKACKKVFTSHQALGGHRASHKKVKGCFAARFDNNATETAINNPTIAADTNSKAVVVNNADASVDAATRVFAITSVDTDVGTSNEATSSSLSMAHAVPIRHNPASATTTTFTVAAHCKKNVKMHECSVCHRLFTSGQALGGHKRCHWLTSNTSDPCNPLAIPPLTEDLVVGEVKHHDDTLQPTVDATEPLLDLTIAANPAVALAASTMRPDIASTVHLKQLVVAAPSNNVSHRKKTAATGSHTTDAVVEEDEADSIIIKKAKISDLKDVVNMDGESTQPWLQVGIGSSSARGDDG

SEQ ID NO: 227001 - protein, 781 aa, Zea Mays
MIRRHRRLRNAVMCESSMFLMSPSPSPSPPQPSRPPPEYKHFCRVCNKGFTCGSALGGHMRAHGASDVDGFGVDDDDSLDEEPTAPARCTGADQWDVAGTSSATHAYALRANPNRLIRSCQVCKNCGKEFTSWDLFLQHGKCNSSEGGEGEEGEMDGSDSLRSSLPASEAGGGGEEDPAVAAAAWSKGKRSRRVVRTDDPSSTMVSAERCTSGDEDEELANFLVMLSSSKSNNNDDQTIVITADHHKEPVCASTGEGGGGGEPLPFQSQTISLFTQTQTQEPVVPLLPSTVAATVSQYIAPISRGVFECKACKKVFTSHQALGGHRASHKKVKGCFAARFDNNATETAINNPTIAADTNSKAVVVNNADASVDAATRVFAITSVDTDVGTSNEATSSSLSMAHAVPIRHNPASATTTTFTVAAHCKKNVKMHECSVCHRLFTSGQALGGHKRCHWLTSNTSDPCNPLAIPPLTEDLVVGEVKHHDDTLQPTVDATEPLLDLTIAANPAVALAASTMRPDIASTVHLKQLVVAAPSNNVSHRKKTAATGSHTTDAVVEEDEADSIIIKKAKISDLKDVVNMDGKAATRPLQPHAQATVKHPQATVKRNLCLLLICPKVLQVLVGGGTSASGTPCTAASSVASWPDSSYSTHSDKVQGSGSMPATLPPLIHIFQVIVLLFCRPSTRTKILLENHIVDSEISLTATVILVGADVHRDAREGVLEFERAFRERFSAYTLAAKRHIDSTTIFDVQGAHMDHPRAQANFEIALKACHPWNPSVGSNI

SEQ ID NO: 227002 - protein, 815 aa, Zea Mays
MIRRHRRLRNAVMCESSMFLMSPSPSPSPPQPSRPPPEYKHFCRVCNKGFTCGSALGGHMRAHGASDVDGFGVDDDDSLDEEPTAPARCTGADQWDVAGTSSATHAYALRANPNRLIRSCQVCKNCGKEFTSWDLFLQHGKCNSSEGGEGEEGEMDGSDSLRSSLPASEAGGGGEEDPAVAAAAWSKGKRSRRVVRTDDPSSTMVSAERCTSGDEDEELANFLVMLSSSKSNNNDDQTIVITADHHKEPVCASTGEGGGGGEPLPFQSQTISLFTQTQTQEPVVPLLPSTVAATVSQYIAPISRGVFECKACKKVFTSHQALGGHRASHKKVKGCFAARFDNNATETAINNPTIAADTNSKAVVVNNADASVDAATRVFAITSVDTDVGTSNEATSSSLSMAHAVPIRHNPASATTTTFTVAAHCKKNVKMHECSVCHRLFTSGQALGGHKRCHWLTSNTSDPCNPLAIPPLTEDLVVGEVKHHDDTLQPTVDATEPLLDLTIAANPAVALAASTMRPDIASTVHLKQLVVAAPSNNVSHRKKTAATGSHTTDAVVEEDEADSIIIKKAKISDLKDVVNMDGKAATRPLQPHAQATVKHPQATVKRNLCLLLICPKVLQVLVGGGTSASGTPCTAASSVASWPDSSYSTHSDKVQGSGSMPATLPPLIHIFQVIVLLFCRPSTRTKILLENHIVDSEISLTATVILVGADVHRDAREGVLEFERAFRERFSAYTLAAKRHIDSTTIFDVQGVIYVVFALRIYCLSYICLLFCITTSLANLYDMRPRSCHFAYACFNSSQGLTWIILERKQTLRSR

SEQ ID NO: 227003 - protein, 107 aa, Zea Mays
MTPGTRTRARTWQSVTCCRHSRGLGDTCPICGGRARGVNSRSVWWLSLKTIMRYGWWVLLSLGLKTRRQWFRREPMATQRRVCQCETTSCGARGSRIKNLRVGLFCP

SEQ ID NO: 227004 - protein, 716 aa, Zea Mays
MPPPPPPSVRGFLDAHFASPDDLAAAPALAELLRRECDGLDASLRRAEARLGAAAASWLARYSEARANLLRVRSRGGRLVAEDDGAEAVRTVGLPALVREIQRIDTIRLYAEATLQLESLVGNLEDAAFSIVRQAPKSKLSSILRKSNETEWKQGKLLHAVDAVKDIERELVRISTSRPQWANLVMAVDSRVDKTLSILRPQALTDYRALLASLGWPPSLSSPDTEKDKYPQIPNPLVLMNEGNKARYSQSFQALCALQHVQGNRESRLCQTAKVTPALADLKYFTRTACFDNGLWAIDELVHPIASRMEYHFVKWSEQPEFIFTLVYKITKDFMDGVDDVLQPLIDQARLVGLSAKESWVTGMVKILVGYLERQIFPALVCSYQDHATVGKPEVDSSWLHLNDVMISFDKRMQLLADSGIQKMTSLSEGLSRSLSVFSIYAEHPDWLQIWADVELCSAQDKLKSEMEDETSWSCSGQHDQRGHMENSTKFLLSTREDYKAPPVCEFVTKTALSMVERGRVLPNRGMQIQYNRSSSVRFLNGFFLVLRERCEALQLSNTALEDHSLSKTSCAINAARYCENVLREWDEDTTFLDMGPQGSLYTDEIGFLVKLGTDHLEQILSWVLLEFEDLSWEYVQSIGSWSGQTILDDEILDEENTGVSPGFVPSLDVLMDRTAKLKRYLNSKDFLDLWRSIAEGLDYYIYSSIRWAEALLFKT

SEQ ID NO: 227005 - protein, 227 aa, Zea Mays
MEEVGGDMPLPKQKLSAAPYRDGGGVVLVATGSFNPPTYMHLRMFELAKDELELRGYSVLGGYMSPVNDAYKKKDLLPAAHRIRFCELASKSSSFVMVDPWEAMQNGYQRTLTVLSRIRNSLCKDGVADQGSLKVMLLCGSDLLESFTTPGVWILDQVRTICQDFGVVCIRREGKDVGKLIDNSDILQECRDNIISVDEIVPNQISSSRVREHKLFMEGNGGDIALL

SEQ ID NO: 227006 - protein, 171 aa, Zea Mays
MLSGKEVVDSQTHDSSNNIQAQIRRRSRLPDPIEKEKGISLWSIIKDSVGKDLTRVCLPVYFNEPLSSLQKCFEDLEYSYLLDQAYQHGKVGDSLMRILKVAAFAASGYASSVARPCKPFNPLLGETYEADYPDRGIRFFAEKARAGNSGATAISNPSFGDSQFKLNQLAF

SEQ ID NO: 227007 - protein, 235 aa, Zea Mays
MVELRAFQETSNASQRSAATLPLSPSSGDSLPGGKYEVLVIKAGLRKVKILTDLVSTRRPKKTCQGGGKDKLCVNSDGAEYPCDTESLDDDLDDRVKEDEFGDSTIRKSFSYGSLQSDNYVGGLVYAHAKIVGEHEDRIYYSNRKTDVSFHVEKGLPSTTENGLLTAKRSILPWRKRKLSLRSLKAKGEPLLKKAYGEEGGDDIEYDRRLLTSFDESVSGIKRIWISKYYGVKIW

SEQ ID NO: 227008 - protein, 1863 aa, Zea Mays
MDTAAGPGPRDGPDRTPQGPGASPEEAAADGVKTDIAGGAEALAAAGAAGEADPGGGAAAAGRGGDAEASASEPTAEEVNEGCGGAAAAAGGDRPAAPEADADGGAGKGRSAVHAVSEVEQGQGIAGAAQDVDPAVFEVKKMDVSEGGDASKQNQHSPSCTASEVDVGIVPVAVRDLDPVGSEVMMEVDDGHVREQERAGVAVAGSEFKMEEADGRVVHQGSAATSAGGLQARAEEVGECLVGRYIGRNAPMQAGILIGKVASYDSTAGIYSVVFEDGHNEDLELPELHEFLMPDKNGTLGMSVNCRKRKLGLLVLSGSVSEVKEPASTRQRVDGCEMPANTDALRYSGSGSDMSEDIESSSNSSDFTKEEPSEPCPPVQAVELPPSSGDIHVPEDSISYLFSVYNFLRSFSVQLFLSPFGLDDFVAAINCTVQNNLLDAVHVSLLRALRRYLESKSAQGSQMASNCLKYLDWTLLDALTWPTFLLEYLYVMGCIKNLGGQSFARSLLAAEYYKLSVATKLRVLQILCDHVLESQEYKTILEDRVGYNEEMEYEIDSSTFLEAGSRAVLTRASKASAYKMLNDLQNFESGPNVTNSDVAVADVSQDGNSDDCRICGMDGTLVCCDGCPWAYHSRCIGQNKAFLPQGDWFCPECVVNKLGPTSSRIERGARGAQMFGIDMHGRLFLGTCNYLLVQIMEYWKHLLGRVQSERSTILKEVGTRHTPQSSMLSFTPTMSGDGSGWTTLKDGGDSKTVALPQTNVQQKIFANQYTVCSAEQTEKNVDVCKQALSAQNNIHNAPRNGASGPFVASPVSHQNGSIGTGMSNIAQAQPAHSIYRPDLSTVSAKSESFRSSLQGKLHLQMCTERPGNMSCGKAAKLSSFKPQAYMNLYNHGNIAASAAANLAIIASSEGKVSTSQLSAKPKKKVAADNALQLKAFSSAVAQFVWPSTEKKLMEVPRDRCGWCLACRSSASGNKKACFLNMTTSNAAKSSARVLSTMRVIKISDSHFPSIAAYLANMEESLRGLLVGSLQDMQQRERWREQLEEASNCRTVIPLLLELESNIRGVAFSASWFKPIDDWPAESPCPSTGASRPAQHQKRGAGGRRGRRRLLVSEPGTVTDDDNSWTWWTGGNIIKRTLQRGALLHSTIRKAARQGGKKRLAGLSYHEGSNFPRRSRQLFWRACVGLSQTSSQLALQVRYLDAHIRWKEFISPDQIPSDGKSSDADFSALRNAVLCDKKIIDNKIRYALKFPNQKHLPVRLTKNILEAESDQDEIRKMWFSENHVPLYMLREFEQHAEASSLPTPGIPECFTNLYPRRVKAPDRDVFSYLFHKGEVYPCASCKKGVLYRDIVKCSSCQGNCHKECTSRSVVSKGGSTTSSLICKLCLQKRNLMLTSYNTNASYIQHLQKNNGQQPVTAPRNVSKVSSSHSAEPAPKVEAEPVTKVKAQRVGNVEATTQPVLNVKAQPPAKVVTQNITSVQKTKAKKSKSEKPTKAKKVQAITYFGLIWKKNKNDKDDGSEFRANDVILKSKDGIGSSIKPKCCLCDKAYSPEFLYVRCERCKNWFHGDSLQLEEDRIGELVGYRCCRCRRRAIPPCPHSDNYVKPEPEFSEQTVATSSVSTMLSSGKTSASADQDPLLASYGIVEPIGEETGDVDLSANTASIAPGSSQKLSIRRALAKTSGYLDQAGKSVNEYYVQNQNTPPGNGNINFSHTNEISFSEADSVGASGLLGWDFSRGTAYAAPPGFTSNRQQNRTSRGSFVPDECEREPQTYFSFTELLEADDAQLDDNAFGIATGLQGDANGSGSFVQRGVGFGGTSFMAEDGASNMNVPTNGPTPEEVACHNGTNTQPPPDPRCSVRDLRTHR

SEQ ID NO: 227009 - protein, 590 aa, Zea Mays
MSASEFRIPYQQVSPSQPAENVNQFKTCRCGEGDPNSTSETGDSPPASCPNCQVLKSGHLLLSSKGIGWTSWKKRWFVLTRASLVFFRSDPSLTTAYKFGILIIPRVEISVLLYNPSHYQNVPPPRGAEPIVTLGGIDLNNSGSVVIKEERKLLTVFFPDGHGERTFTLKAETTGDLNEWRNALESAIAQAPSIANTMGQNPIFSTDVEAESAESPAEHSEDRSVIGRPAKFALVDADGSPSFLEKALKFIEDHGKNEFSPEEDAHVIGDCIKYVLREMPSSPVPASCCTALVKAYRSDKARRLDEINRVINEVFPEPNRQLLQRTLKMMQVVESHKAVNRMSQSALAACMAPLLLRPLLLGECDIDNEFSMGGDSSFQLLQAAAAANHAQAIVIIMMEEFDQIFDDSEEGSCSSDAYTESEDDVDKEYSTDNDTHDDDGSYDSGEDDIEEDLDYSDDSEHDSKINANIKDGKVKNNISETAEVAQAEDTSPMDINSQSNQKQESCGPNGSKDRILRSTSRSSSSREKTMEKSCSSAHKGKRTLWGRTSARKDLSTEEIECCSDDDSLERKKMQGSFYNFWLTFEVFSDV

SEQ ID NO: 227010 - protein, 827 aa, Zea Mays
MSASEFRIPYQQVSPSQPAENVNQFKTCRCGEGDPNSTSETGDSPPASCPNCQVLKSGHLLLSSKGIGWTSWKKRWFVLTRASLVFFRSDPNVPPPRGAEPIVTLGGIDLNNSGSVVIKEERKLLTVFFPDGHGERTFTLKAETTGDLNEWRNALESAIAQAPSIANTMGQNPIFSTDVEAESAESPAEHFVCGAAEDRSVIGRPAKFALVDADGSPSFLEKALKFIEDHGIKVEGILRQSADVEEVKRRIRDYEKGKNEFSPEEDAHVIGDCIKYVLREMPSSPVPASCCTALVKAYRSDKARRLDEINRVINEVFPEPNRQLLQRTLKMMQVVESHKAVNRMSQSALAACMAPLLLRPLLLGECDIDNEFSMGGDSSFQLLQAAAAANHAQAIVIIMMEEFDQIFDDSEEGSCSSDAYTESEDDVDKEYSTDNDTHDDDGSYDSGEDDIEEDLDYSDDSEHDSKINANIKDGKVKNNISETAEVAQAEDTSPMDINSQSNQKQESCGPNGSKDRILRSTSRSSSSREKTMEKSCSSAHKGKRTLWGRTSARKDLSTEEIECCSDDEALVEKLESNKIDLQSKIAKEAKENAILWSSLEKRKEELHERRLALEKEVENLRDQLKRVMNLRRGQVSSPSTIDSKVRGQQLCCESCNQRLLNTDRLSGPESSSVEASPTVGSDPAFDMGDIEQSRKQAAQHSPSSRDKPSHEAVGGITQRAPQRGHSIAREGQDGSSSLSSSNSKWNLAQKQYSNSPLIRGLHVSSRLEDFGGSISPAASSALAKLTNRLNFLKERRALLASEMQSLDLGRPPTVKSPTPKGHESKNS

SEQ ID NO: 227011 - protein, 414 aa, Zea Mays
MEAAAAGSGGSGAATKLQKVYRSYRTRRRLADSAVVVEELWWQALDFARLNYNTISFFDEPKPKAAASHWNRIGQNALKIDSRHRSGHNLHFYYNLWCQSQAGQPFFYWLDVGDGKEVDLPECPRTLLKKQCIRYLGPKERELYEYIINEGKVIHKQSGEPLDTSKGPKDAYWIFVMSTARRLYAGKKEKGVFQHSSFLSGGATIAAGKFTVKAGVIKSIWAYSGHYKPSTEDLNNFMKFLEENGVNLKEIEMRPFKKGDYHNDSMPNETQNIIVGTNPPQLILSSDTKEGDEGKDAPIERAKVTYHRTLSGGLHNPKGTDVPQKAILERIKSKSETESYQLGLKLSLKWSTGAGPRIGCVKDYPTKLRMQALEMVHLLTGASTIPHSSLLAEAQECHDPDRRLEDLVKRAQAN

SEQ ID NO: 227012 - protein, 644 aa, Zea Mays
MNMYRKAAALWVELRVELLSAIEYYAEDKVNSAQIWRLYWASHQRFFRHMCMSAKVPAVVRLAKEALAEEKCVVIGLQSTGEARTEEAVAKYGIELEDFVSGPRELLLKLVEDNYPLPPKPDCFEQGEEKVQEFQHKRHYGSDMSLKGRVSKLGKKEDVSEDGGDEYPPPDSDHESTESDEDFYMCQICNTEEEKNSLFCCCICASRVHPGCLTPPSTDIVNDDWSCYGCKEKVKSYLKERDAYLTELSKRYDAALDRKSKILDIIRSLDLPSNPLDDIIDQLGGPDNVAEITGRRGMLIRASDGKGVIYQARNTKEVALDMINMHEKQQFMDGEKNVAIISEAGSAGVSLHADRRAKNQRRRVHITLELPWSADRAIQQFGRTHRSNQTSAPEYRLLFTNLGGEKRFASIVAKRLESLGALTQGDRRAGPSLSAFNYDSNYGKKALTMMYRGIMEQDAFPVVPFECSENQATLEEFITKAKAALVSVGIIRDPIMCNGKNGGKLTGRIIDSDMHDVARFLNRILGLFPDIQNRLFDLFTSILDIVIQNARIEGQLDSGIVDIKAKSVEMKESPKTVHVDTVSGASTILYTFTVDRGVSWEVTFILKPLSVSPKNLCDMKCIYISVLFYITFFSRNAGELCIIL

SEQ ID NO: 227013 - protein, 1670 aa, Zea Mays
MLIFAGRHSPVSELLPLANHFTCCGSRPSIEIAMPHGHAAAVVDRLLRRLGSAACRLEVPPNIDGDLAHVWTTLARLQDMLVSLEIRPELQEWMGDIKQVAYDVEDLVDELEDHNSMESQMSGCVAVGEETRWCCSCSFLMHSTRADRMKTIKRRLDFLVKDSVIFSLMQYPFPDVERFDNEAFDRAAVVGRDNDKAKIKDMILQSNAQKFSIIPILGLVGLGKTTLARLIFLDQGEGWDFDLRIWISLNRKLNIKMIASDIISQCNHREEKLLDVRTDMEIQENFQLLKRCLQEALHEKHCLIVLDDLSSTDKNQLDELKEMLKGTNESIKVLVTTSSEITAELLHTIPPYKLCPLSEDDSWKIFSQKAFGNCDGDNTDLKKIGKEIVKRCEGIPLLTHSLGLVVQNEVTNVWLAARDEEIWKLERRVATKIELFSPLYQIYNDFSSTIKLCFLYLSIFPKGSTIDKEKLIQQWIALEIIGSKHDSLPPYVNGEMCIQDFLSIYFLQVRDTHSVYGMDNRVVPTTFYIHNFVHEFARHVACDDIIIFDGTKMQKGCAKRQTFQYALLTCYRVQSTFSHSTLTRTRALHIMNSEAITFPREAFELLKHLRVLNLSGCCIEELPASIGCLKRLKYLDVSGVQIQTLPFPVSRLTNLEVLDLSKTCMKELPSFIGNLQNLKYLNMQGCDKLQNLPLSLGHLQRLEQLRLSCCRCIAMLPDSLCNLINLRILDLSRCTMLRHLPALFGNLVNLEDLSLSSCFNLKQLPESFGNLYFLRFLNLSSCYELQQFPESVTNLEKLEVLILRRCCRLRILPPSFAMIKYLRILDLAGCEALHVSTEMLTTNLEYLNLQRCLNLQTQPYYFENFNKLKFLNLSHCLPTVDCLESISYLFNLEYLDLSETSLDIPMSFARLQKLHTLNLTGCAPMHPSSNVHQTWPGILAKITSLKSVLTMDPVLAASLQGHTECSADYDYHSLTTTDELVIKEITGGSRGLRIAEQLNLQNRLEVCFLKLEWVPRSQSAQDQLLEYTDEEVLEKFQPNETLEHFMLVKYTGNVFPTWMMNKLTSLPYLVNLCLFHLHNCSALPPIGHLQNLRYLHIKDMPNLTNLEMGLSGGPVSLGKLTHLKLEALNLEELSILLSANNESPCFMFPNLEELSVLSCSKLVFKPSVPKCAKYVIKESNMVLSCWQPLGPFSSPPIEKVEISGCVMPSGWLQWLRSIQTLEKVVIDGEALSSFELQKIYAFQEASGSKISKETVSSSRTNMSRELTTEDGALKAIGIDNSTIKHIPRFNTTSELSVDTISSSKVSTPSKEIPSTLRRPDKSKMPALIPGDGSLNLSLKQVQKVTHNFSPLFELGEGGTWAVYRAVLSDNQVVIIRRAKKGHVQEAKHLMEVKLLTKINHWSLVRFLGFIDEKDECIRITEYVPNGTLREHLHGDALICYNLRTSNILLTESYRAKVCCSELSKSGNIVLLKGTGGYIDPEYLETSELTAKSDVYSFGIILLEIISSHGPQDWDVLMNHRQSSVVQWALEKFYDDLMNEILDYRMEDRVDGDVVRDLLSLALSCVVSRGADRPSIVVVGERLWKIWQDHRRNVGEQHEYQGSWAEFIEQEGILRHHKCVLKRSWEPSTTQQDWSVYVRQIELVQEAYDTPWGEEIFSGSVSLDDITVYSR

SEQ ID NO: 227014 - protein, 57 aa, Zea Mays
MWRCSLLSFLPRIGGRKPSFWSCKIVATMRYYRRPYKWARETRRVCDDNATCRLVLL

SEQ ID NO: 227015 - protein, 451 aa, Zea Mays
MAHLQLSAVAGARPAAAGGRGDEMEDVALLDSYDEEMGLPLPGASGAEAAEAHVRVTGMTCSACTSAVEAAVSARRGVRRVAVSLLQNRAHVMFDPALAKVEDIIEAIEDAGFEAEIIPESAVSQPKSQKTLSAQFRIGGMTCANCVNSVEGILKKLPGVKGAVVALATSLGEVEYIPSAISKDEIVQAIEDAGFEAAFLQSTEQDKVLLGLIGLHTERDVELLSDILKKIDGLRQFGVNSVLSEVEIVFDPEAVGLRSIVDTIEMTSNGSLKAHVQNPYTRGASNDAQEASKMLNLLRSSLFLSIPVFFIRMVCPSIPFLSTLLSMHCGPFLMGDLLKWILVSIVQFVVGKRFYVAAYRAVRHGSTNMDVLVVLGTTASYAYSVCALLYGAFTGYHPPIYFETSAMIITFVLLGKYLEVLAKGKTSDAIKKLVELVPSTAVLVLKDKGLQ

SEQ ID NO: 227016 - protein, 90 aa, Zea Mays; identical to SEQ ID NO: 222845

SEQ ID NO: 227017 - protein, 1450 aa, Zea Mays
MNPGGDYGKKELSPALRNRFTEIWVPAVIDVDELRSITFGRFTKTDFSCLGDCIVNFWKWFNQLHIGRTLTIRDLLSWISFINVTEQNLGPEQALIHGLFLILLDGLSLGLNVSKTEATEMRNTCLSFLLEELQKVGGTAVDSYLNDLNNYGWGDNMKKKDIDHGCLEDHFGIAPFYIPKGHFPCKQQDFEIMAPTTSKNVLRVLRGMQLPKPLLLEGSPGVGKTSLIVALAGFSGHDVVRINLSEQTDMMDLLGSDLPAQGGNGMEFSWSDGILLQALKNGSWVLLDELNLAPQSVLEGLNAILDHRAEVFIPELGQTYKCSSSFRVFACQNPSSQGGGRKGLPKSFLNRFTKVYVDELSEEDYLFICKSRYGSLISESFIRNLIHFNSRLYMDTMVYRKYGQQGSPWEFNLRDIIRSCEMIAGSPNPMMDDSFLNTVYLQRMRTLVDRHEVVKLYEDVFKKKISIHQPKMLHVNPHCLVVGSASIRRNNIQSYKVQNNQLNIFPGVLNSLEAAMHCIQQGWLCILIGQNSAGKTSLIRLLAQLSGNTLNELNLSSATDVSELLGCFEQYNFFRHYKTVLSEVEHYVDVYFSLSIDTNQKNFVAERRGLFTKWFEFVAAKGHSSIKTSKLMSGNASLPSLSLLAEIVEQMKCDLEMFDFSIPLTKDDLSETLKSINNLQQNGAAHQPVRFKWVAGDLIRAIERGEWIVLDNANFCNPTVLDRINSLVEQERSIMVNECGLVDGNPVVIKAHPKFRMFLTVNSNYGEVSRAMRNRGVEIFLMDQSWNLKGFSNVPGDSERKDVIRFLISCGIPRMELVSSMCEAHMYAKGEGSRVASLHSGLSLSLPGGWPIEQKLRDLIWYSKETCVMRNCMFLQSLGAQYAAYQISSLNDNSLLLGQISLIHPSILPAASLRELQFPTVNGQPVKICVTGAFNSYLADQMLFFAANWVMEQCTKNDLELYGKWFNWYNSLVQPYCNFFESYWYILEQESEHPIWHNILEYYREIVAYHNIDIVTQHIPLLSKKLLDMAGCDSLKACQNRLHRSFKALGLLRLTLQQWQIETKCPDLSVLECTLLPALKSLRCLEGEVLKTIAKSWKRLKIYSLLLDYHRSIWKMMIASQLEGLPIVWNLLRKEILKLQQKFPVEVDVFLMECVNLNNINDTNFQYGKPTLWDYGGHPHLPSSSEIFDKMQELLSFTTDVWPRKNLLNIELDDRKQLTDAMLSANKDLRHLAMEGVSMACIATMKTEEDVLAVVPQLDEVHKRLVGKVNSVRDNLGLLSKTSVPEFKFCCSVSSEILCNIYGFNGWLASLPLLNLKSLNLDTLLLQQLCKCTQKDSSETHEILVNSEYLLKYAMDYSLGSSSRSPLDYIQHQIIWWICHDWAKVDNAHLKVASCILEMWYNYHSSLWTYCSGSPKCLFSVTHDDSCDLAHLTKMDAINTIIRIYMWWII

SEQ ID NO: 227018 - protein, 361 aa, Zea Mays
MADVDMADLPQTPRSTAGDDDLSLLDGEGDLAAAILARLGGSPREDFQHLCATAAAMAQAVSDQGVPATPVAYFAAAAAALAPLARAGDAGADRHVAGALLAFLSAALPALPAAVVRARGREVADDVMRVLDFPSTPDSGVRAGLRCLAHLISAGDRANWEAVEPLYTVILRLSTDHRLKVRKQSHSCLHDVLLSFQRQTILIPASEAITRSFERFLLLAGGSSAVNTGVSEEGPKGAKEVLYILNALICCLPLMASKPSNTILKYFKPLLDLHQPILIRSLLDILHAVCESPTVQLKSDVLLDLLCSLGLSVSSERKSGDEMASIARLLHVGTKKIYKQNRDICVVKLPLIFTSLGDIIK

SEQ ID NO: 227019 - protein, 262 aa, Zea Mays
MKACYMSITGPLVIHYPRNGIESSRKGEDRSESEMVVVAAAAARGRAVKPLFLVLVHHSRPAPRLPRRTARARPLRFLSCSTSAPPLFAAVASMDSPPQGYRTNVGICLADPSLTKIFSASRIDIPSAWQMPQGGIDAGEEPRAAAFRELREETGVTSAEIVAEAPVWLTYDFPPDVRTKLNARWGTDWKGQAQKWFLFRLTGNDDEINLNGDGSEKPEFGEWTWMTPKEVIEKAVDFKKPVYEEALKHFAPYLQSDPAASS

SEQ ID NO: 227020 - protein, 202 aa, Zea Mays
MVASVSCLPMTECFRLKQYHNSRETAVQQPQVMWGVVGKTTLVWHWLRQKLVSGCHWLWEEQRKTNCWLHSVLLRHDIVGFRFVAFGGKLEMWQLWLYASWRNRRYKHTHFVFFFVELLCSVFAAESRSNVVVVVLLLLATRMWIAAFVVLECLPRKQRIPTLCENRQGGGPGDKRDTCTAAYYPMDGMMDASDPITGRLPR

SEQ ID NO: 227021 - protein, 524 aa, Zea Mays
MAAARIAACTTSARTALALADDPAPPDTLDVVRRQRQLLRRAAALCLDPIAEESDVICPLPVPRMAVFSASKAVSDESAFRVAGRVFVFVSSRLVPNTRTRHADTRIVPPNFCSEISSSRLISLFQSITSSNLYPKPYTGGRGMVKKAVSTAPADAEADERRRLRSLAFSNGLLQRGDPAAPRAPLAPAAAVTRLQGRDVVRRGGQRKSRYLFSFPGLLAPAASGGRVGELADLGTKNPLLYLEFPQGRMKLFGTHVYPKNKYLTLQMTRSAKGVVCEDVFESLIVFSEAWWVGTKEDNPEELKLEFPKEFQNDGTTADCDFRGGAGGAIDEATGSKAGKEIAEPRSPKFASDDDAPEDSNHKDENNTQTMSGTPVRQSARNAGKTLKRYTDLSSGGESSDNNNETDISEDLDDKEVESPEIKDEIESEDVKPADSSAISLSSKKEPLVQATLSSMFIRAEEKKRSTRSPKGSPATKGAAAKKQRASPMAKQPAGIKKVSGTRGKKKPKVGEDEIEELSSSSQE

SEQ ID NO: 227022 - protein, 471 aa, Zea Mays
MWKRLLETTKQVVSSKQAIPYAAVTPKPATPAAAPSASKRGAPVAAPKLSTLKSPSYRRRAAAGPATTVTQASLLRLKQAAASKKTNLPSSPPLNDAHALDEDDPPEALTKALMFVIDAPEEVECTTSPEALPEGSEDVGEVARGNKILDFEWFQAEPSRDPLMLWRREVAREKKKHYIFKNVESHHYTNLMRICANKLGMESTIEFLGNLGRETGVKEFNSMIKVCLGKAKACRDIDSAVEYIYRAYHLFNTMKDKGFTIEKDIYDPFLLYLMDTGMFEEFEVFSAFFKEANPKSFSRIAYYEMLLCIRVQDEEKIQELCHSVEDYDEKVHYDLAESYMLAFAESGRKEDLVALLDLVDLSKVSGSKYITNIFKSLGKLELENYVEKLLERMMSKGCADHDISSLILEYTANIPNIMVEDMLVAFHKWHEKFEVAPSIDAYDKIVSICCDSSKDRKTGDVIGTGRRRRTS

SEQ ID NO: 227023 - protein, 345 aa, Zea Mays
MAASIAASSFFPGSPAPAAPKNGLGERPESLDVRGVAAKPGASSSAVRASKTRAHAAVPKMNGGGKSAVADGEHETVPSSVPKTFYNQLPDWSMLLAAITTIFLAAEKQWTMLDWKPRRPDMLTDTFGFGRIIHDGLMFRQNFSIRSYEIGADRTASIETLMNHLQETALNHVKTAGLLGDGFGSTPEMSKRNLFWVVSQMQAIIERYPCWGDTVEVDTWVSANGKNGMRRDWHIRDPITGLTILKATSKWVMMNKLTRKLARIPDEVRTEIEPYFFEHSAIVDEDNRKLPKLPEGQSTSVAKYVRTGLTPRWADLDINQHVNNVKYIAWILEVPNNVADACCFR

SEQ ID NO: 227024 - protein, 345 aa, Zea Mays; identical to SEQ ID NO: 227023

SEQ ID NO: 227025 - protein, 1055 aa, Zea Mays
MRPVTPLLFILSFLRPNLACCLRPAPSACAPIRRVSALRLSIYAICLAEYSSEPRALQIEDLVVGFGRRGSFEGACARLHTCFENLKPLFQELENGSPMAILEPLMQQAFIGIDTLTTVANLYNLPRREQNKTTLLKLLFHIKNRYSDMLTPEQREEMDSRVRKLVFGEKDNVSDPSTSCGTSAINVSAPSGQVSNTGGLPFESGAANLFSSLPRLEVPAKRNSPLLNLHADYDENSLPSPTRDNAPPFPALKPIGFGAFPMKYGQKSVYPSDDLPSPTPSGDEGKPADKGGDIFSDVSSFPVPKSIVLPSTSQMPASQPSTVSSSSISYASSTSQMAASQPITVSSSGISYASGPPGFAKQIEQSTAGPNHAIKAASKSRDPRLRFLNRDSAGATDVNWRANFSELKDGNLGGVSVGNRKQKAVDDPQVDDNALKRFRGGIANQRDMQPTGNPNQLMNIRAPTHSSSINMKTLQPPQTTAPHVSAAPAVPLPPMLLKDIAVNPALLMHLIQMEHQKKSASESQGGMSSGMTNNGIAGMVFTPGNAPKITEAAQVPSVRPQVPVQTPPLNSQNDGGIVRMKPRDPRRILHNNIAQKSDAMSLEQVKNNGTTQPDSQGTKDQTTPVPSQPALPSSIARPFSSAKHVDPVSNSQLAATAIMAPTQALSSVNKVDPRLAVEQNGQNADATTNGASATTLEATQPVSPWGDVDHLLDGYDDQQKALIQKERARRITEQHKMFSARKLCLVLDLDHTLLNSAKFIEVEPIHEEMLRKKEEQDRTLPERHLYRFHHMNMWTKLRPGIWNFLQKASNLFELHLYTMGNKLYATEMAKVLDPTGTLFAGRVISRGDDGDPFDSDERVPKSKDLDGVLGMESAVVIIDDSVRVWPHNRHNLIVVERYTYFPCSRRQFGLPGPSLLEIDRDERPEDGTLASSLAVIERIHHNFFSHPNLNEADVRSILASEQRRILTGCRIVFSRVFPVGDASPHLHPLWQTAEQFGAVCTNLVDDRVTHIVANSPGTDKVNWALSKGKFVVHPGWVEASALLYRRANEHDFAVK

SEQ ID NO: 227026 - protein, 724 aa, Zea Mays
MAILEPLMQQAFIGIDTLTTVANLYNLPRREQNKTTLLKLLFHIKNRYSDMLTPEQREEMDSRVRKLVFGEKDNVSDPSTSCGTSAINVSAPSGQVSNTGGLPFESGAANLFSSLPRLEVPAKRNSPLLNLHADYDENSLPSPTRDNAPPFPALKPIGFGAFPMVPEKLSFLDRVEPTKNSLYPPLNDPLKAVSSYQQKYGQKSVYPSDDLPSPTPSGDEGKPADKGGDIFSDVSSFPVPKSIVLPSTSQMPASQPSTVSSSSISYASSTSQMAASQPITVSSSGISYASGPPGFAKQIEQSTAGPNHAIKAASKSRDPRLRFLNRDSAGATDVNWRANFSELKDGNLGGVSVGNRKQKAVDDPQVDDNALKRFRGGIANQRDMQPTGNPNQLMNIRAPTHSSSINMKTLQPPQTTAPHVSAAPAVPLPPMLLKDIAVNPALLMHLIQMEHQKKSASESQGGMSSGMTNNGIAGMVFTPGNAPKITEAAQVPSVRPQVPVQTPPLNSQNDGGIVRMKPRDPRRILHNNIAQKSDAMSLEQVKNNGTTQPDSQGTKDQTTPVPSQPALPSSIARPFSSAKHVDPVSNSQLAATAIMAPTQALSSVNKVDPRLAVEQNGQNADATTNGASATTLEATQPVSPWGDVDHLLDGYDDQQKALIQKERARRITEQHKMFSARKLCLVLDLDHTLLNSAKKWNQFMKRCYGRKRSKTGLCLNVISTVFII

SEQ ID NO: 227027 - protein, 268 aa, Zea Mays
MIRSHGFGGASSVCQMFEREIGHLSALFLTMEEGFLALVSSLWESQSNITTAGTCCLVSVMHDKTLFIANLGDSGALLGKKDVKTSDVAEEQQQQQQAVDPLARQSSIMSLTLEELQNSLCEPGRNFGSMNMDEFMANIWNAEEFQAATAGWNKEGVYREPVPVATTTDTGENGGGGGGGRGLVLQGSFALSSPLSRKTVEEVSAEISQGPTDFQASAASQPVGEARRGVGGPLTHASARWRRVSCGASMSVRDRRGHGHARAPTLHS

SEQ ID NO: 227028 - protein, 95 aa, Zea Mays
MKSRRWATEEEIFNPQLGRTQDLHWMRDFGGGCNWRSASLRCCESQAATAAGGRGRGRRVAAPGGWSEFGALNSRGVSNPPMPSMTMLGARNYGR

SEQ ID NO: 227029 - protein, 1245 aa, Zea Mays
MAASPSPSTATATASPSASAAAVLAVNGERVELREGDVNPGTTLLEFLRTRTRFTGPKLGCGEGTSPRPPPPSPRALPFRGCGACVVLLSAYDAASGAVSHAAASSCLTLVHGLHHRAVTTTEGLGGGGRLHAVHERLAGFHASQCGFCTPGVCMSLAAALAGAEAEAKAKAGRRPAPPEGFARLTAAEAEWAVAGNLCRCTGYRPIADACKSFAADVDLEDLGLNSFWRKGDAHASKLPRYDEGSIGVFPEFLKAEIRASSGVDQYTPPALLGSATTWHRPRSVEEYYKLVDSELFDQSKTKVVVGNTASGVYRETEVYDRYIDLRCIPELNSVSKEANGVQIGAAVTISQAIEILRVEAGGCNDVIFCKIADHMEKVASPFVRNTASLGGNLVMAQRDQFASDIATILLAAGSSICIQASSKRLTVMMEDFLQMPPCDHKTLLLSICIPRWTPIGGLFSGDKTMAGTESKTGTSVLFETYRAAPRPLGNAVAYLNSAFLAQVSSDGTSSRLILREICLAFGAYGSQHAIRARNVEKLLVGKPITTSVLLEACRRLKETIVPKEGTRHAAYRSSLAVAFLFTFLYPVTEGTLKTVKEVHLNGYATFGTNGNPNCGPDAHVDVSLKKVIDVNSGSCTNERILEYSNQIIEINKDYFPVGIPTKKVGAELQASGEAVFVDDIPAPKDCVYGAFIYSTKPLAHVKSIELDLSLKQLKTLGVVTVKDIPECGSNVGANTIFGPEPLFGDPVTQCAGEPLGVVIAETQRFANIAAKKAVVNYSTENLDAPILSIEEAVKRCSYFETPPFLLPLKIGDFSKGMAEADQKIYSEVKLNSQYYFYMETQAALAIPDEDNCMVVYSSSQCPETAQNVIAKCLGLPCHNVRVITRRVGGGFGGKAVRSLPVATACALAAFKLHRPVRMYLDRKTDMIVTGGRHPMKICYSVGFKPDGKITALHIGLFINAGMTKDISLIIPHNFIEALKKYNWGAFSYEAKVCRTNLATKSAMRGPGEVQGSYVAEAIIEHVASTLSADANLVRRKNLHTVESLALFHSECTEDAMGYTLHSICDQVTASENYQHRLEIIQSFNKNNKWKKRGLSFVPIVHKVLSRPTPGKVSILNDGSVAVEVGGIELGQGLWTKVKQMTAFGLGQLCPNRSQELLERIRVIQADTLSNVQGGWTTGSTTSESSCEAVRLACNVLVNRLKPVKEQSQEKQDNVSWDELISKGRGGISECWFACQPFPLLLYAM

SEQ ID NO: 227030 - protein, 140 aa, Zea Mays
MATGLRSHTLSILVNDCPGVLNIVTGVFARRGYNIQSLAVGPAEKEGISRITTVVPGTVESIEKLVQQLYKLIDVHEVHDITHSPFAERELMLIKVSVNTAARKEILDIAEIFRAKPVDVSDHTVTLQYPFVVTVTTSYP

SEQ ID NO: 227031 - protein, 104 aa, Zea Mays
MVLTAMVEDLSKEPQVERELMLIKLNVEPDQRPEVMVLVDIFRAKVVDISEKTLTMEVAGDPGKIAAVQRNLWKFGIKEICRTGKVISNVLSLHGHIFFSVVLI

SEQ ID NO: 227032 - protein, 763 aa, Zea Mays
MAEPTPKSKRTKKAKKPSAREGDGEDMDTLKSDVATFASSLGLLPGAGDSNGGFDDSDFRKSGPMYKSSKFPSKQPHQKPDNTANPHLNPRPTKKPHPLELRDSYAATKPGAVNTNYPLMKAAALSGQWYTDADELEARVLGGRKQVPPAVGLQEMQGIVERKRELAEKLMLQYAREYDAVRRGHGDLKLLDISAKSGTSADKVSAFTCLVEDNPIANMKALDSLLGMITSKVGKRYAFTGFDAIKELFLMRLLPDRKLKSLIQRPLDILPETKDGYSLLLFWHWEDCLKQRYERFVMALEDAVKDMLPNLKDKAMKPELFLGLLVKAMKNDVMLKRVAAFSKRLLQVALQRPPQYACGCLFILSEVLKAKPPLWGIVLQNESVDDGDEHFEDILEIPEDSSVASAVLHKHNEKVAAHEKHNLDAADGIDSVKQVNLVDENNASTDSSRQHAFYDPRHREPSYCNADRVSWWELTVLASHVHPSVSTMARTLLSGNNIVYSGDPLTDLSLPAFLDKFMEKKPKGNRIAEGRWHGGSQIAPAKKLNLNHHLIGEELLELAENEVPPEDIVFHRFYLNKTGTVKRKTKQKDSVLDEDAGELLADNDADEASDESGDEILDLGDGLADDGEYDYDDLDSNAFEEEKDLLRDDSDVEFDDVSDDTASGDEGSENDDDIPILAGDSDGNLSDDEMVDAGKGGVSYTKKRRAGKKSGLSPFASLDDYEHLMVGDADATTAKRKHMATGRAGGEKKPKLRPRKKRSRSSE

SEQ ID NO: 227033 - protein, 86 aa, Zea Mays
MLPLKPIMLVIFHLFRSWMVLKLARMLIQLEQMSSTGALKLLKPTLLVMHLEHFFKSSVLKLLMLLPLTTMTRTTVIVVIKKNKQQ

SEQ ID NO: 227034 - protein, 579 aa, Zea Mays
MGKGARRRSRASGAGGGGHGSKRPRRAEEEEQEEEEMEPLVGEEEEVAALEGEDYCFVCKDGGDLRVCDFRGCQKAYHPACVGKDSGFLNSDEEFICEWHTCFICKGRSRYYCFCCPWQAFCQNCVKQAEFVPVLRKTKGFCTNCLRMAIMIEKNVDVDSDGERVDFNDRATYEFLFKEYWEEIVKGKESMTLDKLEKAYAFLKEKLNCKQDLDLEKVHDEEHSSDDDFVGNSDDDDDNKPSSTTKFNGTSNTMKFFLREDRPMKNGYVGWGSKELMEFLSSIGKDTLNSLDQHGATEVVKVYIQQKGLLARDKKKLVICDDKLKILFRRSKVRYNRIYSLLGKHIAVNMTSEDETFANSDDNNETFVRKKARIGNYSSSTPKCTPEINKRCFAALVRHNIDLIYLKKSLVVDLLREPDTFGSKVIGCFVRIKIDLNDYSFYMHKKVHQHRKLYQLGLVTGTSKSPEEYKINDVSTDILLCISSIPDIKISSLSDEEYEEEECQDLRLLAKNESFKRPTVGDLEEKARSLRREIVNHWISKELQRLERLIDRASEKGWRKEYPCYTSSFNHVLMFLNVE

SEQ ID NO: 227035 - protein, 687 aa, Zea Mays
MAQSLELLLIQFLMPDNDARRQAEEQIRRLARDPQVVPALVHHLRTAKTPNVRQLAAVLLRKKITSHWPKLPADSKASLKQALIDSITLDHSHPVRRASANVVSIIAKYAIPAGEWPELLPFLFQCSQSPQEDHREVALILFSSLTETIGATFQSHLNNLQPILLKCLQDETSSRVRIAALKAVGSFIEYVNDGGDIVKMFRDFVPSILNISRQCLANGEEDVASIAFEIFDELIESPAPLLGDSVRSIVQFSLEVSANQDLEINIRQQAIQIISWLVKFKASFLKKHKLVVPILQVMCPLLTETANEDEDSDLAADRSAAEVIDTMAINLPRHVLAPVLEFASLSFHHINPKYREAAVTSLGVISEGCCEHLKDKLEDCLKIVLEALKDQEQMVRGAASFALGQFAEHLQPEILSHYASVLPCILNALEDPSDEVKEKSYYALAAFCEDMGEDILPYLEPLICRLVMSLQSSPRNLQETCMSAIGSVAAAAEQAFTPYAEKVLEMMKGFMVLINDEDLCARARATEVVGIVAMAVGRARIEAILPPFIEASISGFGLDYSELREYTHGFFSNVAEILGDSFTQYLPHVVPLVFSSCNLDDGSAVDIDDADSIENGFGGVSSDDDVNDEPRVRNISVRTGVLDEKAAATQAIGFFALHTKSAYAPYPLGRLQQFIHMVIENTVLHCS

SEQ ID NO: 227036 - protein, 825 aa, Zea Mays
MAQSLELLLIQFLMPDNDARRQAEEQIRRLARDPQVVPALVHHLRTAKTPNVRQLAAVLLRKKITSHWPKLPADSKASLKQALIDSITLDHSHPVRRASANVVSIIAKYAIPAGEWPELLPFLFQCSQSPQEDHREVALILFSSLTETIGATFQSHLNNLQPILLKCLQDETSSRVRIAALKAVGSFIEYVNDGGDIVKMFRDFVPSILNISRQCLANGEEDVASIAFEIFDELIESPAPLLGDSVRSIVQFSLEVSANQDLEINIRQQAIQIISWLVKFKASFLKKHKLVVPILQVMCPLLTETANEDEDSDLAADRSAAEVIDTMAINLPRHVLAPVLEFASLSFHHINPKYREAAVTSLGVISEGCCEHLKDKLEDCLKIVLEALKDQEQMVRGAASFALGQFAEHLQPEILSHYASVLPCILNALEDPSDEVKEKSYYALAAFCEDMGEDILPYLEPLICRLVMSLQSSPRNLQETCMSAIGSVAAAAEQAFTPYAEKVLEMMKGFMVLINDEDLCARARATEVVGIVAMAVGRARIEAILPPFIEASISGFGLDYSELREYTHGFFSNVAEILGDSFTQYLPHVVPLVFSSCNLDDGSAVDIDDADSIENGFGGVSSDDDVNDEPRVRNISVRTGVLDEKAAATQAIGFFALHTKSAYAPYPLGRLQQFIHMENNRSATPTIFCIKSRMDVLEKQKDVLDTVLNIYIKTMTEDDDKEVVAQACMSVADIVKDCGFAAIEPYMLRLAEVTLVLLRQESSCQQVESDGEDDGDIDHDEVLMDAVSDLLPAFAKVMGSYFDPIFAKLFDPLMKFARPLHTVSF

SEQ ID NO: 227037 - protein, 295 aa, Zea Mays
MATGEVVAVKVLASDSRQGEREFQTEVALLSRLHHRNLVNLVGYCVEKGQRILIYEYMSNGSLARLLYGDNKRSLSWQERLQIAHDVSHGIEYLHEGAVPSVIHRDLKSDNILLDHSMRAKVADFGLSKEEVYDGRKSGLKGTYGYMDPDYMSTNKLTKKSDVYSFGIILFELITAINPQQGLMEYINLAAIGGEGRVDWDEILDKDLLVGNIPEEVRMLADVAYRCVNKNPRKRPWISEVTQAISRLRQHQLIKHDAITLPRSETRTVLRRIDYQHVELSDLTSIKELTPIRAS

SEQ ID NO: 227038 - protein, 113 aa, Zea Mays
MDITLVGTNGTVYVTDFVIPYEEKSAEFPVASKSNFAELHVGWDPLPSKHVVATDLPQEALMVQEFARLVQNIRDAGGKPEGKWPAITRKTQLVLDAVKASIDKGSAPVEVAS

SEQ ID NO: 227039 - protein, 1871 aa, Zea Mays
MDVEMLPYGIISTFHCLSVRTSPLNMALLPCVYMQMDGVTLRHLLRPFAAQEAAAAGRVAAAPEQLFASHSTLQSGPPPRVGPSNELLTQVPGNYCTFDLAPDLTRANASNAAGTIDFTRAGPSSSAATLPKYPRHGLPASSSNEQSSFGALFPNRSANGMGIFTCQSSANEGIANVGVQFQDSSVHGLQKLPFKSMTHQHPTLPGDRIRVTCMNVGGEFFVGEAGLFGVICLCHRLRMSVAKFCEHAGGIPEKAGEIVCLENGMSIAQWFKFCIGVGGSIANTRWDWPEWAHMKSSPEEHILKSLASRNSGTGKMGLLSRYGKITGHMNKPAYSNDLSVEGGGHTNVEKLVNRTDETYYRKSVDVHETFTKNSALLQNSAVVNLGPAKNHPVHAFDLNPLTTPSGSPHFEASMGRHYNGNHLAHSHGIHLEKNFDASFCNPMPRFTGVMNHDSRACRPNFSNKTFQDTLSNASNTELKLGQSSYHQSMTTLSPLGQSTMIEFQKPQTHRPPINQNPSPKQATKISKSLSEHNEPSISTGNKKQPLEVVNGMKRSEGDELTDDTSKNSFISLFLSHLERNNTPEPIDDILNSNEHYLPKALDVACGSDHPESATRQIETRVPNDKHSKLASAIVHTKRRSEGISLSVASSGYNPQDASHANSQEHLIHGDSLSHLLPSQPNTGISKISARVSCHANCMSCIHVGNKSHQVAHGEIGVPCFYDKMARGHGTFERVDDCTHRSLRAFTKISCDNGKSCCSSRELLPSFCQNDQPTLGKSICGCCCKIQEDASKLGFIPGHMCRTHFSSDVGPVLANKPTIEGLDEFCACSCSTFTQRSSLCSREYVLQSSCDSCPINGLHCRSCMGHAADSLTKHSLFDPLNTKERGSCCNGRCCYSVVPKCLSSCDFTKHCDVIIDQIGHAAPKDNHQLQMPTRCCTLGENEKLICQCLSNKIAVRNLPQTSHCKDVSEKVMNQPSIAITERLENVSEPSVADDSSSKAVAEKKDAYRDSAVSKGQPNFGFSSGSSSIIVTKFQKSPEFNNVSSTAKHSKHKNLCDEGSRIEKSSASSYVPTSTGCEEPLNSSAKSELGPSRVKRKCNQISEGRRLEETDNEEHCSELLKKTRTLRCSVKGSESDDCTRASSQSSQKGVYQPQNEVNSFSCRVLRTKRKHPIMHLNKHVKQLHRQTKFFEGDEQPDAKGNFLGGLDSYDRKRQVEDMSTLDKTRHHQEGSRAFVRKLPKYVSLNCIVNEPNTNSEGACSGSGGIDSSLIATGITNDNRKSPKIVPLNLVLKKAKRCNAVKLRKTESTHLYEEKSSDCSVNSSDYSIEKYSVDDENCSPQAEYELQDSKRSRYSSNDLRSHVALHKRTSGVIGEDDSLGLTDVEINCLSISSSSNGTKNRRTSVSLARIKKFGSKSVCYSGSDKDNAVLAHEVNARRYSGRLSSNSPCCVCGISDLEPCNRLIECSKCYIKVHQACYGVLKVPRGQWFCRPCKNNTMDTVCVLCGYGGGAMTRALKTKNILKSLLQGLMNLERSEYYVDSLGNASSECTSLQNPVDSAHGDNIMNAKNITSNSWTSGKYYSSLLGPQPMQWVHMVCGLWTPGTKCPNDTTMSAFDVSGASPAKRNTACSICDRTGGSFVKCRAVNCLVFFHAWCAHQRGLLQSEPEGEHNENIGFYGRCVSHAIVFSSHVNPKKEYFRNNNWTCARTEGFKGRKGEGFSDSSHKKYEEYSGEFGVSQEQINAWLRINGSKPCGRGQKEYIHYKQLKGWKHLVVYKSGIHGLGLYTSVFIPRGSMVVEYVGEIVGQRVADRREIEYQSGKRQQYKSACYFFKIDREHIIDATRKGGIARFVNHSCQPNCVAKIISVRNEKKNGT

SEQ ID NO: 227040 - protein, 1439 aa, Zea Mays
MDVEMLPYGIISTFHCLSVRTSPLNMALLPCVYMQMDGVTLRHLLRPFAAQEAAAAGRVAAAPEQLFASHSTLQSGPPPRVGPSNELLTQVPGNYCTFDLAPDLTRANASNAAGTIDFTRAGPSSSAATLPKYPRHGLPASSSNEQSSFGALFPNRSANGMGIFTCQSSANEGIANVGVQFQDSSVHGLQKLPFKSMTHQHPTLPGDRIRVTCMNVGGEFFVGEAGLFGVICLCHRLRMSVAKFCEHAGGIPEKAGEIVCLENGMSIAQWFKFCIGARGHGTFERVDDCTHRSLRAFTKISCDNGKSCCSSRELLPSFCQNDQPTLGKSICGCCCKIQEDASKLGFIPGHMCRTHFSSDVGPVLANKPTIEGLDEFCACSCSTFTQRSSLCSREYVLQSSCDSCPINGLHCRSCMGHAADSLTKHSLFDPLNTKERGSCCNGRCCYSVVPKCLSSCDFTKHCDVIIDQIGHAAPKDNHQLQMPTRCCTLGENEKLICQCLSNKIAVRNLPQTSHCKDVSEKVMNQPSIAITERLENVSEPSVADDSSSKAVAEKKDAYRDSAVSKGQPNFGFSSGSSSIIVTKFQKSPEFNNVSSTAKHSKHKNLCDEGSRIEKSSASSYVPTSTGCEEPLNSSAKSELGPSRVKRKCNQISEGRRLEETDNEEHCSELLKKTRTLRCSVKGSESDDCTRASSQSSQKGVYQPQNEVNSFSCRVLRTKRKHPIMHLNKHVKQLHRQTKFFEGDEQPDAKGNFLGGLDSYDRKRQVEDMSTLDKTRHHQEGSRAFVRKLPKYVSLNCIVNEPNTNSEGACSGSGGIDSSLIATGITNDNRKSPKIVPLNLVLKKAKRCNAVKLRKTESTHLYEEKSSDCSVNSSDYSIEKYSVDDENCSPQAEYELQDSKRSRYSSNDLRSHVALHKRTSGGTKNRRTSVSLARIKKFGSKSVCYSGSDKDNAVLAHEVNARRYSGRLSSNSPCCVCGISDLEPCNRLIECSKCYIKVHQACYGVLKVPRGQWFCRPCKNNTMDTVCVLCGYGGGAMTRALKTKNILKSLLQGLMNLERSEYYVDSLGNASSECTSLQNPVDSAHGDNIMNAKNITSNSWTSGKYYSSLLGPQPMQWVHMVCGLWTPGTKCPNDTTMSAFDVSGASPAKRNTACSICDRTGGSFVKCRAVNCLVFFHAWCAHQRGLLQSEPEGEHNENIGFYGRCVSHAIVFSSHVNPKKEYFRNNNWTCARTEGFKGRKGEGFSDSSHKKYEEYSGEFGVSQEQINAWLRINGSKPCGRGQKEYIHYKQLKGWKHLVVYKSGIHGLGLYTSVFIPRGSMVVEYVGEIVGQRVADRREIEYQSGKRQQYKSACYFFKIDREHIIDATRKGGIARFVNHSCQPNCVAKIISVRNEKKVMFFAERHINPGEEITYDYHFNREDEGQRILCFCRSRYCRRYLN

SEQ ID NO: 227041 - protein, 1594 aa, Zea Mays
MKSSPEEHILKSLASRNSGTGKMGLLSRYGKITGHMNKPAYSNDLSVEGGGHTNVEKLVNRTDETYYRKSVDVHETFTKNSALLQNSAVVNLGPAKNHPVHAFDLNPLTTPSGSPHFEASMGRHYNGNHLAHSHGIHLEKNFDASFCNPMPRFTGVMNHDSRACRPNFSNKTFQDTLSNASNTELKLGQSSYHQSMTTLSPLGQSTMIEFQKPQTHRPPINQNPSPKQATKISKSLSEHNEPSISTGNKKQPLEVVNGMKRSEGDELTDDTSKNSFISLFLSHLERNNTPEPIDDILNSNEHYLPKALDVACGSDHPESATRQIETRVPNDKHSKLASAIVHTKRRSEGISLSVASSGYNPQDASHANSQEHLIHGDSLSHLLPSQPNTGISKISARVSCHANCMSCIHVGNKSHQVAHGEIGVPCFYDKMARGHGTFERVDDCTHRSLRAFTKISCDNGKSCCSSRELLPSFCQNDQPTLGKSICGCCCKIQEDASKLGFIPGHMCRTHFSSDVGPVLANKPTIEGLDEFCACSCSTFTQRSSLCSREYVLQSSCDSCPINGLHCRSCMGHAADSLTKHSLFDPLNTKERGSCCNGRCCYSVVPKCLSSCDFTKHCDVIIDQIGHAAPKDNHQLQMPTRCCTLGENEKLICQCLSNKIAVRNLPQTSHCKDVSEKVMNQPSIAITERLENVSEPSVADDSSSKAVAEKKDAYRDSAVSKGQPNFGFSSGSSSIIVTKFQKSPEFNNVSSTAKHSKHKNLCDEGSRIEKSSASSYVPTSTGCEEPLNSSAKSELGPSRVKRKCNQISEGRRLEETDNEEHCSELLKKTRTLRCSVKGSESDDCTRASSQSSQKGVYQPQNEVNSFSCRVLRTKRKHPIMHLNKHVKQLHRQTKFFEGDEQPDAKGNFLGGLDSYDRKRQVEDMSTLDKTRHHQEGSRAFVRKLPKYVSLNCIVNEPNTNSEGACSGSGGIDSSLIATGITNDNRKSPKIVPLNLVLKKAKRCNAVKLRKTESTHLYEEKSSDCSVNSSDYSIEKYSVDDENCSPQAEYELQDSKRSRYSSNDLRSHVALHKRTSGGTKNRRTSVSLARIKKFGSKSVCYSGSDKDNAVLAHEVNARRYSGRLSSNSPCCVCGISDLEPCNRLIECSKCYIKVHQACYGVLKVPRGQWFCRPCKNNTMDTVCVLCGYGGGAMTRALKTKNILKSLLQGLMNLERSEYYVDSLGNASSECTSLQNPVDSAHGDNIMNAKNITSNSWTSGKYYSSLLGPQPMQWVHMVCGLWTPGTKCPNDTTMSAFDVSGASPAKRNTACSICDRTGGSFVKCRAVNCLVFFHAWCAHQRGLLQSEPEGEHNENIGFYGRCVSHAIVFSSHVNPKKEYFRNNNWTCARTEGFKGRKGEGFSDSSHKKYEEYSGEFGVSQEQINAWLRINGSKPCGRGQKEYIHYKQLKGWKHLVVYKSGIHGLGLYTSVFIPRGSMVVEYVGEIVGQRVADRREIEYQSGKRQQYKSACYFFKIDREHIIDATRKGGIARFVNHSCQPNCVAKIISVRNEKKVMFFAERHINPGEEITYDYHFNREDEGQRILCFCRSRYCRRYLN

SEQ ID NO: 227042 - protein, 2110 aa, Zea Mays
MRTGGGGAVWGGGESSALGGPCSCAWECRGGELGWLQIPTTLGHDEGAEEGAGWDLKFSRLRWLQLALHYSMIGDLEQSLNLLAEVNLAEEGVLQLLLASIHRLSSRTGSDNEATVSSKPFKALYFWVMELYRLMVLAVRFATRMIKCYGLQKQTTDNNSVKLHEMALLLMAIRSIQSRVSAKNQNSVWMGDDKSSLKIGTEVFQHDSSVPVVVLDGVSSGPSGGLDTHDRQELVPVCVPDSNSMLALTPVGSSLSASTFHDIDTNKRTTQVGSQNFQGNIKEMINRWEMNNFDLKIVVREALQSGRLPLAVLQLQLLRQRELVSNDYSEDAFSEVHEIGRSIVYDLLMKGETGLAVATLERLGNDVESDLRQLMQGTVRRSLRLQIADEMKKRGYITPDDWKMLETITLIERLYPSSSFWNTYFYRENVIRDAAKIVTLPGDDKPVLALNIRNHPIIECGDVDGAVLGSWVNINDCTKEFSGSNISDGYWACAAVWSDAWGPRTVDRILLDQPYHVHAHVPWESQFEYFVAHNDVGKVCELLDMIPNSILSEGIIRVNVNSLQAPANTLSDLTVPDYNMYICDSEELEPFCVEIPHVKVFRSLWNHESTLYIRMVMQQELAKRHIFMKEYWQSTTEIIPLLARAGILIKVGLKEECSTIFSASEIPDDAHHQGREGALHKLIIRFCVQYNLPYLLDLYLDTCNLTPDKDCIRLLKENTGDCKWAQWLLFSRIKGYEYEASFSNARWNLSKKMVNNSNPTAVEIDEMLYTVDDMAERIGEMSALATLMYASAPIQKSICTGSVNRSGSSSQCTLENLAPCLQQFPTLWKTLFSACFGQDEYGCLNYSAGNAYGKRSISEYLRWRYSVFSSAGGDTSLLQMLPCWVPKSVRRLIQLFEQGPFGMQLLSTAPSSEELFTHGVSNYIYNSTGYTEANALSLEASIQKSVEEELYSSLEEKDVRVEHHLHRGRALAAFRHLIAKRASQLKSASARQVISAQSNVQADVQLILAPLSQVERSILISVAPLAITNFEDSTLVASCIFLLELCGLCANMLRLDIAALRRISSYYKSVQENKHVDLSPPRGPELHVQSHGAGIAPALARALAEDYVQSDHLHVLEQTQTSMAPKREQTQYPLISILQHLEKASLPSLEEGKTCGFWLLTGVGDASLYRSQQNEASQHWNLVTEFCQAHYLPLSTKYLALLANDNDWVGFLTEAQIAGFSIEAVIEVAAKEIRDSRLRAHILTVLKNMISLRRKSSGNVPSGSSDPSFSSVDGNNPMELFCILGVCEKQKNPGEALLIKAKQMQWSLLAMIASCFPDVTPLTCLSVWLEITAAREMSSIKVDDVSLKIAKNVGSAVEATNKLPSTSRNVEFRYNRKNPKRRRFLEASHEKLCFSIDSTCGPDSAATSNPISIVDHQGIGKPISGETIMSVDIDERLASLSNMVAVLCEQQLFLPLLRAFEMFLPSCSLLSFIRSLQAFSQMRLPEASARLASFSARIKDEASHTQLNSSKEVSVIAEWVATTAVKAADAVLSNCSSIYEKRCLLQLLSAVDFADGGTSSSYFSRRYWKINLSEPSLCKDTDVYNWNDLMDDASLLTSLEKDGQWEQARTWARHLESSGIAWESTLDHVTESQAEAMVAEWKEFLWDIPQERAALWGHCQSLFMRYSFPPLKAGLFFLKHAEAVGKEIPAQELHEILLLSLQWLSGTMTKSSPVYPLHLLREIETRVWLLAVESESQSKVDGEFATSAVAHNKAVGNSSSIIEHTADIITKIDSNMSLPHMKITERNSTRDSLSYQHVQLFESNSEASSTTINNTRAKRRMKTNSPLKRGVNDNIESRANELDNNSNTLHSSKIGEQARNLLSEEEFVKMEASLSGWEQNVRPVDMEKAVLSLLEFGQITAAKQLQQKLSPSYIPEELVLVDVALRIAKNSSNGEINLSCFDTQALRILQSLRVANSCDMISPSQVMEILAAKCGEGRGRALIRRIIGVVRTARLLGLPFSEAFEKQPIELLQLLSLKAQDSFDEAKFLVETHIMPASSIARILADSFLKVCSLLRFLQYTWVCDIAVLLLFHDMLSILDRGFWPHIVEAIWIPKRKRVLHLYCGDQVTS

SEQ ID NO: 227043 - protein, 2111 aa, Zea Mays
MRTGGGGAVWGGGESSALGGPCSCAWECRGGELGWLQIPTTLGHDEGAEEGAGWDLKFSRLRWLQLALHYSMIGDLEQSLNLLAEVNLAEEGVLQLLLASIHRLSSRTGSDNEATVSSKPFKALYFWVMELYRLMVLAVRFATRMIKCYGLQKQTTDNNSVKLHEMALLLMAIRSIQSRVSAKNQNSVWMQGDDKSSLKIGTEVFQHDSSVPVVVLDGVSSGPSGGLDTHDRQELVPVCVPDSNSMLALTPVGSSLSASTFHDIDTNKRTTQVGSQNFQGNIKEMINRWEMNNFDLKIVVREALQSGRLPLAVLQLQLLRQRELVSNDYSEDAFSEVHEIGRSIVYDLLMKGETGLAVATLERLGNDVESDLRQLMQGTVRRSLRLQIADEMKKRGYITPDDWKMLETITLIERLYPSSSFWNTYFYRENVIRDAAKIVTLPGDDKPVLALNIRNHPIIECGDVDGAVLGSWVNINDCTKEFSGSNISDGYWACAAVWSDAWGPRTVDRILLDQPYHVHAHVPWESQFEYFVAHNDVGKVCELLDMIPNSILSEGIIRVNVNSLQAPANTLSDLTVPDYNMYICDSEELEPFCVEIPHVKVFRSLWNHESTLYIRMVMQQELAKRHIFMKEYWQSTTEIIPLLARAGILIKVGLKEECSTIFSASEIPDDAHHQGREGALHKLIIRFCVQYNLPYLLDLYLDTCNLTPDKDCIRLLKENTGDCKWAQWLLFSRIKGYEYEASFSNARWNLSKKMVNNSNPTAVEIDEMLYTVDDMAERIGEMSALATLMYASAPIQKSICTGSVNRSGSSSQCTLENLAPCLQQFPTLWKTLFSACFGQDEYGCLNYSAGNAYGKRSISEYLRWRYSVFSSAGGDTSLLQMLPCWVPKSVRRLIQLFEQGPFGMQLLSTAPSSEELFTHGVSNYIYNSTGYTEANALSLEASIQKSVEEELYSSLEEKDVRVEHHLHRGRALAAFRHLIAKRASQLKSASARQVISAQSNVQADVQLILAPLSQVERSILISVAPLAITNFEDSTLVASCIFLLELCGLCANMLRLDIAALRRISSYYKSVQENKHVDLSPPRGPELHVQSHGAGIAPALARALAEDYVQSDHLHVLEQTQTSMAPKREQTQYPLISILQHLEKASLPSLEEGKTCGFWLLTGVGDASLYRSQQNEASQHWNLVTEFCQAHYLPLSTKYLALLANDNDWVGFLTEAQIAGFSIEAVIEVAAKEIRDSRLRAHILTVLKNMISLRRKSSGNVPSGSSDPSFSSVDGNNPMELFCILGVCEKQKNPGEALLIKAKQMQWSLLAMIASCFPDVTPLTCLSVWLEITAAREMSSIKVDDVSLKIAKNVGSAVEATNKLPSTSRNVEFRYNRKNPKRRRFLEASHEKLCFSIDSTCGPDSAATSNPISIVDHQGIGKPISGETIMSVDIDERLASLSNMVAVLCEQQLFLPLLRAFEMFLPSCSLLSFIRSLQAFSQMRLPEASARLASFSARIKDEASHTQLNSSKEVSVIAEWVATTAVKAADAVLSNCSSIYEKRCLLQLLSAVDFADGGTSSSYFSRRYWKINLSEPSLCKDTDVYNWNDLMDDASLLTSLEKDGQWEQARTWARHLESSGIAWESTLDHVTESQAEAMVAEWKEFLWDIPQERAALWGHCQSLFMRYSFPPLKAGLFFLKHAEAVGKEIPAQELHEILLLSLQWLSGTMTKSSPVYPLHLLREIETRVWLLAVESESQSKVDGEFATSAVAHNKAVGNSSSIIEHTADIITKIDSNMSLPHMKITERNSTRDSLSYQHVQLFESNSEASSTTINNTRAKRRMKTNSPLKRGVNDNIESRANELDNNSNTLHSSKIGEQARNLLSEEEFVKMEASLSGWEQNVRPVDMEKAVLSLLEFGQITAAKQLQQKLSPSYIPEELVLVDVALRIAKNSSNGEINLSCFDTQALRILQSLRVANSCDMISPSQVMEILAAKCGEGRGRALIRRIIGVVRTARLLGLPFSEAFEKQPIELLQLLSLKAQDSFDEAKFLVETHIMPASSIARILADSFLKVCSLLRFLQYTWVCDIAVLLLFHDMLSILDRGFWPHIVEAIWIPKRKRVLHLYCGDQVTS

SEQ ID NO: 227044 - protein, 2460 aa, Zea Mays
MRTGGGGAVWGGGESSALGGPCSCAWECRGGELGWLQIPTTLGHDEGAEEGAGWDLKFSRLRWLQLALHYSMIGDLEQSLNLLAEVNLAEEGVLQLLLASIHRLSSRTGSDNEATVSSKLMVLAVRFATRMIKCYGLQKQTTDNNSVKLHEMALLLMAIRSIQSRVSAKNQNSVWMGDDKSSLKIGTEVFQHDSSVPVVVLDGVSSGPSGGLDTHDRQELVPVCVPDSNSMLALTPVGSSLSASTFHDIDTNKRTTQVGSQNFQGNIKEMINRWEMNNFDLKIVVREALQSGRLPLAVLQLQLLRQRELVSNDYSEDAFSEVHEIGRSIVYDLLMKGETGLAVATLERLGNDVESDLRQLMQGTVRRSLRLQIADEMKKRGYITPDDWKMLETITLIERLYPSSSFWNTYFYRENVIRDAAKIVTLPGDDKPVLALNIRNHPIIECGDVDGAVLGSWVNINDCTKEFSGSNISDGYWACAAVWSDAWGPRTVDRILLDQPYHVHAHVPWESQFEYFVAHNDVGKVCELLDMIPNSILSEGIIRVNVNSLQAPANTLSDLTVPDYNMYICDSEELEPFCVEIPHVKVFRSLWNHESTLYIRMVMQQELAKRHIFMKEYWQSTTEIIPLLARAGILIKVGLKEECSTIFSASEIPDDAHHQGREGALHKLIIRFCVQYNLPYLLDLYLDTCNLTPDKDCIRLLKENTGDCKWAQWLLFSRIKGYEYEASFSNARWNLSKKMVNNSNPTAVEIDEMLYTVDDMAERIGEMSALATLMYASAPIQKSICTGSVNRSGSSSQCTLENLAPCLQQFPTLWKTLFSACFGQDEYGCLNYSAGNAYGKRSISEYLRWRYSVFSSAGGDTSLLQMLPCWVPKSVRRLIQLFEQGPFGMQLLSTAPSSEELFTHGVSNYIYNSTGYTEANALSLEASIQKSVEEELYSSLEEKDVRVEHHLHRGRALAAFRHLIAKRASQLKSASARQVISAQSNVQADVQLILAPLSQVERSILISVAPLAITNFEDSTLVASCIFLLELCGLCANMLRLDIAALRRISSYYKSVQENKHVDLSPPRGPELHVQSHGAGIAPALARALAEDYVQSDHLHVLEQTQTSMAPKREQTQYPLISILQHLEKASLPSLEEGKTCGFWLLTGVGDASLYRSQQNEASQHWNLVTEFCQAHYLPLSTKYLALLANDNDWVGFLTEAQIAGFSIEAVIEVAAKEIRDSRLRAHILTVLKNMISLRRKSSGNVPSGSSDPSFSSVDGNNPMELFCILGVCEKQKNPGEALLIKAKQMQWSLLAMIASCFPDVTPLTCLSVWLEITAAREMSSIKVDDVSLKIAKNVGSAVEATNKLPSTSRNVEFRYNRKNPKRRRFLEASHEKLCFSIDSTCGPDSAATSNPISIVDHQGIGKPISGETIMSVDIDERLASLSNMVAVLCEQQLFLPLLRAFEMFLPSCSLLSFIRSLQAFSQMRLPEASARLASFSARIKDEASHTQLNSSKEVSVIAEWVATTAVKAADAVLSNCSSIYEKRCLLQLLSAVDFADGGTSSSYFSRRYWKINLSEPSLCKDTDVYNWNDLMDDASLLTSLEKDGQWEQARTWARHLESSGIAWESTLDHVTESQAEAMVAEWKEFLWDIPQERAALWGHCQSLFMRYSFPPLKAGLFFLKHAEAVGKEIPAQELHEILLLSLQWLSGTMTKSSPVYPLHLLREIETRVWLLAVESESQSKVDGEFATSAVAHNKAVGNSSSIIEHTADIITKIDSNMSLPHMKITERNSTRDSLSYQHVQLFESNSEASSTTINNTRAKRRMKTNSPLKRGVNDNIESRANELDNNSNTLHSSKIGEQARNLLSEEEFVKMEASLSGWEQNVRPVDMEKAVLSLLEFGQITAAKQLQQKLSPSYIPEELVLVDVALRIAKNSSNGEINLSCFDTQALRILQSLRVANSCDMISPSQVMEILAAKCGEGRGRALIRRIIGVVRTARLLGLPFSEAFEKQPIELLQLLSLKAQDSFDEAKFLVETHIMPASSIARILADSFLKGLLAAHRGGYLDSQKEEGPAPLLWRSSDFLKWAKLCPSESEIGHALMRLVMTGHEVPHACEVELLILSHHFYMSSSCLDGVDVLVTFAANRVDSYVLEEDFSCLARLITGVSNFHSLSFILSILVENGQLELLLQKYSATDTATGTLASVRGFRMAVITSLKQFIPNDDDALSMVYKHFDMKHEAASLLESRAEQYMNSWLSRYDKERRNDELLDAMHHLVETAEVLSTIDAGQRTHRACARASLLSLQIRIPDLLWIGLSETNARRIFVEQSRFQEALIVAEAYNINQPIEWAPVFWNQMLKPDLIEQFVAEFVSVLPLQPPMLLELARFYRAEVAARGEQSHFSVWLSPGGLPAEWVKHLGRSFRSLLRRTRDMRLRLQLATLATGFIDVLVICNRVLDKVPDNAGPLILRKGHGGAYLPLM

SEQ ID NO: 227045 - protein, 2440 aa, Zea Mays
MRTGGGGAVWGGGESSALGGPCSCAWECRGGELGWLQIPTTLGHDEGAEEGAGWDLKFSRLRWLQLALHYSMIGDLEQSLNLLAEVNLAEEGVLQLLLASIHRLSSRTGSDNEATVSSKLMVLAVRFATRMIKCYGLQKQTTDNNSVKLHEMALLLMAIRSIQSRVSAKNQNSVWMQGDDKSSLKIGPSGGLDTHDRQELVPVCVPDSNSMLALTPVGSSLSASTFHDIDTNKRTTQVGSQNFQGNIKEMINRWEMNNFDLKIVVREALQSGRLPLAVLQLQLLRQRELVSNDYSEDAFSEVHEIGRSIVYDLLMKGETGLAVATLERLGNDVESDLRQLMQGTVRRSLRLQIADEMKKRGYITPDDWKMLETITLIERLYPSSSFWNTYFYRENVIRDAAKIVTLPGDDKPVLALNIRNHPIIECGDVDGAVLGSWVNINDCTKEFSGSNISDGYWACAAVWSDAWGPRTVDRILLDQPYHVHAHVPWESQFEYFVAHNDVGKVCELLDMIPNSILSEGIIRVNVNSLQAPANTLSDLTVPDYNMYICDSEELEPFCVEIPHVKVFRSLWNHESTLYIRMVMQQELAKRHIFMKEYWQSTTEIIPLLARAGILIKVGLKEECSTIFSASEIPDDAHHQGREGALHKLIIRFCVQYNLPYLLDLYLDTCNLTPDKDCIRLLKENTGDCKWAQWLLFSRIKGYEYEASFSNARWNLSKKMVNNSNPTAVEIDEMLYTVDDMAERIGEMSALATLMYASAPIQKSICTGSVNRSGSSSQCTLENLAPCLQQFPTLWKTLFSACFGQDEYGCLNYSAGNAYGKRSISEYLRWRYSVFSSAGGDTSLLQMLPCWVPKSVRRLIQLFEQGPFGMQLLSTAPSSEELFTHGVSNYIYNSTGYTEANALSLEASIQKSVEEELYSSLEEKDVRVEHHLHRGRALAAFRHLIAKRASQLKSASARQVISAQSNVQADVQLILAPLSQVERSILISVAPLAITNFEDSTLVASCIFLLELCGLCANMLRLDIAALRRISSYYKSVQENKHVDLSPPRGPELHVQSHGAGIAPALARALAEDYVQSDHLHVLEQTQTSMAPKREQTQYPLISILQHLEKASLPSLEEGKTCGFWLLTGVGDASLYRSQQNEASQHWNLVTEFCQAHYLPLSTKYLALLANDNDWVGFLTEAQIAGFSIEAVIEVAAKEIRDSRLRAHILTVLKNMISLRRKSSGNVPSGSSDPSFSSVDGNNPMELFCILGVCEKQKNPGEALLIKAKQMQWSLLAMIASCFPDVTPLTCLSVWLEITAAREMSSIKVDDVSLKIAKNVGSAVEATNKLPSTSRNVEFRYNRKNPKRRRFLEASHEKLCFSIDSTCGPDSAATSNPISIVDHQGIGKPISGETIMSVDIDERLASLSNMVAVLCEQQLFLPLLRAFEMFLPSCSLLSFIRSLQAFSQMRLPEASARLASFSARIKDEASHTQLNSSKEVSVIAEWVATTAVKAADAVLSNCSSIYEKRCLLQLLSAVDFADGGTSSSYFSRRYWKINLSEPSLCKDTDVYNWNDLMDDASLLTSLEKDGQWEQARTWARHLESSGIAWESTLDHVTESQAEAMVAEWKEFLWDIPQERAALWGHCQSLFMRYSFPPLKAGLFFLKHAEAVGKEIPAQELHEILLLSLQWLSGTMTKSSPVYPLHLLREIETRVWLLAVESESQSKVDGEFATSAVAHNKAVGNSSSIIEHTADIITKIDSNMSLPHMKITERNSTRDSLSYQHVQLFESNSEASSTTINNTRAKRRMKTNSPLKRGVNDNIESRANELDNNSNTLHSSKIGEQARNLLSEEEFVKMEASLSGWEQNVRPVDMEKAVLSLLEFGQITAAKQLQQKLSPSYIPEELVLVDVALRIAKNSSNGEINLSCFDTQALRILQSLRVANSCDMISPSQVMEILAAKCGEGRGRALIRRIIGVVRTARLLGLPFSEAFEKQPIELLQLLSLKAQDSFDEAKFLVETHIMPASSIARILADSFLKGLLAAHRGGYLDSQKEEGPAPLLWRSSDFLKWAKLCPSESEIGHALMRLVMTGHEVPHACEVELLILSHHFYMSSSCLDGVDVLVTFAANRVDSYVLEEDFSCLARLITGVSNFHSLSFILSILVENGQLELLLQKYSATDTATGTLASVRGFRMAVITSLKQFIPNDDDALSMVYKHFDMKHEAASLLESRAEQYMNSWLSRYDKERRNDELLDAMHHLVETAEVLSTIDAGQRTHRACARASLLSLQIRIPDLLWIGLSETNARRIFVEQSRFQEALIVAEAYNINQPIEWAPVFWNQMLKPDLIEQFVAEFVSVLPLQPPMLLELARFYRAEVAARGEQSHFSVWLSPGGLPAEWVKHLGRSFRSLLRRTRDMRLRLQLATLATGFIDVLVICNRVLDKVPDNAGPLILRKGHGGAYLPLM

SEQ ID NO: 227046 - protein, 3042 aa, Zea Mays
MSTSRQIDDGPAVLQLCRWTLLQPHLKLSKFREAFISPTRRLFGLLSDHGDLVLATAEINSSQVESHRALSDTCTQAVFKTFSTIPRVKSLAWGYCSDAFDDSSFNEILVVSSDASITVHAFCHSRKSTLTVNSMSDAKELHGEWKEWRPTECSVLEDGESGPENWFCSFLTTVTASVSNGKYQARLPMKSLLPNSAEVVSFSIYDITLSFLKYWYSKCSLKTMAETDSESPRRFLRASCSCQWECLKVLSSSSCYLIGLVLTPNESVRCEAHPSNAECILVTVLELNHWGIQWNFVADLQDVSDGITPSPKWVDFQLSDVFLACLNTAGFVAIWNVKTGGLVTSFSVLQQCRTDLEMPLRSSMSIVTNLDEGNIHVENFVGRMFKRLVLASYSYLLAVVDEVGVVYVFYADDILNFKANVHENFDLPVMNQFADCFSIWEAAGHEIGSLSFCANQSIQQGSLSLTKLVPEFSGKSDDIVRPRERRKYRCDENEVDSWPSGFVTAGQMKVGAGYRRTNSSCFFRRIILPPCRSQQDVISLCPLGLTRIFKGSIADGNEHVKIFHSELLMYSSFLGKGDIDIGFMDEMLPFKKDSTFVGDSVVCSCQGYLYLITQYGLSVVLPPVSISSFSSQCDAIKFWQMGPAAGSTCNALNLLSVDKSDTSWKTWQIEVLDRALLYEGPALADRLCWENGWDLKFSRLRWLQLALHYSMIGDLEQSLNLLAEVNLAEEGVLQLLLASIHRLSSRTGSDNEATVSSKLMVLAVRFATRMIKCYGLQKQTTDNNSVKLHEMALLLMAIRSIQSRVSAKNQNSVWMGDDKSSLKIGTEVFQHDSSVPVVVLDGVSSGPSGGLDTHDRQELVPVCVPDSNSMLALTPVGSSLSASTFHDIDTNKRTTQVGSQNFQGNIKEMINRWEMNNFDLKIVVREALQSGRLPLAVLQLQLLRQRELVSNDYSEDAFSEVHEIGRSIVYDLLMKGETGLAVATLERLGNDVESDLRQLMQGTVRRSLRLQIADEMKKRGYITPDDWKMLETITLIERLYPSSSFWNTYFYRENVIRDAAKIVTLPGDDKPVLALNIRNHPIIECGDVDGAVLGSWVNINDCTKEFSGSNISDGYWACAAVWSDAWGPRTVDRILLDQPYHVHAHVPWESQFEYFVAHNDVGKVCELLDMIPNSILSEGIIRVNVNSLQAPANTLSDLTVPDYNMYICDSEELEPFCVEIPHVKVFRSLWNHESTLYIRMVMQQELAKRHIFMKEYWQSTTEIIPLLARAGILIKVGLKEECSTIFSASEIPDDAHHQGREGALHKLIIRFCVQYNLPYLLDLYLDTCNLTPDKDCIRLLKENTGDCKWAQWLLFSRIKGYEYEASFSNARWNLSKKMVNNSNPTAVEIDEMLYTVDDMAERIGEMSALATLMYASAPIQKSICTGSVNRSGSSSQCTLENLAPCLQQFPTLWKTLFSACFGQDEYGCLNYSAGNAYGKRSISEYLRWRYSVFSSAGGDTSLLQMLPCWVPKSVRRLIQLFEQEKDVRVEHHLHRGRALAAFRHLIAKRASQLKSASARQVISAQSNVQADVQLILAPLSQVERSILISVAPLAITNFEDSTLVASCIFLLELCGLCANMLRLDIAALRRISSYYKSVQENKHVDLSPPRGPELHVQSHGAGIAPALARALAEDYVQSDHLHVLEQTQTSMAPKREQTQYPLISILQHLEKASLPSLEEGKTCGFWLLTGVGDASLYRSQQNEASQHWNLVTEFCQAHYLPLSTKYLALLANDNDWVGFLTEAQIAGFSIEAVIEVAAKEIRDSRLRAHILTVLKNMISLRRKSSGNVPSGSSDPSFSSVDGNNPMELFCILGVCEKQKNPGEALLIKAKQMQWSLLAMIASCFPDVTPLTCLSVWLEITAAREMSSIKVDDVSLKIAKNVGSAVEATNKLPSTSRNVEFRYNRKNPKRRRFLEASHEKLCFSIDSTCGPDSAATSNPISIVDHQGIGKPISGETIMSVDIDERLASLSNMVAVLCEQQLFLPLLRAFEMFLPSCSLLSFIRSLQAFSQMRLPEASARLASFSARIKDEASHTQLNSSKEVSVIAEWVATTAVKAADAVLSNCSSIYEKRCLLQLLSAVDFADGGTSSSYFSRRYWKINLSEPSLCKDTDVYNWNDLMDDASLLTSLEKDGQWEQARTWARHLESSGIAWESTLDHVTESQAEAMVAEWKEFLWDIPQERAALWGHCQSLFMRYSFPPLKAGLFFLKHAEAVGKEIPAQELHEILLLSLQWLSGTMTKSSPVYPLHLLREIETRVWLLAVESESQSKVDGEFATSAVAHNKAVGNSSSIIEHTADIITKIDSNMSLPHMKITERNSTRDSLSYQHVQLFESNSEASSTTINNTRAKRRMKTNSPLKRGVNDNIESRANELDNNSNTLHSSKIGEQARNLLSEEEFVKMEASLSGWEQNVRPVDMEKAVLSLLEFGQITAAKQLQQKLSPSYIPEELVLVDVALRIAKNSSNGEINLSCFDTQALRILQSLRVANSCDMISPSQVMEILAAKCGEGRGRALIRRIIGVVRTARLLGLPFSEAFEKQPIELLQLLSLKAQDSFDEAKFLVETHIMPASSIARILADSFLKGLLAAHRGGYLDSQKEEGPAPLLWRSSDFLKWAKLCPSESEIGHALMRLVMTGHEVPHACEVELLILSHHFYMSSSCLDGVDVLVTFAANRVDSYVLEEDFSCLARLITGVSNFHSLSFILSILVENGQLELLLQKYSATDTATGTLASVRGFRMAVITSLKQFIPNDDDALSMVYKHFDMKHEAASLLESRAEQYMNSWLSRYDKERRNDELLDAMHHLVETAEVLSTIDAGQRTHRACARASLLSLQIRIPDLLWIGLSETNARRIFVEQSRFQEALIVAEAYNINQPIEWAPVFWNQMLKPDLIEQFVAEFVSVLPLQPPMLLELARFYRAEVAARGEQSHFSVWLSPGGLPAEWVKHLGRSFRSLLRRTRDMRLRLQLATLATGFIDVLVICNRVLDKVPDNAGPLILRKGHGGAYLPLM

SEQ ID NO: 227047 - protein, 3097 aa, Zea Mays
MSTSRQIDDGPAVLQLCRWTLLQPHLKLSKFREAFISPTRRLFGLLSDHGDLVLATAEINSSQVESHRALSDTCTQAVFKTFSTIPRVKSLAWGYCSDAFDDSSFNEILVVSSDASITVHAFCHSRKSTLTVNSMSDAKELHGEWKEWRPTECSVLEDGESGPENWFCSFLTTVTASVSNGKYQARLPMKSLLPNSAEVVSFSIYDITLSFLKYWYSKCSLKTMAETDSESPRRFLRASCSCQWECLKVLSSSSCYLIGLVLTPNESVRCEAHPSNAECILVTVLELNHWGIQWNFVADLQDVSDGITPSPKWVDFQLSDVFLACLNTAGFVAIWNVKTGGLVTSFSVLQQCRTDLEMPLRSSMSIVTNLDEGNIHVENFVGRMFKRLVLASYSYLLAVVDEVGVVYVFYADDILNFKANVHENFDLPVMNQFADCFSIWEAAGHEIGSLSFCANQSIQQGSLSLTKLVPEFSGKSDDIVRPRERRKYRCDENEVDSWPSGFVTAGQMKVGAGYRRTNSSCFFRRIILPPCRSQQDVISLCPLGLTRIFKGSIADGNEHVKIFHSELLMYSSFLGKGDIDIGFMDEMLPFKKDSTFVGDSVVCSCQGYLYLITQYGLSVVLPPVSISSFSSQCDAIKFWQMGPAAGSTCNALNLLSVDKSDTSWKTWQIEVLDRALLYEGPALADRLCWENGWDLKFSRLRWLQLALHYSMIGDLEQSLNLLAEVNLAEEGVLQLLLASIHRLSSRTGSDNEATVSSKLMVLAVRFATRMIKCYGLQKQTTDNNSVKLHEMALLLMAIRSIQSRVSAKNQNSVWMGDDKSSLKIGTEVFQHDSSVPVVVLDGVSSGPSGGLDTHDRQELVPVCVPDSNSMLALTPVGSSLSASTFHDIDTNKRTTQVGSQNFQGNIKEMINRWEMNNFDLKIVVREALQSGRLPLAVLQLQLLRQRELVSNDYSEDAFSEVHEIGRSIVYDLLMKGETGLAVATLERLGNDVESDLRQLMQGTVRRSLRLQIADEMKKRGYITPDDWKMLETITLIERLYPSSSFWNTYFYRENVIRDAAKIVTLPGDDKPVLALNIRNHPIIECGDVDGAVLGSWVNINDCTKEFSGSNISDGYWACAAVWSDAWGPRTVDRILLDQPYHVHAHVPWESQFEYFVAHNDVGKVCELLDMIPNSILSEGIIRVNVNSLQAPANTLSDLTVPDYNMYICDSEELEPFCVEIPHVKVFRSLWNHESTLYIRMVMQQELAKRHIFMKEYWQSTTEIIPLLARAGILIKVGLKEECSTIFSASEIPDDAHHQGREGALHKLIIRFCVQYNLPYLLDLYLDTCNLTPDKDCIRLLKENTGDCKWAQWLLFSRIKGYEYEASFSNARWNLSKKMVNNSNPTAVEIDEMLYTVDDMAERIGEMSALATLMYASAPIQKSICTGSVNRSGSSSQCTLENLAPCLQQFPTLWKTLFSACFGQDEYGCLNYSAAYGKRSISEYLRWRYSVFSSAGGDTSLLQMLPCWVPKSVRRLIQLFEQGPFGMQLLSTAPSSEELFTHGVSNYIYNSTGYTEANALSLEASIQKSVEEELYSSLEEKDVRVEHHLHRGRALAAFRHLIAKRASQLKSASARQVISAQSNVQADVQLILAPLSQVERSILISVAPLAITNFEDSTLVASCIFLLELCGLCANMLRLDIAALRRISSYYKSVQENKHVDLSPPRGPELHVQSHGAGIAPALARALAEDYVQSDHLHVLEQTQTSMAPKREQTQYPLISILQHLEKASLPSLEEGKTCGFWLLTGVGDASLYRSQQNEASQHWNLVTEFCQAHYLPLSTKYLALLANDNDWVGFLTEAQIAGFSIEAVIEVAAKEIRDSRLRAHILTVLKNMISLRRKSSGNVPSGSSDPSFSSVDGNNPMELFCILGVCEKQKNPGEALLIKAKQMQWSLLAMIASCFPDVTPLTCLSVWLEITAAREMSSIKVDDVSLKIAKNVGSAVEATNKLPSTSRNVEFRYNRKNPKRRRFLEASHEKLCFSIDSTCGPDSAATSNPISIVDHQGIGKPISGETIMSVDIDERLASLSNMVAVLCEQQLFLPLLRAFEMFLPSCSLLSFIRSLQAFSQMRLPEASARLASFSARIKDEASHTQLNSSKEVSVIAEWVATTAVKAADAVLSNCSSIYEKRCLLQLLSAVDFADGGTSSSYFSRRYWKINLSEPSLCKDTDVYNWNDLMDDASLLTSLEKDGQWEQARTWARHLESSGIAWESTLDHVTESQAEAMVAEWKEFLWDIPQERAALWGHCQSLFMRYSFPPLKAGLFFLKHAEAVGKEIPAQELHEILLLSLQWLSGTMTKSSPVYPLHLLREIETRVWLLAVESESQSKVDGEFATSAVAHNKAVGNSSSIIEHTADIITKIDSNMSLPHMKITERNSTRDSLSYQHVQLFESNSEASSTTINNTRAKRRMKTNSPLKRGVNDNIESRANELDNNSNTLHSSKIGEQARNLLSEEEFVKMEASLSGWEQNVRPVDMEKAVLSLLEFGQITAAKQLQQKLSPSYIPEELVLVDVALRIAKNSSNGEINLSCFDTQALRILQSLRVANSCDMISPSQVMEILAAKCGEGRGRALIRRIIGVVRTARLLGLPFSEAFEKQPIELLQLLSLKAQDSFDEAKFLVETHIMPASSIARILADSFLKGLLAAHRGGYLDSQKEEGPAPLLWRSSDFLKWAKLCPSESEIGHALMRLVMTGHEVPHACEVELLILSHHFYMSSSCLDGVDVLVTFAANRVDSYVLEEDFSCLARLITGVSNFHSLSFILSILVENGQLELLLQKYSATDTATGTLASVRGFRMAVITSLKQFIPNDDDALSMVYKHFDMKHEAASLLESRAEQYMNSWLSRYDKERRNDELLDAMHHLVETAEVLSTIDAGQRTHRACARASLLSLQIRIPDLLWIGLSETNARRIFVEQSRFQEALIVAEAYNINQPIEWAPVFWNQMLKPDLIEQFVAEFVSVLPLQPPMLLELARFYRAEVAARGEQSHFSVWLSPGGLPAEWVKHLGRSFRSLLRRTRDMRLRLQLATLATGFIDVLVICNRVLDKVPDNAGPLILRKGHGGAYLPLM

SEQ ID NO: 227048 - protein, 970 aa, Zea Mays
MSSLVERLRVRSERRPRYALDESDDDLPLRVGAGKGKDQQNDAPAERIEREDAKEEACQRCGKSDNLVSCSTCTYKFHRKCLVPCLNITSDKWSCPECVSPLTEMERILDIEVLEAPREDSSSTEPRSKKMERYLIKWKGLSYIHCSWVSEKEYSEAANIHPRLRTRLNNFRRQKEAMKIEAERSGEDIVAIRPEWTTVDRILASRKNLVGDREYYVKWNELTYEECTWENESDITVFQPEIERFNEIQFRRKKSGDKGKATREPRQFKESPTFLSGGTLHPYQLEGLNFLRYSWFHNKRVILGDEMGLGKTIQSIAFLASLFEDKFGPHLVVAPLSTLRNWEREFATWAPQMNVVMYFGAAASRDIIRKYEFYYPKEKLKKLKKKKSSPSNEDKKQSRIRFDVLLTSYEMINMDSSILKNIEWECLVVDEGHRLKNKDSKLFGQLKDYNTKHRVLLTGTPVQNNLDELFMLMHFLEGESFGSITDLQEEFKDINQDKQIEKLHGMLKPHLLRRFKKDVMKELPPKKELILRVELTRKQKEYYKAILTKNYEVLARRNGGHTSLINVVMELRKLCCHGFMIDEPDLEPANPEEGLRRLLDSSGKMQLLDKMMVKLKEQGHRVLIYSQFQHMLDLLEDYLSYRKWTYERIDGKISGADRQIRIDRFNAKNSTRFCFLLSTRAGGLGINLATADTVIIYDSDWNPHADLQAMARAHRLGQTSKVMIYRLVSRGTIEERMMQLTKKKILLEHLVVGRLTKANNVNQEELDDIIRYGSKELFEDENDESRQIHYDEAAIERLLDRDQVDGDESVEDEEEDGFLKGFKVANFEYIDEAKAQAEKEEARRKAAAEAENSERNYWDELLKDRYDVQKVEEHTAMGKGKRSRKQMAAADEDDIHDLSSEDEDYSLEDDISDNDTSLQGNISGKRGQYSKRKSRNVDSIPLMEGEGRTLRVLGFNHAQRAMFLQTLNRC

SEQ ID NO: 227049 - protein, 1176 aa, Zea Mays
MSSLVERLRVRSERRPRYALDESDDDLPLRVGAGKGKDQQNDAPAERIEREDAKEEACQRCGKSDNLVSCSTCTYKFHRKCLVPCLNITSDKWSCPECVSPLTEMERILDIEVLEAPREDSSSTEPRSKKMERYLIKWKGLSYIHCSWVSEKEYSEAANIHPRLRTRLNNFRRQKEAMKIEAERSGEDIVAIRPEWTTVDRILASRKNLVGDREYYVKWNELTYEECTWENESDITVFQPEIERFNEIQFRRKKSGDKGKATREPRQFKESPTFLSGGTLHPYQLEGLNFLRYSWFHNKRVILGDEMGLGKTIQSIAFLASLFEDKFGPHLVVAPLSTLRNWEREFATWAPQMNVVMYFGAAASRDIIRKYEFYYPKEKLKKLKKKKSSPSNEDKKQSRIRFDVLLTSYEMINMDSSILKNIEWECLVVDEGHRLKNKDSKLFGQLKDYNTKHRVLLTGTPVQNNLDELFMLMHFLEGESFGSITDLQEEFKDINQDKQIEKLHGMLKPHLLRRFKKDVMKELPPKKELILRVELTRKQKEYYKAILTKNYEVLARRNGGHTSLINVVMELRKLCCHGFMIDEPDLEPANPEEGLRRLLDSSGKMQLLDKMMVKLKEQGHRVLIYSQFQHMLDLLEDYLSYRKWTYERIDGKISGADRQIRIDRFNAKNSTRFCFLLSTRAGGLGINLATADTVIIYDSDWNPHADLQAMARAHRLGQTSKVMIYRLVSRGTIEERMMQLTKKKILLEHLVVGRLTKANNVNQEELDDIIRYGSKELFEDENDESRQIHYDEAAIERLLDRDQVDGDESVEDEEEDGFLKGFKVANFEYIDEAKAQAEKEEARRKAAAEAENSERNYWDELLKDRYDVQKVEEHTAMGKGKRSRKQMAAADEDDIHDLSSEDEDYSLEDDISDNDTSLQGNISGKRGQYSKRKSRNVDSIPLMEGEGRTLRVLGFNHAQRAMFLQTLNRFGFQNYDWKEYLPRLKGKSVEEIQRYAELVMAHLVEEINDSDYFSDGVPKEMMRVDDVLVRIANISLIEEKMAATGPGKITNIFPNYLLYEFQGLSGGRIWKAEHDLLLLRGILKHGYARWQYISDDRENGLFEAARRELHLPSVNEIIGAQLNEANGNLEGAQEGQANTTSMSHYKEIQRKIVEFLRKRYHLMERALNMEYAVVRY

SEQ ID NO: 227050 - protein, 73 aa, Zea Mays
MAVCQIRSDLIYCCCPGRPPVPNRLPMTTFSGSLVCNQQNYIHNLFPTFKDIVTLTCVSLDLWCIWSDEVYID

SEQ ID NO: 227051 - protein, 73 aa, Zea Mays; identical to SEQ ID NO: 227050

SEQ ID NO: 227052 - protein, 73 aa, Zea Mays; identical to SEQ ID NO: 227050

SEQ ID NO: 227053 - protein, 73 aa, Zea Mays; identical to SEQ ID NO: 227050

SEQ ID NO: 227054 - protein, 588 aa, Zea Mays
MMSVMLENISHTPLIAIATTSAVYRTAQIIASIPNLSYKNKVFPEALFHQLLLAMVHPDHETRVGAHRIFSVVLVPSSVSPFPNLKSLDQCRKHDVQRTLSRVVSVFSSSAALFDKLRRDRNSFREYLHEGSMNRILHGIDDEIATPNDLPGSQSLRQSLRLSSVSHKHSYTSLKEGQSPLTESINEMETIVLRLSSQQATLLLSSIWRQALSPKNAPQNYEAIAHTYSLLLLFLGSKTPIFEVLAPSFQIAFSLMSHSLGGTDSLPPSRRRSLFTLATSMIVFASRAFNVAPLLPICKLMLNDGTMDPFLHLVHENKLQAVKDYTEDPSTSYGSPEDNQNALKSLSVVELTNSCSRESMILTIMNSIRDLPDLELENIRSQLLRDFSPDDVCPSSAHFLESPGKIAPPCSDDDTDYDYQEVHGNFEQAELIDLRNDNNTYLEASATTLAAIAIPVPTTNLLSIDELLETVVNDVSSQTGGQCLVSMAGDIPFQEMTSHCEAFSMGKHHKMSLLMSFKQNKQAAMVVVPDNQVSHAEAAHTSDKQSTNPFLLQSISAGEAQVAGDVQQPFLRLPPSSPYDNFLKAAGC

SEQ ID NO: 227055 - protein, 355 aa, Zea Mays
MYPVVTGTPPARLPAASRVDKATSHLLQGPDWAVNLEICDTLNADRWQTKDIVKAVKKRLQHKDPKVKFFTLTLLETMMKNCGEYVHFEVVDQHILQEIVKIVQKRHDMQVRDKALLLLDSWQEAFGGPGGKYPQYYWSYIELKRAGVMFPQRPVDAPPIFTPPATHQAYGSPRYPSGSLNERITSDAGTLSFEGLNNIRNATELLYDMVNALNPADRMTVKDEIIADLVNQCRSNQQKLMQFVSSTGDEDLLKQGLELNDRLQSVLTRHDAIASGSPLPVETPIREPQREDPNPEPSTPITHDNKAQVEEDEDDEFAQIARRKNKSVICGDEASSSAGDQPLYSPSHRTEDWSG

SEQ ID NO: 227056 - protein, 234 aa, Zea Mays
MFSIHYETKRISLAVARRDAGAANDNSWILLPYLCAAFMVSNIWNGAVYDVNIGGLSNNLHCLARCVSAVIEGSEYTRVEREQRINSLSNVHTDELQEAELPSRVSAEANIKSSMQIYVKLSAGVVLDSWNDTSRYLVHCIFRIRVWQRFPTTPRSHTFEPGYYSSSGSQHDDGYDADRRAGRLLRSMRRSGPLDFGASRKAKKFVEGSSSGSSHGAGSLQRFAVSRSGPLSYK

SEQ ID NO: 227057 - protein, 551 aa, Zea Mays
MLGWFKLKKSDQLSGLSSSVDGDSTASVSPSCSKSSQQKHLLLDLKDGRRKSMTRKGDDPSLADSFLERTQAGDLFSAAPRVRHPLPSGTTIVDQIDLLQEQVKMLAGDVALCTSSLKRLTEQAANNPDNLQIQEQIVRLKDEIAEKKSHIHMLEQRMVQSLETTEGPAIKTELSQTFSKLSTQLSEKTFELEIMSADNRILQDQLQAKVTENAELQETVAHLRQEISNLSKAAKSEDSFASVQSSEPSTASTDTRDQTNEISNRANMSSRTTDLNESGFISQVLKQASEIESLKQENLRLVEEKDGLEIHSQKLAEESSYAKELASAAAIELKNLAEEVTRLSYENAKLNADLAAARELNASMSRSNIHPDPKRRDHESGILVEELQKELVASCQREAVLEDTLSQKDRRESELLKIIDDAKCREHELKNELASMGALLSKIKKENSQQDVFEFKAKQNGFHSSKTDSGRLVSEMQASDNGCWDGLSTFEEARAAYNFERMRCKELESIVSKLKGEDLRGLDVKVLEELQNFHVEALSRICQEKMASQAL

SEQ ID NO: 227058 - protein, 136 aa, Zea Mays
MSVLGQIIPPTINSSMSVLLRLLQGCTEEYKDIWMGVVHVEDVALAHLLVFENPSASGRHICAESISHLSDFAAKLAELYPNNKVPKFPKDTQPGLVRAEAGVASKKLVELGLQFSPLEKIIRDAVESLKTKGYIS

SEQ ID NO: 227059 - protein, 679 aa, Zea Mays
MAALDDKAMTDLETLEEEEVLRRLGTAEEAGLTDNEAARRLRLHGPNVVVLSHHEGSMLHGFLMALFSLWGWDHVFPKYNNMVRVILNSMSWVTVLTIVVSLAITSAGQRSCELAIIIFVVATCLIACFTAMLVLEYAKAPLEAKAHAPRAKVLRDGNWRDVHAANLVPGDIIFLKVGDIVPANARILRFQKIDTMTCWAKRSVDCAHGFLLYYAWTVSCGQGTAVVIATGRGIPRSTLRLYPQRYARPGQLKEGAMLTGCFCASLVLVGTFAEIVLRFLFQKQNYRGMPLDAHFMPLIGGIPMAMPTFFYLALALGSVRLCFLGIASRGTVALEDLASVDVILFNMTGTLTCNQPCFVRDKIEMFADSVNKDHAIVLAARASRSQHELYIEPIDAAILSLLDDPEQARLGVQVLEHHASFFVALKLMFQTTYIDEGNRFKCCVFKGDPAKVAHHCGSSKEVKEKISMIMDELALDGYQAIAVGHQVDSCWDFIALLPYTDDLRSDSADVVDSLIDLGLDIRVLTESPLSTTKQVCGKLGKLGTNVVPAHIVFELARNNREVHSNINGISDLFPEDKSDIVRRLRNFGCHCAMVGYEFLDHDAIGESHIGISVADATDYTKSESDLVLTQPALMPVSSAVQISRKICQMLRSYTVGHSDAFRGLISDKMFYIWIIINGY

SEQ ID NO: 227060 - protein, 539 aa, Zea Mays
MAALDDKAMTDLETLEEEEVLRRLGTAEEAGLTDNEAARRLRLHGPNVVVLSHHEGSMLHGFLMALFSLWGWDHVFPKYNNMVRVILNSMSWVTVLTIVVSLAITSAGQRSCELAIIIFVVATCLIACFTAMLVLEYAKAPLEAKAHAPRAKVLRDGNWRDVHAANLVPGDIIFLKVGDIVPANARILRFQKIDTMTCWAKRSVDCAHGFLLYYAWTVSCGQGTAVVIATGRGIPRSTLRLYPQRYARPGQLKEGAMLTGCFCASLVLVGTFAEIVLRFLFQKQNYRGMPLDAHFMPLIGGIPMAMPTFFYLALALGSVRLCFLGIASRGTVALEDLASVDVILFNMTGTLTCNQPCFVRDKIEMFADSVNKDHAIVLAARASRSQHELYIEPIDAAILSLLDDPEQARLGVQVLEHHASFFVALKLMFQTTYIDEGNRFKCCVFKGDPAKVAHHCGSSKEVKEKISMIMDELALDGYQAIAVGHQVDSCWDFIALLPYTDDLRSDSADVVDSLIDLGLDIRVLTESPLSTTKQRTKAI

SEQ ID NO: 227061 - protein, 735 aa, Zea Mays
MAALDDKAMTDLETLEEEEVLRRLGTAEEAGLTDNEAARRLRLHGPNVVVLSHHEGSMLHGFLMALFSLWGWDHVFPKYNNMVRVILNSMSWVTVLTIVVSLAITSAGQRSCELAIIIFVVATCLIACFTAMLVLEYAKAPLEAKAHAPRAKVLRDGNWRDVHAANLVPGDIIFLKVGDIVPANARILRFQKIDTMTCWAKRSVDCAHGFLLYYAWTVSCGQGTAVVIATGRGIPRSTLRLYPQRYARPGQLKEGAMLTGCFCASLVLVGTFAEIVLRFLFQKQNYRGMPLDAHFMPLIGGIPMAMPTFFYLALALGSVRLCFLGIASRGTVALEDLASVDVILFNMTGTLTCNQPCFVRDKIEMFADSVNKDHAIVLAARASRSQHELYIEPIDAAILSLLDDPEQARLGVQVLEHHASFFVALKLMFQTTYIDEGNRFKCCVFKGDPAKVAHHCGSSKEVKEKISMIMDELALDGYQAIAVGHQVDSCWDFIALLPYTDDLRSDSADVVDSLIDLGLDIRVLTESPLSTTKQVCGKLGKLGTNVVPAHIVFELARNNREVHSNINGISDLFPGLTPILIVMKFGVRVILHLWNFDLSNILAFMITACNYCTSFAMLFERVELNKSPDKWRVQKIITSGAAFGSYIVLTTAIFYRVATTANPFACKFKHISLMGSDEEIRSALFLQISTVNQAIALFVHSDGCCIIRWPGPFVTFAFVVSQTMVNCHFLLFPSL

SEQ ID NO: 227062 - protein, 893 aa, Zea Mays
MAALDDKAMTDLETLEEEEVLRRLGTAEEAGLTDNEAARRLRLHGPNVVVLSHHEGSMLHGFLMALFSLWGWDHVFPKYNNMVRVILNSMSWVTVLTIVVSLAITSAGQRSCELAIIIFVVATCLIACFTAMLVLEYAKAPLEAKAHAPRAKVLRDGNWRDVHAANLVPGDIIFLKVGDIVPANARILRFQKIDTMTCWAKRSVDCAHGFLLYYAWTVSCGQGTAVVIATGRGIPRSTLRLYPQRYARPGQLKEGAMLTGCFCASLVLVGTFAEIVLRFLFQKQNYRGMPLDAHFMPLIGGIPMAMPTFFYLALALGSVRLCFLGIASRGTVALEDLASVDVILFNMTGTLTCNQPCFVRDKIEMFADSVNKDHAIVLAARASRSQHELYIEPIDAAILSLLDDPEQARLGVQVLEHHASFFVALKLMFQTTYIDEGNRFKCCVFKGDPAKVAHHCGSSKEVKEKISMIMDELALDGYQAIAVGHQVDSCWDFIALLPYTDDLRSDSADVVDSLIDLGLDIRVLTESPLSTTKQVYLYLLCTSCKVLFLQVLVTILLSSYLSTEDKSDIVRRLRNFGCHCAMVGYEFLDHDAIGESHIGISVADATDYTKSESDLVLTQPALMPVSSAVQISRKICQMLRSYTIFTISSTVHLDPAGLTPILIVMKFGVRVILHLWNFDLSNILAFMITACNYCTSFAMLFERVELNKSPDKWRVQKIITSGAAFGSYIVLTTAIFYRVATTANPFACKFKHISLMGSDEEIRSALFLQISTVNQAIALFVHSDGCCIIRWPGPFVTFAFVVSQTVATQKVVHGDLNFALTKGIGCVRAGLIWLYNLVLLLALVLVCRKWRHAKMTSEKLLTICLRSAILHIVLTWFLYVILDVRVQQPVSSR

SEQ ID NO: 227063 - protein, 458 aa, Zea Mays
MAALDDKAMTDLETLEEEEVLRRLGTAEEAGLTDNEAARRLRLHGPNVVVLSHHEGSMLHGFLMALFSLWGWDHVFPKYNNMVRVILNSMSWVTVLTIVVSLAITSAGQRSCELAIIIFVVATCLIACFTAMLVLEYAKAPLEAKAHAPRAKVLRDGNWRDVHAANLVPGDIIFLKVGDIVPANARILRFQKIDTMTCWAKRSVDCAHGFLLYYAWTVSCGQGTAVVIATGRGIPRSTLRLYPQRYARPGQLKEGAMLTGCFCASLVLVGTFAEIVLRFLFQKQNYRGMPLDAHFMPLIGGIPMAMPTFFYLALALGSVRLCFLGIASRGTVALEDLASVDVILFNMTGTLTCNQPCFVRDKIEMFADSVNKDHAIVLAARASRSQHELYIEPIDAAILSLLDDPEQVAHHCGSSKEVKEKISMIMDELALDGYQAIAVGHQKVHCRPQSRFVESLEN

SEQ ID NO: 227064 - protein, 454 aa, Zea Mays
MAQDGRARESSSKAASAGSGGCSMPFRLNVHAREFVPVASPLAAAAAGGGYYSPFVQLSGDGGLGTDWMNFFAEPDPTSPSSFLPDFGHCDILRATGGINGYPNPKGGASVADIADKIVKQNCRSLGKKNRKRRERMLLQVEYQFSDTNLVANDFLTKIMNKDPEGYVPLSVISSWKKIKAMGVTSQLLVMALRTSDKLVVSDDGRKVRRAQPFTERHKEELQCRMVIAENLPQDSTRNSLEKIFGVIGSVKNIRICHPQEPGSARSSPRSSDTNTPASNKLHALIEYETSHQADRAVDKLNDERNWRKGLRVRPVLRRSPKTVARMKRPDLDHHVAASDEERVSTSDSPTATAAAHPPDNTQQQQEEEEEDQHQHQHGGAKKPWGSRGRGRPPPHSSAHSAGAPGHSVDSLAASPRHAAQGPRMPDGTRGFTMGRGRPAPPAAPSAAAAVRVV

SEQ ID NO: 227065 - protein, 1094 aa, Zea Mays
MKRFVYINDESYQNDYCDNRVSNTKYTLLNFVPKNLWEQFRRFMNQYFLLIACLQLWSLITPVNPASTWGPLIFIFAVSATKEAWDDYNRYISDKQANDKEVWIVKNGARKHIQAQDIRVGNIVWIRENEEVPCDLVLLGTSEPQGICHVETAALDGEIDLKTRASPPPCVGLEFEQLHKIKGVIECPIPDKDIRRFDANIRLFPPFIDNDICPLTINNTLLQSCYLRNTEWACGVAVYTGNETKLGMSRGVPEPKLTAMDAMIDKLTGAIFLFQLTVVVVLGAAGNIWKDMEARKQWYVKYDDNEPWYQILVIPLRFELLCSIMIPISIKVSLDFVKSLYAKFIDWDDDIYDLENDTPARAANTAISEDLGQVEYILTDKTGTLTENKMIFRRCCIGGTFYGNESGDALRDVELLNAVANNSPNVIKFLTVMTLCNTVIPIKSPTGPILYKAQSQDEDALVNAAANLHMVLVSKNGSNAEIHFNRRVMQYEILDILEFTSDRKRMSIVILDCQSGKFFLLSKGADEAMLPCAYSGQKTKTFVDAVDKYAQLGLRTLCLGWRELEPEEYTKWSQSFKEANSSLNDREWKVAEVCQKLEHSLEILGVSAIEDRLQDGVPETIEILRQSGINFWMLTGDKQSTAIQIALLCNLISSEPKGQLLHINGKTQDEVARSLERVLLTMRITSSEPKELAFVVDGWALEIILSRYTEAFTELAVLSKTALCCRVTPSQKAQLVKLLKSCDYRTLAIGDGGNDVRMIQQADIGVGISGREGLQAARAADYSIGKFRFLKRLILVHGRYSYNRTAFLSQYSFYNFSFLSGIAGTSLFNSVSLMAYNVFYTSIPVLTTVLDKDLSEKTVMQNPEILLYCQAGRLLNPSTFAGWFGRSLYHAIIIFLITIHAYANEKSEMEELSMVALSGSIWLQAFVVTLEMNSFTSVQLLAIWGNLIAFYVLNFFISSIPTSGMYTIMFGLCRQPSYWITLVLISGVGMGPVLALKYFRYTYRPSVINILQKAERSRGPMYTLLNLESQLRSDKDSMMVAGSTAPAKNKSSVYEPLLSDSPMASRRSLAPASSFDIFQPAHSRTSHPRNIKAN

SEQ ID NO: 227066 - protein, 1827 aa, Zea Mays
MFSDQHLLQLRFLTLKNLASVFLQQGFEFYDNALHCYLQAVELDSNDSVVWNHLGTLSCSMGLLSVSRWAFEQGLVCSPNNWNCMEKLLEVLISIRDEVACLSVANLILNSWPSHHRALHVKKTIECAEPVPFAPRGIDILEPKHAKLIFSNKRKSVDDEICQEIGTKKSKHSATLQLNEAKWLALLDGILSLISANTEKAGEYNCSNTVDRCSISEGSAKGLAYNIIDVVISTDTLKSVETAGGNGNDSHHGEILPYDCKATVKEKDGNSDREHPHERRSTRLERLRSRKSGKDENGSDGKDISHAMTQFLESFILKGPSPVEKAYCSGNADASNPDTHNYTSNEEANDLKQFLCKISKNFGPHHIGYMLLEEMAHLKVPFQDYFVKLIELDKLTRGWAEDRSASCNLFLAELYYDRALCSGSPPTSSELSDSSYHLCKIIESVALELPFNISVREIHSTNLDTESSRTGESSSELIERSHENGHINMLNDQKSKHDSSSNMNCAFWIRFFWLSGCLSLSSDCKEKAYKEFNIALSILKNSNKTKSYGEVILLPHTKLVKSLTTDRILREINLIRLESLLWNNDENINKITHTEFMQLLPPLLLSTKDAYVGNAYGPQRESENVISLELSALDVLISACEKAKPMNIQVYLDSHRRKIQVLTVAAGMVGSVTPLKAKGSSNVEFVEAMNRNRLENVVEAVKDVSRNASKAKDIIDQCDNSDGQDGWSPLMSIVGDIQSLLLTIMCAAVKIILSRKLSCSGTSYQVDHLECSCLIDAAIAFCKLQHLDPTISIKTQVDLIVAVHDLLAEYGLCCAGRDGEGEEGMFLKFAIKHLMALDVKLKSQLNSNGMEEDAVPKDVRAEDSVADEPSVSDNKQNSDDEEESELDEIQSCLDSALDQAFFCLYGLKINPDSCSEDDLAVHKNTSRGDYQTKEQCADVFQYVLPYAKALSKTGLVKLRRVLRAIRKHFPQPPYDLFVNNPIDNFLDGPDSCEKILSEICESNESREAILNVLFPGERGYEAFKKLSTASSEPYSDVYENLYYFIAQAEDISATDKHTGFVLKKEGEEFVEQSANIFKYDLLYNPLRFESWQKLSNLYDEVEVDLLLNDGSKHISILDWRTNTDLIRRVEMGRRHSRRCLLMSSLLAKTAPEQSEAHELLALVYYDSLQNVVPFYDQRATLPVKDSSWETFCKNSMKHFEKAFEIKEQWLHAFYLGKLFDPVYRIHASRLKLLYTQGKQNLEAIQVVADYTYNQSTKENVLSMLGSMTKVLQSSSDKTSLDTKEENKFFESDILDKVWHILYDDCLYALGTCVEGELKHFHKARYKLAQGYYRRGEAGDLERAKEELSFCFKSSRSSFTVNMWEIDGTVRKGRRKNPNVGGSRKNLEVSLSESSRKFITCIRKYMILYLNLLEKNTDLWTLEKAYTYLRTDKRFALCLGDIVPVGLGKYILVLTAAIHNPEIRRASGDASVEQLLEKMFTVFMDHANMWADISNIPEVNSPELSESNLYSYIHQYIHLLESDVRLDVLEGLNEKIRKRFKTPKLSNSNFAKICKHASLAWCRCILIKLASITPLPESADATNQPAPLSNGLLLYVDLQPDELLISSPDGPAQFKGLDMNWFETLNRIKNIPVKQTSEDNLETAVTLMKSTYNFYRESPCGTFPSGINLYTVTPSQAPIEGLPPTAAVVETLDLSIPRKLLLWVYTLVHGRYSNISSVVKYCDEMKLRSKRGTPAASASSQVVQPVSHSTVSSQVVSKEKSSQVEPAEAAQNPSDLAATCVPAYQEVGGASASQSAIEAQKATAAASQLTRSGSSRAMENAQDGGERK

SEQ ID NO: 227067 - protein, 1860 aa, Zea Mays
MGLLSVSRWAFEQGLVCSPNNWNCMEKLLEVLISIRDEVACLSVANLILNSWPSHHRALHVKKTIECAEPVPFAPRGIDILEPKHAKLIFSNKRKSVDDEICQEIGTKKSKHSATLQLNEAKWLALLDGILSLISANTEKAGEYNCSNTVDRCSISEGSAKGLAYNIIDVVISTDTLKSVETAGGNGNDSHHGEILPYDCKATVKEKDGNSDREHPHERRSTRLERLRSRKSGKDENGSDGKDISHAMTQFLESFILKGPSPVEKAYCSGNADASNPDTHNYTSNEEANDLKQFLCKISKNFGPHHIGYMLLEEMAHLKVPFQDYFVKLIELDKLTRGWAEDRSASCNLFLAELYYDRALCSGSPPTSSELSDSSYHLCKIIESVALELPFNISVREIHSTNLDTESSRTGESSSELIERSHENGHINMLNDQKSKHDSSSNMNCAFWIRFFWLSGCLSLSSDCKEKAYKEFNIALSILKNSNKTKSYGEVILLPHTKLVKSLTTDRILREINLIRLESLLWNNDENINKITHTEFMQLLPPLLLSTKDAYVGNAYGPQRESENVISLELSALDVLISACEKAKPMNIQVYLDSHRRKIQVLTVAAGMVGSVTPLKAKGSSNVEFVEAMNRNRLENVVEAVKDVSRNASKAKDIIDQCDNSVPSITIVLIHKYISQGYQVDKSSRVDKASIKRRLSVALALRRAHRARRLARLPPWRKASAAAQCVRCGDGQDGWSPLMSIVGDIQSLLLTIMCAAVKIILSRKLSCSGTSYQVDHLECSCLIDAAIAFCKLQHLDPTISIKTQVDLIVAVHDLLAEYGLCCAGRDGEGEEGMFLKFAIKHLMALDVKLKSQLNSNGMEEDAVPKDVRAEDSVADEPSVSDNKQNSDDEEESELDEIQSCLDSALDQAFFCLYGLKINPDSCSEDDLAVHKNTSRGDYQTKEQCADVFQYVLPYAKALSKTGLVKLRRVLRAIRKHFPQPPYDLFVNNPIDNFLDGPDSCEKILSEICESNESREAILNVLFPGERGYEAFKKLSTASSEPYSDVYENLYYFIAQAEDISATDKHTGFVLKKEGEEFVEQSANIFKYDLLYNPLRFESWQKLSNLYDEVEVDLLLNDGSKHISILDWRTNTDLIRRVEMGRRHSRRCLLMSSLLAKTAPEQSEAHELLALVYYDSLQNVVPFYDQRATLPVKDSSWETFCKNSMKHFEKAFEIKEQWLHAFYLGKLCEKLGHSFSKALSYYNKAMMLNPTAVDPVYRIHASRLKLLYTQGKQNLEAIQVVADYTYNQSTKENVLSMLGSMTKVLQSSSDKTSLDTKEENKFFESDILDKVWHILYDDCLYALGTCVEGELKHFHKARYKLAQGYYRRGEAGDLERAKEELSFCFKSSRSSFTVNMWEIDGTVRKGRRKNPNVGGSRKNLEVSLSESSRKFITCIRKYMILYLNLLEKNTDLWTLEKAYTYLRTDKRFALCLGDIVPVGLGKYILVLTAAIHNPEIRRASGDASVEQLLEKMFTVFMDHANMWADISNIPEVNSPELSESNLYSYIHQYIHLLESDVRLDVLEGLNEKIRKRFKTPKLSNSNFAKICKHASLAWCRCILIKLASITPLPESADATNQPAPLSNGLLLYVDLQPDELLISSPDGPAQFKGLDMNWFETLNRIKNIPVKQTSEDNLETAVTLMKSTYNFYRESPCGTFPSGINLYTVTPSQAPIEGLPPTAAVVETLDLSIPRKLLLWVYTLVHGRYSNISSVVKYCDEMKLRSKRGTPAASASSQVVQPVSHSTVSSQVVSKEKSSQVEPAEAAQNPSDLAATCVPAYQEVGGASASQSAIEAQKATAAASQLTRSGSSRAMENAQDGGERK

SEQ ID NO: 227068 - protein, 1287 aa, Zea Mays
MGLLSVSRWAFEQGLVCSPNNWNCMEKLLEVLISIRDEVACLSVANLILNSWPSHHRALHVKKTIECAEPVPFAPRGIDILEPKHAKLIFSNKRKSVDDEICQEIGTKKSKHSATLQLNEAKWLALLDGILSLISANTEKAGEYNCSNTVDRCSISEGSAKGLAYNIIDVVISTDTLKSVETAGGNGNDSHHGEILPYDCKATVKEKDGNSDREHPHERRSTRLERLRSRKSGKDENGSDGKDISHAMTQFLESFILKGPSPVEKAYCSGNADASNPDTHNYTSNEEANDLKQFLCKISKNFGPHHIGYMLLEEMAHLKVPFQDYFVKLIELDKLTRGWAEDRSASCNLFLAELYYDRALCSGSPPTSSELSDSSYHLCKIIESVALELPFNISVREIHSTNLDTESSRTGESSSELIERSHENGHINMLNDQKSKHDSSSNMNCAFWIRFFWLSGCLSLSSDCKEKAYKEFNIALSILKNSNKTKSYGEVILLPHTKLVKSLTTDRILREINLIRLESLLWNNDENINKITHTEFMQLLPPLLLSTKDAYVGNAYGPQRESENVISLELSALDVLISACEKAKPMNIQVYLDSHRRKIQVLTVAAGMVGSVTPLKAKGSSNVEFVEAMNRNRLENVVEAVKDVSRNASKAKDIIDQCDNSVPSITIVLIHKYISQGYQVDKSSRVDKASIKRRLSVALALRRAHRARRLARLPPWRKASAAAQCVRCGDGQDGWSPLMSIVGDIQSLLLTIMCAAVKIILSRKLSCSGTSYQVDHLECSCLIDAAIAFCKLQHLDPTISIKTQVDLIVAVHDLLAEYGLCCAGRDGEGEEGMFLKFAIKHLMALDVKLKSQLNSNGMEEDAVPKDVRAEDSVADEPSVSDNKQNSDDEEESELDEIQSCLDSALDQAFFCLYGLKINPDSCSEDDLAVHKNTSRGDYQTKEQCADVFQYVLPYAKALSKTGLVKLRRVLRAIRKHFPQPPYDLFVNNPIDNFLDGPDSCEKILSEICESNESREAILNVLFPGERGYEAFKKLSTASSEPYSDVYENLYYFIAQAEDISATDKHTGFVLKKEGEEFVEQSANIFKYDLLYNPLRFESWQKLSNLYDEVEVDLLLNDGSKHISILDWRTNTDLIRRVEMGRRHSRRCLLMSSLLAKTAPEQSEAHELLALVYYDSLQNVVPFYDQRATLPVKDSSWETFCKNSMKHFEKAFEIKEQWLHAFYLGKLCEKLGHSFSKALSYYNKAMMLNPTAVDPVYRIHASRLKLLYTQGKQNLEAIQDFILDAIVG

SEQ ID NO: 227069 - protein, 1107 aa, Zea Mays
MENCERTIKGFLTLKNLASVFLQQGFEFYDNALHCYLQAVELDSNDSVVWNHLGTLSCSMGLLSVSRWAFEQGLVCSPNNWNCMEKLLEVLISIRDEVACLSVANLILNSWPSHHRALHVKKTIECAEPVPFAPRGIDILEPKHAKLIFSNKRKSVDDEICQEIGTKKSKHSATLQLNEAKWLALLDGILSLISANTEKAGEYNCSNTVDRCSISEGSAKGLAYNIIDVVISTDTLKSVETAGGNGNDSHHGEILPYDCKATVKEKDGNSDREHPHERRSTRLERLRSRKSGKDENGSDGKDISHAMTQFLESFILKGPSPVEKAYCSGNADASNPDTHNYTSNEEANDLKQFLCKISKNFGPHHIGYMLLEEMAHLKVPFQDYFVKLIELDKLTRGWAEDRSASCNLFLAELYYDRALCSGSPPTSSELSDSSYHLCKIIESVALELPFNISVREIHSTNLDTESSRTGESSSELIERSHENGHINMLNDQKSKHDSSSNMNCAFWIRFFWLSGCLSLSSDCKEKAYKEFNIALSILKNSNKTKSYGEVILLPHTKLVKSLTTDRILREINLIRLESLLWNNDENINKITHTEFMQLLPPLLLSTKDAYVGNAYGPQRESENVISLELSALDVLISACEKAKPMNIQVYLDSHRRKIQVLTVAAGMVGSVTPLKAKGSSNVEFVEAMNRNRLENVVEAVKDVSRNASKAKDIIDQCDNSDGQDGWSPLMSIVGDIQSLLLTIMCAAVKIILSRKLSCSGTSYQVDHLECSCLIDAAIAFCKLQHLDPTISIKTQVDLIVAVHDLLAEYGLCCAGRDGEGEEGMFLKFAIKHLMALDVKLKSQLNSNGMEEDAVPKDVRAEDSVADEPSVSDNKQNSDDEEESELDEIQSCLDSALDQAFFCLYGLKINPDSCSEDDLAVHKNTSRGDYQTKEQCADVFQYVLPYAKALSKTGLVKLRRVLRAIRKHFPQPPYDLFVNNPIDNFLDGPDSCEKILSEICESNESREAILNVLFPGERGYEAFKKLSTASSEPYSDVYENLYYFIAQAEDISATDKHTGFVLKKEGEEFVEQSANIFKYDLLYNPLRFESWQKLSNLYDEVVSFTSTN

SEQ ID NO: 227070 - protein, 897 aa, Zea Mays
MENCERTIKGFLTLKNLASVFLQQGFEFYDNALHCYLQAVELDSNDSVVWNHLGTLSCSMGLLSVSRWAFEQGLVCSPNNWNCMEKLLEVLISIRDEVACLSVANLILNSWPSHHRALHVKKTIECAEPDGQDGWSPLMSIVGDIQSLLLTIMCAAVKIILSRKLSCSGTSYQVDHLECSCLIDAAIAFCKLQHLDPTISIKTQVDLIVAVHDLLAEYGLCCAGRDGEGEEGMFLKFAIKHLMALDVKLKSQLNSNGMEEDAVPKDVRAEDSVADEPSVSDNKQNSDDEEESELDEIQSCLDSALDQAFFCLYGLKINPDSCSEDDLAVHKNTSRGDYQTKEQCADVFQYVLPYAKALSKTGLVKLRRVLRAIRKHFPQPPYDLFVNNPIDNFLDGPDSCEKILSEICESNESREAILNVLFPGERGYEAFKKLSTASSEPYSDVYENLYYFIAQAEDISATDKHTGFVLKKEGEEFVEQSANIFKYDLLYNPLRFESWQKLSNLYDEVEVDLLLNDGSKHISILDWRTNTDLIRRVEMGRRHSRRCLLMSSLLAKTAPEQSEAHELLALVYYDSLQNVVPFYDQRATLPVKDSSWETFCKNSMKHFEKAFEIKEQWLHAFYLGKLCEKLGHSFSKALSYYNKAMMLNPTAVDPVYRIHASRLKLLYTQGKQNLEAIQVVADYTYNQSTKENVLSMLGSMTKVLQSSSDKTSLDTKEENKFFESDILDKVWHILYDDCLYALGTCVEGELKHFHKARYKLAQGYYRRGEAGDLERAKEELSFCFKSSRSSFTVNMWEIDGTVRKGRRKNPNVGGSRKNLEVSLSESSRKFITCIRKYMILYLNLLEKNTDLWTLEKAYTYLRTDKRVPPNYTNYARLYFFCTLKNSFSFLFCSLHCV

SEQ ID NO: 227071 - protein, 728 aa, Zea Mays
MWLVVHDRCWTADRLAKRGMDHPVCCPLCDQADETINHLLVECSFARQFWFLFLRSGDFQVLCPSAGDGCFDSWWEKSAEVVGKPLSDGFNSLKLQECPLGTYKNVTGSSKSLCFPCPPGELPHRAIYTNVRGGAAETPCPYRCVSDRYRMPHCYTALEELIYTFGGPWLFGLFLSGLLILLALVLSVARMKFVGTDELPGPAPTHQGSQIDHSFPFLESLNEVIETNRAEESQGHVHRMYFMGPNTFSEPWHLPHSPPEQITEIVYEDAFNRFVDEINTLAAYQWWEGSIYSILCILAYPLAWSWQQWRRRKKLQRLREFVRSEYDHSCLKSCRSRALYEGLKVTATPDLMLGYLDFFLGGDEKRPDLPPRLRQRFPMSLIFGGDGSYMAPFSLNSDSVLTSLMSQELVPYLLQAVPSWIWHRLVAGLNAQLRLVRGGNLKVTFLPVINWLESHANPSLAENGIRVDLAWFQATALGYCQLGLLVYAVEGEAALTEPDGSPRVKIEQHTPTQNMLADTQLSQSRIKDALMRKRITGGVLNSNSLRTLKDRRDLFYPFSHILHNSKPVGHQDLVGLVISILLLADFSLVLLTFLQLYSYSMVDVLLVLFILPLGILSPFPAGINALFSHGPRRSAGLARVYALWNITSLVNVVVAFICGFVHYKLSTKTHPSVQPWNLGTDESGWWLFPTGLMLLKCIQARLVDWHVANLEIQDRAVYSNDPNIFWQS

SEQ ID NO: 227072 - protein, 578 aa, Zea Mays
MPHCYTALEELIYTFGGPWLFGLFLSGLLILLALVLSVARMKFVGTDELPGPAPTHQGSQIDHSFPFLESLNEVIETNRAEESQGHVHRMYFMGPNTFSEPWHLPHSPPEQITEIVYEDAFNRFVDEINTLAAYQWWEGSIYSILCILAYPLAWSWQQWRRRKKLQRLREFVRSEYDHSCLKSCRSRALYEGLKVTATPDLMLGYLDFFLGGDEKRPDLPPRLRQRFPMSLIFGGDGSYMAPFSLNSDSVLTSLMSQELVPYLLQAVPSWIWHRLVAGLNAQLRLVRGGNLKVTFLPVINWLESHANPSLAENGIRVDLAWFQATALGYCQLGLLVYAVEGEAALTEPDGSPRVKIEQHTPTQNMLADTQLSQSRIKDALMRKRITGGVLNSNSLRTLKDRRDLFYPFSHILHNSKPVGHQDLVGLVISILLLADFSLVLLTFLQLYSYSMVDVLLVLFILPLGILSPFPAGINALFSHGPRRSAGLARVYALWNITSLVNVVVAFICGFVHYKLSTKTHPSVQPWNLGTDESGWWLFPTGLMLLKCIQARLVDWHVANLEIQDRAVYSNDPNIFWQS

SEQ ID NO: 227073 - protein, 947 aa, Zea Mays
MTMTISELYMFLSLGQATRSVTAFAEGQGAAHRMFKIIERKPDIDIDDNTGIILEDVKGDVQLKDVYFSYPTRPEHLIFDGFSLQVQSGTTMALVGDSGSGKSTVISLVERFYDPQAGEVLIDGVDIRGMKLGWMRGKIGLVNQEPVLFSTTIRENIAYGTEKPTLEDINRAIQLANAAIFIDKLPNGLDTMVGEHGTQLSGGQKQRIAIARAIIKNPKILLLDEATSALDMESERVVQEALVRIMVERTTIVVAHRLSTVRNADVISVLQHGKMVEQGSHVDLMKLPGGAYTQLIRLHETQQEAEDVHPDMEISRRSTSKGSSSFGQSIPAPLGSPDPTEVSGAPDTEEGATDRVKVGRSQKKASIARLFKLNKPETLVLALGSIAAVAHGTIFPIYGTLISTAIKVFYEPPQELLKGSRFWAGMFALLGACAFVLIPVQYFLFGLAGGKLVERVRSMTFRSIMRQEISWFDKPEHSSGSICARLSTDALNVKRLVGDNLALNVQTASTIMSGFTIAMVANWKLALVITVVIPFVAFQAYAQMLFLKGLNRNAKLRYEEASQVATDAVGGIRTVASFCAESKVMDAYENKCESPRRQGMKEGVVGGLGFGFSFVVFYLTYALCFYVGARFVHQGTATFPEVFRVFFVLALATSGVSQTSAAGADSAKANDSAVSIFAILDRESKIDYSSEEGVTIASVRGDVDFQKVCFKYPLRPNVQIFKDFSLRIPSGKTVALVGESGSGKSTVIALLERFYDPESGKIFIDGVELGTLKVSWLRQQAGLVAQEPVLFNDTIRANIAYGKQGGVVSEEEVVAAAEAANAHGFIAALPDGYDTVVGERGSRLSGGQKQRVAIARAVVKDPRLLLLDEATSALDVESERVVQEALDRVMVGRTTVVVAHRLSTIRGADVIAVLKDGAVLEKGRHEELMQVKDGAYASLLELSSSSA

SEQ ID NO: 227074 - protein, 914 aa, Zea Mays
MFKIIERKPDIDIDDNTGIILEDVKGDVQLKDVYFSYPTRPEHLIFDGFSLQVQSGTTMALVGDSGSGKSTVISLVERFYDPQAGEVLIDGVDIRGMKLGWMRGKIGLVNQEPVLFSTTIRENIAYGTEKPTLEDINRAIQLANAAIFIDKLPNGLDTMVGEHGTQLSGGQKQRIAIARAIIKNPKILLLDEATSALDMESERVVQEALVRIMVERTTIVVAHRLSTVRNADVISVLQHGKMVEQGSHVDLMKLPGGAYTQLIRLHETQQEAEDVHPDMEISRRSTSKGSSSFGQSIPAPLGSPDPTEVSGAPDTEEGATDRVKVGRSQKKASIARLFKLNKPETLVLALGSIAAVAHGTIFPIYGTLISTAIKVFYEPPQELLKGSRFWAGMFALLGACAFVLIPVQYFLFGLAGGKLVERVRSMTFRSIMRQEISWFDKPEHSSGSICARLSTDALNVKRLVGDNLALNVQTASTIMSGFTIAMVANWKLALVITVVIPFVAFQAYAQMLFLKGLNRNAKLRYEEASQVATDAVGGIRTVASFCAESKVMDAYENKCESPRRQGMKEGVVGGLGFGFSFVVFYLTYALCFYVGARFVHQGTATFPEVFRVFFVLALATSGVSQTSAAGADSAKANDSAVSIFAILDRESKIDYSSEEGVTIASVRGDVDFQKVCFKYPLRPNVQIFKDFSLRIPSGKTVALVGESGSGKSTVIALLERFYDPESGKIFIDGVELGTLKVSWLRQQAGLVAQEPVLFNDTIRANIAYGKQGGVVSEEEVVAAAEAANAHGFIAALPDGYDTVVGERGSRLSGGQKQRVAIARAVVKDPRLLLLDEATSALDVESERVVQEALDRVMVGRTTVVVAHRLSTIRGADVIAVLKDGAVLEKGRHEELMQVKDGAYASLLELSSSSA

SEQ ID NO: 227075 - protein, 365 aa, Zea Mays
MAHHQLGQYLAGEITESELQQSSSPNAEVGHAVPSISLAKKKFLGKYAISAEEFSEEMVGAKSRNIAYLKGKVPSWVGVPTSVAIPFGTFEKVLSDGLNKEVAQSIEKLKIRLAQEDFSALGEIRKVVLNLTAPMQLVNELKERMLGSGMPWPGDEGDKRWEQAWMAIKKVWASKWNERAYFSTRKVKLDHEYLSMAVLVQEVVNADYAFVIHTTNPSSGDSSEIYAEVVKGLGETLVGAYPGRAMSFVCKKDDLDSPKLLGYPSKPIGLFIRQSIIFRSDSNGEDLEGYAGAGLYDSVPMDEEDEVVLDYTTDPLIVDRGFRSSILSSIARAGHAIEELYGSPQDVEGVVKDGKIYVVQTRPQM

SEQ ID NO: 227076 - protein, 161 aa, Zea Mays
MTPLPIPAEPEAMLALSTNACMPTLEGAATAGDGTGRGDGAAARGAGRGDGAAVRGVGAAVAPAGRPELRDVVAAATMSLQGSHLLACRNGRSDAGLSPVDIDGDATREDAPAMPPVDPIPDANTDSSPTASDAGGSSTGGGAFAEHDRGSNSAGELLEED

SEQ ID NO: 227077 - protein, 334 aa, Zea Mays
MGGGEMAGWLKALAYSAGGVAVAGLAALVALQERLVYVPVLPGLARSYPITPARLGLIYEDVWLRAADGVRLHSWFIRHSPSYRGPTILFFQENAGNIAHRLEFVRLMMQRLQCNVFMLSYRGYGESDGYPSQKGITYDAQAALDHLAQRNDIDTTRIVIFGRSLGGAVGAVLAKNNPDKVATLILENTFTSILDMAGIMLPFLRWFIGGSSSKGPKLLNCVVRSPWNTLDIVGEVKQPILFLSGLQDELVPPPHMKMLYDKASDHNRNCRFVDFPSGMHMDTWMSGGDRYWRTIQLFLDQYAPGVQNHDASFKSEITEDGNYSAPLYLKQPKL

SEQ ID NO: 227078 - protein, 768 aa, Zea Mays
MSRMKHLLRKLHLAGGPAGAGAGGAAPDHHRSRHRRSGHPTPPPPGAAVAAPEPPQPAVTPAAAVSIAPAVEEPRGLEAEAATTRLEEDYQVRLALAISASDHAGLVDADSVQIRAAELISLGAGAGSGHDRSPAEALSARYWNHSVVNYDEQLPDGFYDVCGAQLHPGFQAKFPSLEYLRAVPLGRDAPFLAILVDREHDPALKRLEDRAAQIAAQTRAGHGGAASAELAQKIVGLIVNAMGGLVEDADGMNREWSIKSHELSLQLNSVVLPLGSLRVGLSRHRSLLFKVLADRVNLPCKLLKGICYTGTDEGAVNLVKVDFDSMEYIIDLMGAPGTLIPSDISGSQFQDSNNSQLSSDAIEESVAELCLALEQINGGYENKNTIGGCSSGHSSILALTSSHLGDLSQTELKQNVVSEKKNDGDISEHVKVDDVSKYIVPEVVDPQFAQNLHDLLLESGALLPSDLLSDQNNHDIHEKESTGWLLVAQTTQNLPNAFVAKDSSSPDEDEQPRAENTEAAIRDLDLHGHTASVISNEDQMVAGSLVNMSGSSNGNLDTLSWSSVKTISSVIDDIAEYEIPWEDLDIGERIGLGSFGEVYRADWNGTEVAVKKFLDQDLSGVSLEQFKCEVRIMSRLRHPNVVLFLGYVTQSPNLSILTEYLPRGSLYRLLHRPNSRIDEVRRLKMAFDVAKGMNYLHSSHPTIVHRDLKSPNLLVDKNWVVKVSDFGMSRLKHHTFLSSKSTAGTSGWHLRYYEMNHLMRSVMSTALE

SEQ ID NO: 227079 - protein, 615 aa, Zea Mays
MSRMKHLLRKLHLAGGPAGAGAGGAAPDHHRSRHRRSGHPTPPPPGAAVAAPEPPQPAVTPAAAVSIAPAVEEPRGLEAEAATTRLEEDYQVRLALAISASDHAGLVDADSVQIRAAELISLGAGAGSGHDRSPAEALSARYWNHSVVNYDEQLPDGFYDVCGAQLHPGFQAKFPSLEYLRAVPLGRDAPFLAILVDREHDPALKRLEDRAAQIAAQTRAGHGGAASAELAQKIVGLIVNAMGGLVEDADGMNREWSIKSHELSLQLNSVVLPLGSLRVGLSRHRSLLFKVLADRVNLPCKLLKGICYTGTDEGAVNLVKVDFDSMEYIIDLMGAPGTLIPSDISGSQFQDSNNSQLSSDAIEESVAELCLALEQINGGYENKNTIGGCSSGHSSILALTSSHLGDLSQTELKQNVVSEKKNDGDISEHVKVDDVSKYIVPEVVDPQFAQNLHDLLLESGALLPSDLLSDQNNHDIHEKESTGWLLVAQTTQNLPNAFVAKDSSSPDEDEQPRAENTEAAIRDLDLHGHTASVISNEDQMVAGSLVNMSGSSNGNLDTLSWSSVKTISSVIDDIAEYEIPWEDLDIGERIGLGFVLLQDHLGKFIVQTGMARRLQ

SEQ ID NO: 227080 - protein, 838 aa, Zea Mays
MSRMKHLLRKLHLAGGPAGAGAGGAAPDHHRSRHRRSGHPTPPPPGAAVAAPEPPQPAVTPAAAVSIAPAVEEPRGLEAEAATTRLEEDYQVRLALAISASDHAGLVDADSVQIRAAELISLGAGAGSGHDRSPAEALSARYWNHSVVNYDEQLPDGFYDVCGAQLHPGFQAKFPSLEYLRAVPLGRDAPFLAILVDREHDPALKRLEDRAAQIAAQTRAGHGGAASAELAQKIVGLIVNAMGGLVEDADGMNREWSIKSHELSLQLNSVVLPLGSLRVGLSRHRSLLFKVLADRVNLPCKLLKGICYTGTDEGAVNLVKVDFDSMEYIIDLMGAPGTLIPSDISGSQFQDSNNSQLSSDAIEESVAELCLALEQINGGYENKNTIGGCSSGHSSILALTSSHLGDLSQTELKQNVVSEKKNDGDISEHVKVDDVSKYIVPEVVDPQFAQNLHDLLLESGALLPSDLLSDQNNHDIHEKESTGWLLVAQTTQNLPNAFVAKDSSSPDEDEQPRAENTEAAIRDLDLHGHTASVISNEDQMVAGSLVNMSGSSNGNLDTLSWSSVKTISSVIDDIAEYEIPWEDLDIGERIGLGSFGEVYRADWNGTDLSGVSLEQFKCEVRIMSRLRHPNVVLFLGYVTQSPNLSILTEYLPRGSLYRLLHRPNSRIDEVRRLKMAFDVAKGMNYLHSSHPTIVHRDLKSPNLLVDKNWVVKVSDFGMSRLKHHTFLSSKSTAGTPEWMAPEVLRNEPSNEKCDVYSFGVILWELATMRVPWSGLNPMQVVGAVGFQNRRLEIPKDVDPQVASIISSCWDSDPSKRPSFSQLLSPLKQLQHLVVTESC

SEQ ID NO: 227081 - protein, 401 aa, Zea Mays
MPANTDCSEDLFQSHEDLQNQSRTSNLDNEHFPRDASNHANVEATGPPYDLSNGGISTQHSDWSEIKWGSTDEMLGNAGQDDDHFTPMGMFCLTNNTYILDISCIESNMGERMESIRNGNSSCLTMQEEHLQAECGGYPHPDYISVDMVDERSLHDLPHGLSQNNEHNQHTFKNMEYQKPLVLDKQYAYRSNNSSIHNSSKGCFSRDGDMASDLCVLEGNTNPAPAHLWPYQGKFHHNFSNLCMLGAGTSLPGLVAAKVGADVTLTDIAQNAEVLNNIRSICALNDTNCTVSGLTWGDWDESVFDLRPDIILGADVLYDSANFNDLFATVTFLLENSSGAVFITTYHNRSGQHLIEFLMVKWGLKCLKLLDGFSFLPPCKAALLQGNIQLVEIALDKEKYK

SEQ ID NO: 227082 - protein, 689 aa, Zea Mays
MGRNGSVKRSASSSAAGAAAGPPSFSVNPADYRLMEEVGYGAHAVVYRAIFLPTEDVVAVKCLDLDQLNNNIDEIQREAQIMSLIDHPNVIRAYCSFVVEHSLWVIMPFMTEGSCLHLMKISYQEGFDEPVIGSILKETLKALEYLHRQGQIHRDVKAGNILIDGAGVVKLGDFGVSACMFDRGDRQRSRNTFVGTPCWMAPEVLQPGTGYNFKADIWSFGITALELAHGHAPFSKYPPMKVLLMTLQNAPPGLDYERDRRFSKSFKEMVAMCLVKDQTKRPTAEKLLKHSFFKNAKPPELTIKNILSGLPPLWDRVKALQLKDAAQLALKKMPSSEQEALSLSEYQRGVSAWNFDIEDLKAQASLIHDDEPPEIKEDDDIPRNIEDLSSRNHLAKSSANECNSSQRAFATTLNSDGNSPTMNEAFDFDISDADTTRRADGYESNTRQNDSLPSTSKRDPESNHWASDGQRQLTSGGNNSSTSERGYGFERDASVQMISDKQRSEMRKTASLSGPLSLPTRASANSLSAPIRSSGGYVDSSGDKSKRSVVEIKGRFSVTSENVDLAKVQEGPLSSLSRKSPEGSLLRKSASTGDYFVNPKLMAVAGSREAHISPFSWLGRRKLGVINGDWGMLKLKEAERHDLNIKRKKDLLEDQIQDVMKAAHKSQATTSGPTHNPEIHQQTPKKPKA

SEQ ID NO: 227083 - protein, 195 aa, Zea Mays
MASHDHHHSHSHDDHHHHSHGDGGGHAAGGSWVGEDGRVWHSHDGLAPHSHEPIYSPGDFTKRAPPLASRDFADRAFTVGIGGPVGTGKTALMLALCRFLRDKYSLAAVTNDIFTKEDGEFLIKHGALPEERIRAVETGGCPHAAIREDISINLGPLEELSNLSFLLLCMLESTPERQPCRLPASSYLPGKFLQV

SEQ ID NO: 227084 - protein, 1286 aa, Zea Mays
MPCAVCSDDPVCVAARKAGKKVVVDQWVEDSFDLGELADADRVLYAPVRDFKGIPGCDKLHICLTGYQKNWRDDIMKMVSLMGANFSKSLAANIITHLICYKFEGEKYELAKRVNIKLVNHRWLEECLKAWEILPVDHYTKSGWEVEIMGAQAKDSEDETEYAGTCSLSSRRIDRRTPIREISTKSHVDSALHAPSGGPTVSASNVVGATGKHLSTPEQFMKAHDASTKSSDIRTDSGTAPDTKCAAMSVDNDTLKPTRSHIYHNENDEVPADKASRDEAKDDHRRELDTRDSTLRTPSVHKSIAPTIPGDNIENTNRNCFHGFSQINVNSDLQLNSSEENFSKKILHSTNLSRKVDQKDDGHVPDPKPNISQSSVEENLNMCEFNPRSEGNSASRNDQPLGYSRRRSSKSGSLNVHRKKSILSSVSSKAPNEAPDSGSGISSATASDVGRSPTEPTKVDGHVNSGPTMNSTENQMSGCKSNLLSYRRTSLKLVSSAEVEKLPENSVNDKNMVEPDVVKTPALHEATTEEPSPSVCSEVRKESLGVHQNRDAEMTDAQLLSKTEDAAPCSKPDKVVSCQNSGLEGCKDVPVNKITDEHGIFPSKISTSRVKKVGAKRSRNAGSKAASEFTNSRSEVAALKPKHDKVASHENVEAQQGEGCCSPNAAECTPPSPAEALNNKSTNEVLTSSQGPNHKTNESLVASKAESVNMTLQRNKKGNRRKLPNTSNADENQRSSSRTVPNSKSGNLVAKGSRTADFNISDSPTVDETETVPSNSSFNEAVPPGNGEEKHKRLSSSANADDPEACTANKVPNNRVRKVVAKRKLSDVQSHKSGSEPCKTAKVLVSEVKVVSPARVAQSSRNANKVTVVQDLQNTNTGRTNDTVGSFCKDVTEDCSKDMQSSKTRSSRRQKIADLVDGSTDHDKENILVDSNFTSNTKRGNNSMSSKSNTKTLQSSKAVLDESSVIKRNGYGTLDVPEPTWFILSGHRLLRKEYRAILRRLRGRVCRDSHHWSFQATHLVTTEMRRTEKFFAAAAAGRWILKPDYLTASNEAGKFLEEEPFEWHGEGLNIGDTISLDAPRKWRQLRQRTGYGAFYGMQVIIYGECIAPTLDTLKRAIRCGDGTILATSPPYTRFFKSSVDFAVVSAGMPSADAWVQEFMRHSIPCISADYLVEYVCKPGHPLGKHVLFNMHDLAERSLQKLMKNQEDAPGSCSACGSDNREVPMLVCGGDGRSQSSGCGVRTHADCCNPPVEGCDGGEWLCGRCDQQKSAKKAKKTAAKPRVLKQR

SEQ ID NO: 227085 - protein, 65 aa, Zea Mays
MGPLPVTMACTKKPNMENMARRPFLSSFTLSSAAVSGSSARPSGSKAPPGYTLSSPSPSGPPPTR

SEQ ID NO: 227086 - protein, 160 aa, Zea Mays
MLGALGCVFPEILAKNGVKFGEAVWFKAGAQIFSEGGLDYLGNPNLVHAQSILAIWACQVVLMGFVEGYRVGGGPLGEGLDKVYPGGAFDPLGLADDPDTAAELKVKELKNGRLAMFSMFGFFVQAIVTGKGPIENLFDHVADPVANNAWAYATNFVPGN

SEQ ID NO: 227087 - protein, 353 aa, Zea Mays
MGSDFKSIPLIGTSPLINSSIDPICSLDVISPFKDSDSDIGPLVEKIDDPSMANDKDLLQVVRLLDDACKEAGFFYVKGHGIDESLMREVRNVTREFFQLPYEEKLKIKMTPQSGYRGYQRIGENITKGKPDMHEAIDCYTPIRPGKYGDLAKPMEGSNLWPKYPSNFEVLLENYIKLCRDISRKIMRGIALALGGAIDAFEGDTAGDPFWVLRLIGYPVDIPEEQRTDTGCGAHTDYGLLTLVNQDDDICALEVQNRSGEWIYATPIPGTFVCNIGDMLKVWTNGIYQPTLHRVVNNSQHYRVSVAFFYESNFDAAVEPVEFCREKTGGAAKYEKVVYGEHLVQKVLTNFVM

SEQ ID NO: 227088 - protein, 145 aa, Zea Mays
MRFQDSIDIVLATSFLQEFVEARRTAALNNVPSCMWSPVPPLELKGVSADALNANAGFVTFVVYPRHVEGKKLDRTVWNLLTFHAYVSYHVKCSEGFMHTRMRRRVESLIQALDRAKSDAEKLKKLVHGGSFKRLSLKNEGDSRF

SEQ ID NO: 227089 - protein, 313 aa, Zea Mays
MHMIYLPYSDDIRYPEEVRTNVVFQLYDLCKLIFLLGLQVHVTSDDAPRATDEQIKKASNIFKRIDLINFSACQFANPALQRHYGILEALALGEDEMPDIKDETLPDEEGLSKPGVANAIEEFKTSVYGENYDQEEAEAAAGKASRGNASKKRKEVTDAAAQISAAYDWAELADNGKLKEMTTVELRSYLTAHDLPVSGKKDVLISRILTHLGFMLRVLLHAAKWLWLQMSLETGEADEVMCWAILVIYRVTSWALGTRFRFQPARPQPALEAAQPRLRPQTARPHSASAGDLLSAQPRLRQCDRPPAPSTAR

SEQ ID NO: 227090 - protein, 727 aa, Zea Mays
MDLDPEGIFRDDSDEDEDSVQEREANKEMVVYLVDASPKMFTPATTQDNEKQETHFHTIVNCITESLKTQIIGRSYDEVAICFFNTKEKKNLQDSAGVYVYNVGDREQLDRPTAKLIKDFSLIEDSFMSTIGSRYGITAGSRENTLYNALWVAQALLRKGSVKTVSKRILIFTNEDDPFGTITGAVKTDMIRTTLQRAKDAQDLGLSIELLPLSPPDDQFNMSLFYADLIGLDGDEMTEYLPSAGDKLEDMTNQLRKRIMKKRRIKTLSFAITNDVCIEVNTYALVRPTTTGTITWLDSLSNLPLKVERSFICNDTGALLQDAQTRFQMYNDTIVKFSVRELSEVKRVASHHLRLIGFKPLDCLKDYHNLRPSTFIYPSDERIFGSTCVFVALHSSMLRLGRFALAFYGNPTRPQLIALVAQEEVTSSGRQFEPPGMHMIYLPYSDDIRYPEEVHVTSDDAPRATDEQIKKASNIFKRIDLINFSACQFANPALQRHYGILEALALGEDEMPDIKDETLPDEEGLSKPGVANAIEEFKTSVYGENYDQEEAEAAAGKASRGNASKKRKEVTDAAAQISAAYDWAELADNGKLKEMTTVELRSYLTAHDLPVSGKKDVLISRILTHLGFMLRVLLHAAKWLWLQMSLETGEADEVMCWAILVIYRVTSWALGTRFRFQPARPQPALEAAQPRLRPQTARPHSASAGDLLSAQPRLRQCDRPPAPSTAR

SEQ ID NO: 227091 - protein, 1026 aa, Zea Mays
MDLDPEGIFRDDSDEDEDSVQEREANKEMVVYLVDASPKMFTPATTQDNEKQETHFHTIVNCITESLKTQIIGRSYDEVAICFFNTKEKKNLQDSAGVYVYNVGDREQLDRPTAKLIKDFSLIEDSFMSTIGSRYGITAGSRENTLYNALWVAQALLRKGSVKTVSKRILIFTNEDDPFGTITGAVKTDMIRTTLQRAKDAQDLGLSIELLPLSPPDDQFNMSLFYADLIGLDGDEMTEYLPSAGDKLEDMTNQLRKRIMKKRRIKTLSFAITNDVCIEVNTYALVRPTTTGTITWLDSLSNLPLKVERSFICNDTGALLQDAQTRFQMYNDTIVKFSVRELSEVKRVASHHLRLIGFKPLDCLKDYHNLRPSTFIYPSDERIFGSTCVFVALHSSMLRLGRFALAFYGNPTRPQLIALVAQEEVTSSGRQFEPPGMHMIYLPYSDDIRYPEEVHVTSDDAPRATDEQIKKASNIFKRIDLINFSACQFANPALQRHYGILEALALGEDEMPDIKDETLPDEEGLSKPGVANAIEEFKTSVYGENYDQEEAEAAAGKASRGNASKKRKEVTDAAAQISAAYDWAELADNGKLKEMTTVELRSYLTAHDLPVSGKKDVLISRILTHLGFMLRVLLHAAKWLWLQMSLETGEADEVMCWAILVIYRVTSWALGTRFRFQPARPQPALEAAQPRLRPQTARPHSASAGDLLSAQPRLRQCDRPPAPSGEKGMDIDCHTVEFDDVRYHIQFSMRNPKVMVLSVALPLPPPEAILYDGLPLGAIEAIKAAYGPVVQILDPPKDGFDLTMKINLTKLPLDEEQRNTILTQIASIREVVLGAPLKLLLKHLASKTVAPNVNNLVALVHRPNESFFLAPQADKVTIVYPMRFQDSIDIVLATSFLQEFVEARRTAALNNVPSCMWSPVPPLELKGVSADALNANAGFVTFVVYPRHVEGKKLDRTVWNLLTFHAYVSYHVKCSEGFMHTRMRRRVESLIQALDRAKSDAEKLKKLVHGGSFKRLSLKNEGDSRF

SEQ ID NO: 227092 - protein, 720 aa, Zea Mays
MDLDPEGIFRDDSDEDEDSVQEREANKEMVVYLVDASPKMFTPATTQDNEKQETHFHTIVNCITESLKTQIIGRSYDEVAICFFNTKEKKNLQDSAGVYVYNVGDREQLDRPTAKLIKDFSLIEGSRYGITAGSRENTLYNALWVAQALLRKGSVKTVSKRILIFTNEDDPFGTITGAVKTDMIRTTLQRAKDAQDLGLSIELLPLSPPDDQFNMSLFYADLIGLDGDEMTEYLPSAGDKLEDMTNQLRKRIMKKRRIKTLSFAITNDVCIEVNTYALVRPTTTGTITWLDSLSNLPLKVERSFICNDTGALLQDAQTRFQMYNDTIVKFSVRELSEVKRVASHHLRLIGFKPLDCLKDYHNLRPSTFIYPSDERIFGSTCVFVALHSSMLRLGRFALAFYGNPTRPQLIALVAQEEVTSSGRQFEPPGMHMIYLPYSDDIRYPEEVHVTSDDAPRATDEQIKKASNIFKRIDLINFSACQFANPALQRHYGILEALALGEDEMPDIKDETLPDEEGLSKPGVANAIEEFKTSVYGENYDQEEAEAAAGKASRGNASKKRKEVTDAAAQISAAYDWAELADNGKLKEMTTVELRSYLTAHDLPVSGKKDVLISRILTHLGFMLRVLLHAAKWLWLQMSLETGEADEVMCWAILVIYRVTSWALGTRFRFQPARPQPALEAAQPRLRPQTARPHSASAGDLLSAQPRLRQCDRPPAPSTAR

SEQ ID NO: 227093 - protein, 562 aa, Zea Mays
MCRRSTQVHVSRKWSFHGATENGPLQHIDMVLSDCKGNSMYAEIPANLAEEKGALIETNQIYDISRFRVTAAKTAYKPIDGDKMIQFTIYTIIKPASNPPPTFSLYIYQLTPFDEIESQIQHKTKFLDVLGTITEVTALKTVHIEGQLSPTIIRDIMIEDLSRKTLKITLWAKRATSFTIQNVYDPVSKKPILALFVGCLPKFYKGVYLSGGAACHWYFNPAIPEAEAYQNSITKYYAYKHGGETIQLHLPTQPEHALQTFQPPTIEHKTLEQLLTMNPYDYPDTGYECTVTVTEIDTSNTWWYPSCTKCGRKTTPHNTTYYCDLCKWDGYKFKYKLKFRASDATAIAQMFCFDNIARYIVGKSCKVILRSTNAATPIPPDLAQIVSLKFTFRVIPDDSSFDNQDQVPIALRIISITAAHGRQHALPLKPTNIIEGTSTPQNKLQLQLIENSPSNPFQNLSTSTPPPKQATRKLIYPPLSNPLTYQHTPKSDGEEEITEQTMDTSQIKGKKVCTHSNLLQKGSRKEAYISKAMMTMSRRTKHRCLEHQIFLLLTRCLLQTLV

SEQ ID NO: 227094 - protein, 383 aa, Zea Mays
MLSWTPRYVEAPTPNFRIILLSMNQFDPKTNSGPQKHGRYEDDMFYTALAFSKTGSEKELDSTSCATISTFLQGPQLTRYGFSSLHNDLRALQPTVLIWNENLITISKFEDKIYVLLNDLSLLRTETDAVWERLTQANGDGVFVDCNFVPTDSKIQSVLPLTKTERKKRIKEKMDLKKKEKDSNKDKDDEDTKDKDDGKEEDSNEDRDDEETEEKDDGNVAPQTYFLQGRHINLNVRPINFLGLSTHVIHQINDGPCALIAAMFYSQGDISFEPHETVVSMEYLLGLVLALLGGSVKMQDYSDERKSQILNVVKSLAGGFDMDVIFTRTDGFTMTPEWLLLDCLDLNLRHGWIAARINGVLNSLVTDSNYLETRVVWQTLDGM

SEQ ID NO: 227095 - protein, 715 aa, Zea Mays
MLRSASGTTPAMKMYSNLPIYFQKGEISFGVGYEPSFADISYAFQVALRKVNLSTRASCSGLAVQLPKKERSLPWWDDMRYYLHGKIILYFNETKWKFLATTNPYEHVDKLQIVSEYMEIQQTDGRVDVSAKEFKIYISSVESITKNRRIKVPSRVPRPFIYAPLFSLNVVIDWQCESRNPLNHYLHALPVEGEPRKKVYDPFRSTYLSLRWNFSLRPLQSQYGNGPPPPFYGNNSMLRGIMSGSPCKMTDDDFPTMNLGAHDLAWVFKWWSLNYSPPHKLRSFSRWRRFGIPRATRSGNLSLDKVLVEFFFRVDATPCCIRHAPLSEDDDPAFGLTFKMSNLKYELCYSRGKQQYTFDCKRESLDLVYRGLDLHRPEVYLMRDNNLSSVENVSKVRTMVQQSHGKFVHDRCNMGNFQEKHEDGFLLSSDYITIRRQTRKADPERLMGWQDTGRSHEITYVRSEFEDDSESDHTLSEPSDDDDDFNVVLADNCQRVFVYGLRILWTIENRDAVWSWVGGISKAFEPPKPSPSRQYAQRKMIEERNAEGSKVPQDSSSSIHVGSPSVQHLDASGSSSSLHSKANRSSDVAVNHDIFDDSDKGGTAQYMVNVITPQFNLHSEEANGRFLLAAASGRVLARSFHSVVHLGKEILEQALGTSSAQILELQPEMTWNKSELSVMLKDVQAHVAPTDVDPGAGLQWLPKVLGSSEKLKRTG

SEQ ID NO: 227096 - protein, 1748 aa, Zea Mays
MLSRLMPWMRLHSLRTKGMKLSKRNSNQEISQKKEMKPILWTCTVAAPEMTVLLYSLNGLVLYHACSQSSHLFANNIASKGIQIHTELGELLVHMEEEYRELLKENIFGVDTYSGSLMHIARMSLDWGYRESDVQDMVETSRNALVFSIDISDMEVKFGFKHLESIVLNLMSFRTLFKSLQLSGGSAKEKNLERKGEKKMKGVKKLKLSLQKFSITYCGDANIISMPIADPKRVNYGSQGGQVIVSVSADGTPRRASITSVLPDCHLRFSASLVISHLSMCIDKERKTTEAELERVKAIYEELPEDRSGVRVTLLDMQNAKIVRRSSGHAEVAVCSLFSATDIYLRWEPDAHLALYETFIRFKHFLHHNVSQNSEKMINTEVASTKSNEHGNITAGFINSQKSNRKGSIFAIDVDMLRVSAELADGVEANMHVQSIFTENAKIGVLSEGLSLTFNGARVLKSTRIQISCIPFSTGSLLDAKIEPSSKRDWVVQGLDVHICMPYRLPLRAIEDAVEDMFRALKLVSSAKRSIICPDEKEKSRKVNSGGSKFGSVKFVLRKLTADIEEEPIQGWLDEHYHLMRNKICELGVRLNYLEEAISGSVDPSNHSSERKVLYNGVEVDIHDTTALQKLQEEIHKQAFRSYYVSCQNMVLAEGSGACSEGFQAGFRQSSRRASLLSLSASDLDVTLTRIDGGEIEMVEFIKGLDPVCQEQNIPFSRLYGSDVSVVAGSLVVQLRDYTSPLFSSLSGKCQGRIVLAQQATCFQPQIHQELYIGRWQKVTMLRSASGTTPAMKMYSNLPIYFQKGEISFGVGYEPSFADISYAFQVALRKVNLSTRASCSGLAVQLPKKERSLPWWDDMRYYLHGKIILYFNETKWKFLATTNPYEHVDKLQIVSEYMEIQQTDGRVDVSAKEFKIYISSVESITKNRRIKVPSRVPRPFIYAPLFSLNVVIDWQCESRNPLNHYLHALPVEGEPRKKVYDPFRSTYLSLRWNFSLRPLQSQYGNGPPPPFYGNNSMLRGIMSGSPCKMTDDDFPTMNLGAHDLAWVFKWWSLNYSPPHKLRSFSRWRRFGIPRATRSGNLSLDKVLVEFFFRVDATPCCIRHAPLSEDDDPAFGLTFKMSNLKYELCYSRGKQQYTFDCKRESLDLVYRGLDLHRPEVYLMRDNNLSSVENVSKVRTMVQQSHGKFVHDRCNMGNFQEKHEDGFLLSSDYITIRRQTRKADPERLMGWQDTGRSHEITYVRSEFEDDSESDHTLSEPSDDDDDFNVVLADNCQRVFVYGLRILWTIENRDAVWSWVGGISKAFEPPKPSPSRQYAQRKMIEERNAEGSKVPQDSSSSIHVGSPSVQHLDASGSSSSLHSKANRSSDVAVNHDIFDDSDKGGTAQYMVNVITPQFNLHSEEANGRFLLAAASGRVLARSFHSVVHLGKEILEQALGTSSAQILELQPEMTWNKSELSVMLKDVQAHVAPTDVDPGAGLQWLPKVLGSSEKLKRTGALLERVFMPCQMYFRYTRHKGGTADLRVKPLKELRFNSPDITATMTSRQFQVMFDVLRNLLFARLPKPRKNSLQYPSDDEDIEEEADEVVPDGVEEVELAKITLEQREREIKLLLDDIRSLTGNGDNGTDHCHSAEKGDCLWMINSGKASLVEGLKRDFANLQKSRIFASSALRKALSNASQSHLEKEKNKTTSCAMRISMKISKVVWSMLADGNTFAEAEINDMVCAQPCPFTSVAVCSFNRVGESERRQGG

SEQ ID NO: 227097 - protein, 667 aa, Zea Mays
MLHKSILQVALKCSYIETTGCLGQFLALGAKASSWCRKHIVCSIESVDDSEDVQQEEHSKILPEIILMALNISIKILPSAAKCVTVDMVHNIGDFISELLSLMESSIVDNDKKIHGAALDITKAAPVFLDETTKLCRAYSEATKVDNCTMSITDEDATVKHNKQGLASDVIRITSSTIQTMCRLGTYAASSGGSQVILLNVSWKGVVSLLQSGKGMIEGKVNVREIIVTLLSLSIESLRVAAETWCAPLLETLGATEARRAFLPIKFFLINAVRICSTYPSEAMIIYKNIINCAVVITSSSILFSKKPQLKAANETLVELLEPTLFVLLDTLMKSSDLTPESKCQLAHHFFENEEDKSPDLMGQANQREINLASLDCIFSMDSDVDHRNRALLPAELLVFLHFLNASSWLTEMVVITLSKKLQTLLNILTSEDIYSYVLGFQIPALNGADQSPAVVWQPVYTSIIQALKAFMISTVASSAAWNELEAFLLENIFHPHFLCLEIITELWCFFIRYAETETSINLVNQVSLLLKTVASPEDVLSPLSALRKVARSLCIILSYASSATVDQIYTCVLNGENSSKSSILHLALLMEGFPLDSLSDGTKELAMKKMFTSFAGYLESYSKNHRVINVPTCKLGVVGLPIHALASALQHSANRQWLPLCQLSVT

SEQ ID NO: 227098 - protein, 1007 aa, Zea Mays
MEVGGDLQSLLEAIKSSEVLEDRIGLINRLESSFEYSADDLRPVLDSLNVYDLNGNFRYLGMILDVQVALKCSYIETTGCLGQFLALGAKASSWCRKHIVCSIESVDDSEDVQQEEHSKILPEIILMALNISIKILPSAAKCVTVDMVHNIGDFISELLSLMESSIVDNDKKIHGAALDITKAAPVFLDETTKLCRAYSEATKVDNCTMSITDEDATVKHNKQGLASDVIRITSSTIQTMCRLGTYAASSGGSQVILLNVSWKGVVSLLQSGKGMIEGKVNVREIIVTLLSLSIESLRVAAETWCAPLLETLGATEARRAFLPIKFFLINAVRICSTYPSEAMIIYKNIINCAVVITSSSILFSKKPQLKAANETLVELLEPTLFVLLDTLMKSSDLTPESKCQLAHHFFENEEDKSPDLMGQANQREINLASLDCIFSMDSDVDHRNRALLPAELLVFLHFLNASSWLTEMVVITLSKKLQTLLNILTSEDIYSYVLGFQIPALNGADQSPAVVWQPVYTSIIQALKAFMISTVASSAAWNELEAFLLENIFHPHFLCLEIITELWCFFIRYAETETSINLVNQVSLLLKTVASPEDVLSPLSALRKVARSLCIILSYASSATVDQIYTCVLNGENSSKSSILHLALLMEGFPLDSLSDGTKELAMKKMFTSFAGYLESYSKNHRVINVPTCKLGVVGLPIHALASALQHSVINVDSIVDENSITAMFKFTISLIKMFRIAPDSSKDNLAKHISSMLVIISNTRHLCAFSEMEKLTLQLRTLFVSTSDKSNAVLSQCKPSMASFMSTLGHLNVTEDDANELCSAIWDLYHLLLKERHWALIHLAMDSFGYFAARTSFTQLWRFVPRDAALSYNASTGTSIDENGFMLELRAYLQKEVALHTDKWSEEQIRLLVSEGRALKKLVEACCEIPVVAEPEKAPVAKDASTKKRKMPDGICEGMAMLQNGLKVMRGAFGEGDFADLKDRFAAHLSRLEDAVSQFASLSDEI

SEQ ID NO: 227099 - protein, 111 aa, Zea Mays
MLMMLMTQLASLLRARRRLYRIHQTKLEKGGFSIYATKRKLTSSLIIGPGSGYNLVSNPLAEDSSTGTKGKTNNETKKRFSEQLRDEGESFRAVFDKTKQHIGVFENGDEE

SEQ ID NO: 227100 - protein, 414 aa, Zea Mays
MASLVTLPAIAFSNPATASGAVRLRAAAFRCWALRRRGWAVAAAVASPNSVLSEHAFKRLQLGSDDEDEEGPYGSDADEGFQGDEEELAIARLGLPDELVATLEKRGITHLFPIQRAVLIPALGGRDLIARAKTGTGKTLAFGIPMIKQLMEQDDGRSTRRGRTPRVLVLAPTRELAKQVEKEIKESAPKLGTVCVYGGVSYNVQQNALSRGVDVVVGTPGRIIDLINGGSLQLGEVQYLVLDEADQMLAVGFEEDVETILQQLPADRQSMLFSATMPSWVKKLSRRYLNNPLTIDLVGDQDEKLAEGIKLHAIPLTATSKRTILSDLITVYAKGGKTIVFTRTKKDADEVSLALTTSIASEALHGDISQHQRERTLNGFRQGKFTVLVATDVAARGLDIPNVDLEFSSEGFAL

SEQ ID NO: 227101 - protein, 335 aa, Zea Mays
MLLGTTLLVQPTKFFSLERLILARLSGFGSLGLRVYAKGGKTIVFTRTKKDADEVSLALTTSIASEALHGDISQHQRERTLNGFRQGKFTVLVATDVAARGLDIPNVDLIIHYELPNDPETFVHRSGRTGRAGKAGTAILMFTSSQKRTVMSLERDVGCKFEFISPPSIEEVLESSAEHVIATLRGVHPESTQYFLGAAEKLTEELGPHALASALAHLSGFSQPPSSRSLISYEQGWVTLQLTREPGYGRGFFSPRSVTGFLSDVCSAAADEVGKIYITADENVQGAVFDLPEEIAKDLLTMEVPPGNTLTKISKEQAFQGWRCFKRPGWLGHRQ

SEQ ID NO: 227102 - protein, 144 aa, Zea Mays
MRLVTLSNMPILQQLHLEEQLLRRTSDNWCVINDGMAPATILMGLQESLGACRHTAGPLGPSADCEEVQWRWHVIVDWGTVVVTFICNKNAVAGLQIYGKKFDRFGEFHLRENDYAFSHSKVWRKCSINNKKSLGSSHVVLVGL

SEQ ID NO: 227103 - protein, 405 aa, Zea Mays
MESRNGEADELPPRDAGDEAKKHYQEGCPGCRLDETNESNTGIPYLNFFYIWIVCLTSSLPIQSLFPYIYFMMRDFKIAKQEQDIGFYAGFVGATYFLARTVSSVPWGIFADKYGRKPCIVISIISVIVFSTLFGLSTSYWMAIVTRGLLGLLCGILGPIKAYATEVCRKEHQALAMSVVTSSRAIALVVGPAIGGFLAQPAEKYPNIFSNGSIFGRFPYFLPGLVISILAAGSCIACIWLPETLHFHDNEKVEAIDEMEAQVGDSNLEVGKAKESGCTSTKNLLKNWQLMSAVILYCIFCLHDTAYLETFSLWAVSSRKFRGLSLTSQDVGIVLAVSGIGVLVYQLAVYPFIVKYFGPVRPLRPSVVLSILVLAMYPFMAKLQGLELKLLINIASLLENVFSVS

SEQ ID NO: 227104 - protein, 79 aa, Zea Mays
MNTHLKTVKLTLKGKNPVTLDHLSVRGNNIRYYILPDSLNLETLLVEETPRVKPKKPTSGKPLGRGRGRGRGRGRGRGR

SEQ ID NO: 227105 - protein, 351 aa, Zea Mays
MKLDRGYISPYFITNSKAQKCELEDPLILIHDKKVTNMHAVVKVLEMALKKQRPLLIVAEDVESEALGTLIINKLRAGIKVCAVKAPGFGENRKANLQDLAILTGGEVITEELGMNLENVEPHMLGSCKKVTVSKDDTVILDGAGDKKSIEERADQIRSAVENSTSDYDKEKLQERLAKLSGGVAVLKIGGASEAEVGEKKDRVTDALNATKAAVEEGIVPGGGVALLYASKELDKLQTANFDQKIGVQIIQNALKTPVHTIASNAGVEGAVVVGKLLEQGNTDLGYDAAKDEYVDMVKAGIIDPLKVIRTALVDAASVSSLMTTTESIIVEIPKEEAPAPAMGGMGGMDY

SEQ ID NO: 227106 - protein, 180 aa, Zea Mays
MSYAYLFKYIIIGDTGVGKSCLLLQFTIGVEFGARMITIDNKPIKLQIWDTAGQESFRSITRSYYRGAAGALLVYDITRRETFNHLASWLEDARQHANANMTVMLIGNKCDLSHRRAVSYEEGEQFAKEHGLVFMEASAKTAQNVEEAFIKTAGTIYKKIQDGIFDVSNESNLRCFDFLK

SEQ ID NO: 227107 - protein, 98 aa, Zea Mays
MTVMLIGNKCDLSHRRAVSYEEGEQFAKEHGLVFMEASAKTAQNVEEAFIKTAGTIYKKIQDGIFDVSNEFGMEGVHVFRMNCPGAGLYRAILFCICS

SEQ ID NO: 227108 - protein, 359 aa, Zea Mays
MVLRLFMLQKLYTGDSVKLSTMDATSLIVSPQVVRYHSLVIESGSLPDDLTSIAWTASPNLLSYLESDRTNVSTFLGTLDNNLMRNPLEYSNNGGELSNIGHACESDDSRVIMGIRHSSRPHYGVQFHPESIATHHGRQIFRNFKKITGNFGLRSSWIQERKVNSASHHDSIPKDLLHTERMELSESVLGKRGIGKKCLRLQWKKIENFVCPTVGSEDIFAVLFGHQSGEDTFWLDSSSVDQNRARFSFMGGKGGSLWKQMSFHLSGQRANCGGMLSIQDAYGFTAKKFIKDGFLEFLNKEIESIQYNEKDYEGLPFEFHGGFVGYLGYGLKVECDASSNKAKSIMEMGYAKIQRILHG

SEQ ID NO: 227109 - protein, 146 aa, Zea Mays
MNTRISYADVANPDELDEEFDTFPTSKSPDLIRMRYDRLRHVAGRIQTVVGDIATQGERLQSLLSWRDPRATAMFLIFCLITAIILYVTPFQAIALCLGFFSMRHPRFRHKVPSAPANFFRRLPVSVTHISLYNSLILSFPQSWCT

SEQ ID NO: 227110 - protein, 76 aa, Zea Mays
MSLHSLIYQNKCRRREGACSCRRICLALEKLDENKERREGGGRGLLEWRYVLCLDRSRNTCQYTSAPHGLRLLSNP

SEQ ID NO: 227111 - protein, 309 aa, Zea Mays
MWSYSWLEFQQLNDIYRFKAEEYSHTSVNKFNVNPESIPGCGSGSKNRVNCARAGEGSLEAGLALEMVKAKARVRYEPGPAFEEVKEEAMLDISPTDSTEFWLIQWPKDQCYFLMFEILQFQANRILRQKIAGDQFLDLVSVETEVRSVYKELYSIYKTTLKSKSLINEPRIIIKPKSCNGVWPLCTAQQICYHVLGLVHGIWTPVPQAVEDYIATPKPNGYQSLHTTVIPFLMRIRTEDMDLIAERGIATHYSGRGVVSGPVRLGISSGRNAKGKVICLNNTGFALRIGWLNAIREWQEKFVGNMSSR

SEQ ID NO: 227112 - protein, 1113 aa, Zea Mays
MSSLTRDIVFLVLQFLDEEKFKETMHKFEQESGFFFNMKYFEAKGHAGDWDEVEKYLSGFTKIDDNNYSMKIFFEIRKQKYLEALDRHDGAKALDILVKDLKVFSTFNEESYKEITQLLTFENFRENEQLSNYGDTKSARTVMLVELKKLIKANPLLQEKLVFPTLKASRLRTLINQSLNWQHQHCKNPRPNPDIKTLFTDHTCTLPNGAPASRVSVPLAAVPKPLQLPPPSPSLARWLTNTAVPSSVQSAVVAASSIPVPPNQVVSMLKRPTITDYQSAVPEQLMKRLRPGGHGIGETTYPTPIPQRAWSMDDLPRTVACSLSHGSNVTSMDFHPTRHTLLLVGSANGEFTLYEIGLRQTLLSKPFKILDTNACSPQFQNAVVKDPPMSINRVTWSPHGELIGVAFTKYLIRVYAYQPPNETRHVLEIVAHSGGVNDIAFSRPNKQLCVVTCGDDKLIKVWNMHGQKLFTFEGHKAPVYSICAHHKQSIQFIFSTSLDGKIKAWLYDNVGSRVDYEAPGKWCTTLLYSADGTRLFSCGTSKEGDSYLVQWNENDGSIKRTYSGFRKRSAGVAGVVQFDIAQNHILAAGEDNKIKFWDVDNNNMLICTDAEGGLPALPRLRFNKEGNLLAVTTVDNGFKILANADGLRNLRALGSRPPFEAFRLQYEDASMKVSGAPVVATISPNIGRMDHLDRNSPAKPSPMLTGGDTASRSIDIKARISEEKSDKAKASELMEVLNPQQCRVATMPETPDQARKVVRLLYTNSGVGLLALGSNAIQRLWKWSRNEQNPSGKATASVVPHHWQPNSGLVMTNDTSDTNPEEAIPCIALSKNDSYVMSACGGKVSLFTMMTFKVLTTFMPPPPASTFLAFHPQDNNIIAIGMEDSTIHIYDVRVDKVKTELKGHQKRITGLAFSTNLGVLVSSGADAQLCVWTNDTWEKKRTVSIQMLAGKAPSGNTRVQFSSDQNHLLVVQETQLAIYDASKMERIYQWIPQDTLSASISHASYSCNSQLVFSAFIDGNIGVFDAENLRLRCRIAQSVINSNPHVHPLVVAAHPHEPNQFAVGLSDGFVKVLEPLESEGKWGTPAPVTNGTPNGKTPASSTTSNPATDQIQR

SEQ ID NO: 227113 - protein, 334 aa, Zea Mays
MEDARAVLIKLADRLHNMRTLDSLSKTKQQSVAKETLEIFAPLANQLGILNWKEQLENLCFKYLYPENFDELSTKLIEIYNIDMIAAATRRLEQALQVRGLSYYAIYGRHKSMYSIYRKMARKKLVMDKIYDIHGVRVILENKADCFATLEIIHHLWPRIPGKFKDYINSPKPNRYQSLHTVVLTEQTLPLEIQIRTRDMHLQAEFGIAAHWRYKEGYPSSLACDASSKETHTIPSHSDACLLSYSKQCDHKGPVLMSVQEIPQNWTILDLLKRSSNYGMPLRLRLNCHAVHNWNQELKMGDVLELIPSTPCKSRGHTRELHQKFDHRLAVSQS

SEQ ID NO: 227114 - protein, 216 aa, Zea Mays
MDKIYDIHGVRVILENKADCFATLEIIHHLWPRIPGKFKDYINSPKPNRYQSLHTVVLTEQTLPLEIQIRTRDMHLQAEFGIAAHWRYKEGYPSSLACDASSKETHTIPSHSDACLLSYSKQCDHKGPVLVILLENEKMSVQEIPQNWTILDLLKRSSNYGMPLRLRLNCHAVHNWNQELKMGDVLELIPSTPCKSRGHTRELHQKFDHRLAVSQS

SEQ ID NO: 227115 - protein, 549 aa, Zea Mays
MPLPSPLSTSPSPASQPASIRVAAKGANRRRAMTPSVSCPVKCRPHPCLAPQPPAPSPELLAARGAPIAGELRACRSPPYLPLSRSADSLELRAACRGAPPASRARAAVALGGDGPSAALIAGAQSRHAIFRDELVRRAFTAAEAAHRGQVRASGDPYLQHCVETAALLAELGAGPAVVAAGLLHDTVDDAGLGYGFISEHFGAGVADLVKGVSNLSHLSKLARRNDTASRIDEADRLRIVFLAMEDARAVLIKLADRLHNMRTLDSLSKTKQQSVAKETLEIFAPLANQLGILNWKEQLENLCFKYLYPENFDELSTKLIEIYNIDMIAAATRRLEQALQVRGLSYYAIYGRHKSMYSIYRKMARKKLVMDKIYDIHGVRVILENKADCFATLEIIHHLWPRIPGKFKDYINSPKPNRYQSLHTVVLTEQTLPLEIQIRTRDMHLQAEFGIAAHWRYKEGERSCCTSVSEIVEWVRWVTWHCQTLNTGYPSSLACDASSKETHTIPSHSDACLLSYSKQCDHKGPVLVILLENEKCKKSPKIGRYWTY

SEQ ID NO: 227116 - protein, 826 aa, Zea Mays
MLTMRMMLRQLGPRTQGVAMFYRLQKRGRREVQGRFLSQKGRKERVKNKRRHHPPRIKIVLKLMGKMLTGDNALMCHQCQRNDKGRVVWCNSCRNKRFCVPCIERWYPNLSEDEFAAKCPYCRKNCNCKGCLRMRGVEEPPKKEISEENQISYACNVVRLLLPWLRKLRQEQMEEKKLEAKIKGVLVNEMKLEQAEYNLDERVYCNNCKTSIVDFHRSCKYCFYDLCLDCCVEIRRGEIPGGEEIMRVKPEDRGRAYLFGTTNSKDGSKRFSMRRHSSSLENEPSNVVGSSEGANNSLELWKAESDGSIPCPPKELGGCGGSILDLKCFFPEKMLSNLEERADRIMRSEVFAKAVAKRSDQCPCYDHSGNIRTQDVRETANTKGSSDNHLYCPVATAIKEDDLAHFQMHWTKGEPVIVSDVLHLTSGLSWEPLVMWRALREKKTNGDVEDEHFAVRALDCLDWCEVEINIHMFFVGYMKGRTHHMTHWPEMLKLKDWPPSSSFDQRLPRHGAEFISALPFPEYTDPRYGPLNLTVKLPDGALKPDLGPKTYIAYGFYQELGRGDSVTKLHCDMSDAVNILTHTAQVPYARYQLEKIEETRKKMKEQDLQELYGVSELNLSSPFTDSRNISADEMSKTSCNYGLDVNDVPPVNNESEVQSGAGQCSDYIDKDRSYAGMHNGERTGGALWDIFRREDSDKIQDYLRKHATEFRHIFCNPVKQVIHPIHDQTFYLTEEHKRKLKEEYGVEPWTFEQKLGEAVFIPAGCPHQVRNLKSCIKVAMDFVSPESVNECMKLTGEFRRLPPDHRAKEDKLEVGMLYFQLLGLCL

SEQ ID NO: 227117 - protein, 892 aa, Zea Mays
MAIPEDLEGTSGDGGVTNRGSRGRRKGAAKGRGRGRPRSADRSFPPPAMAGVAVGDRVLRERRHTTNVFCERDTDVDDESIYFQDDVETVRSKDSRSGDVLQTAKKRKKGGAGKVSVTKRSKREGEEQKKASPSKDKDCAETNGCQRNDKGRVVWCNSCRNKRFCVPCIERWYPNLSEDEFAAKCPYCRKNCNCKGCLRMRGVEEPPKKEISEENQISYACNVVRLLLPWLRKLRQEQMEEKKLEAKIKGVLVNEMKLEQAEYNLDERVYCNNCKTSIVDFHRSCKYCFYDLCLDCCVEIRRGEIPGGEEIMRVKPEDRGRAYLFGTTNSKDGSKRFSMRRHSSSLENEPSNVVGSSEGANNSLELWKAESDGSIPCPPKELGGCGGSILDLKCFFPEKMLSNLEERADRIMRSEVFAKAVAKRSDQCPCYDHSGNIRTQDVRETANTKGSSDNHLYCPVATAIKEDDLAHFQMHWTKGEPVIVSDVLHLTSGLSWEPLVMWRALREKKTNGDVEDEHFAVRALDCLDWCEVEINIHMFFVGYMKGRTHHMTHWPEMLKLKDWPPSSSFDQRLPRHGAEFISALPFPEYTDPRYGPLNLTVKLPDGALKPDLGPKTYIAYGFYQELGRGDSVTKLHCDMSDAVNILTHTAQVPYARYQLEKIEETRKKMKEQDLQELYGVSELNLSSPFTDSRNISADEMSKTSCNYGLDVNDVPPVNNESEVQSGAGQCSDYIDKDRSYAGMHNGERTGGALWDIFRREDSDKIQDYLRKHATEFRHIFCNPVKQVIHPIHDQTFYLTEEHKRKLKEEYGVEPWTFEQKLGEAVFIPAGCPHQVRNLKSCIKVAMDFVSPESVNECMKLTGEFRRLPPDHRAKEDKLEVGMLYFQLLGLCL

SEQ ID NO: 227118 - protein, 527 aa, Zea Mays
MDGQVETFVGDEEGGSPQVPYDGEQPTLYDSVAKQYSEELGDQYNEQPRAQYDEGSGNPYNDYEEQANLYSEETGNRYNEDPADSYQEEQENAFSGGINQQDNLQVNNVDDNKWPGWPGESVFRILVPAQKVGAIIGRKGEFIKKMCEETKARIKILDGPPGVPERAVMISAKDEPDAPLSPAMDGLLRVHKRITDSSDGESSQPQRSAGNIGPTRLLVPSSQAGSLIGKQGATIKSIQDSSKSIVRIVENVPPVALNDDRVVEIQGEPLGVQEAVELISSHLRKFLVDRSVLPLFEAHMKMHGMPREQPVPPPQHWGPPQTWIRPPNIPPGGPGFGGNPQFMHPRPQDSYYPSPDVPHMEKQPHYGISAYGREAPPSGASATGNQPPSHAGSQVAHDMHIPLAYADAVIGAAGASISYIRRHSGATVTIQESRGAPGEMTVEITGTAAQVQTAQQLIQNFMAEAAPPPPGPAPASNPPAPPVDPSYGSYPPPYGAAPSYGSSAAAGPPQYNGGNYGGPTYPPSYGY

SEQ ID NO: 227119 - protein, 421 aa, Zea Mays
MQMWGDGATSMMWERYDEEVDSLAAAPLLTTTGLLEQLNVTRDSSDYLWYITSVDISPSENFLQGGGKPPSLSVQSAGHALHVFVNGQLQGSSYGTREDRRIKYNGNVNLRAGTNKIALLSVACGLPNVGVHYETWNTGVGGPVVLHGLNEGSRDLTWQTWSYQVGLKGEQMNLNSVEGSGSVEWMQGSLIAQKQQPLAWYKAYFETPSGDEPLALDMGSMGKGQVWINGQSIGRYWTAYADGDCKGCSYTGTFRAPKCQAGCGQPTQRWYHVPRSWLQPSRNLLVVLEELGGGDSSKIALAKRSVSSVCADVSEDHPNIKKWQIESYGEREHRRAKVHLRCAHGQSISAIRFASFGTPVGTCGNFQQGGCHSASSHAVLEKRCIGLQRCVVAISPDNFGGDPCPSVTKRVAVEAVCSPAA

SEQ ID NO: 227120 - protein, 154 aa, Zea Mays
MLRAGMGMAGGFRNGVSDARLKGQLSFPSRQGSVMSQISEVGSEELDGGGGGSPEAAGSNASGAPRGYVGIPGYPMGGGTSGAWSDEPSPSPTSGAKRRPRDSGPAPQNVQQQPLAPQLSLPSGGKPASAEMAAIEKFLQFQDAVPCKIRAKRG

SEQ ID NO: 227121 - protein, 233 aa, Zea Mays
MLRAGMGMAGGFRNGVSDARLKGQLSFPSRQGSVMSQISEVGSEELDGGGGGSPEAAGSNASGAPRGYVGIPGYPMGGGTSGAWSDEPSPSPTSGAKRRPRDSGPAPQNVQQQPLAPQLSLPSGGKPASAEMAAIEKFLQFQDAVPCKIRAKRGCATHPRSIAERVRRTKISERIRKLQELVPNMEKQTNTADMLDLAVDYIKDLQKQVKVLNDGRANCTCSGGGKLQDPFTS

SEQ ID NO: 227122 - protein, 229 aa, Zea Mays
MFLSKPCSLALPPDSPHRAVDPQYKGIKRFLLTLLLFYSKQSKSIRGANVVYDRITSQVDAPTIYDVFQLEKTFKTTFSLLVLHMWLVLRRLKEEGKDGVKFGQYIYEMYNHDVELRVSKAGVNLLLTKWMKELEKIFYGNIVKYDAAISPEARQDDLVNVIWRNIYAEEGSEAMDVAAAPAVQALARYTRREATCLSLTGKDSMFSGNFKFTALLPATPSPSPKKPVR

SEQ ID NO: 227123 - protein, 236 aa, Zea Mays
MLILDCCATVSRGGRRRFGNMAGVFLVMASAVRALDHSDAESEFLRKIAKIATAEIVTSKEFNVDWQRAAACLLVAIGSHDPDLMMGEIFLHFSGPTSALPAMLQILADFASSEALQFTPRLKDVLLRVLPILGSVRDGQRPVFANAFKCWCQAAWQYLGDAPSELPLDNDVMSFMNSVFELLIKVWTGSRDLKVRPNFGFEFFFHTTYNNIMSQLIGLLAMDFNRLIVWPGRSAD

SEQ ID NO: 227124 - protein, 532 aa, Zea Mays
MAYLSSLHHAPYPRLLLHHRYLFFSASSPPPVVTTRRLVPTLACHGRDLLDVMPYRDSRPSGTEGSRAGPGGAPRVTNSSTVRGNATAQEAHMPMWRERTPGTPRTWKKGDRVMLQEHAEGESQEKSWRRGLTRSLESKGPMVRKSWTRDGNGMRAKESGKVGNSRDEGTGRRNACKKMKKPPDGEYAGKLRVELDMCSKRGDVMGAITLYDSAVEEGIKLGQHHYNVLLYLCSSASLGFVQPAKSGNMGSGIASIGPAQKLDPSPSRSLGGSEGDNAYASESHVQDQGKNKADLIPGGLKAQTVSIPVEDELGDYARARGFEIFDKMCSEKERVQMSEAALTAKARMALSMGDSDMAFEIVKQMKGLGLKPKLRSYGPALTAFCNSGNVEKAFEVEAHMLESGITPEEAELETLLRASVVGRRGDKVNSVADAIRLRFTSKKWPLIVLHNKHLIGERMKKLNDHKLVQKWKQENSIYATPTGSNDDWYWLYAAIRCKCLIITNDEMRDHTFQILERNFFPKWKERHQYCFH

SEQ ID NO: 227125 - protein, 527 aa, Zea Mays
MLSALDPCHHPIQWRSVDRLVTIHNRCLMTRARYHAVRACVQIKCYMRQLLEGLAHCHARGVMHRDIKCANLLVSDGGELKVADFGLANLFAPAPAAPLTSRVVTLWYRPPELLLGATAYEPSVDLWSAGCVFAEMHARRPVLQGRTEVEQIHKIFKLCGSPPDHFWRRSGLSHAAVFRPQQPYPSRLRDTFAASMPDHAFRLLAMLLSLDPAARGTAAAALDAEYFTTAPYACDPGSLPKYAPNKEMDAKFREESRRRSNLRSQGGEGAKRLSWGHKSMQLQDTNQSHVHAEESLPVVAKSGAAVARNDGDSRLLVDLEPVPAIRFSKRHGDDGAGDHAPPYAKTLSSSFKEPARVADRRPLSGPGQLAASTGFAWAKKPRSVARSSTAAAAVTKRSYSKGSGTKNNSSGGGDRARTTSAATATEAAAPYEVEKQEVIKQWAQAADAFSASEAYSSRFRQTLAARQLKNGKMYKGKVSRVDHSGPLLSQPRRIDEFLLHSHEQQVRQAGRRPWFKKGALPIDGHTG

SEQ ID NO: 227126 - protein, 545 aa, Zea Mays
MSETAVRISRTPRSRGPCMLSALDPCHHPIQWRSVDRLVTIHNRCLMTRARYHAVRACVQIKCYMRQLLEGLAHCHARGVMHRDIKCANLLVSDGGELKVADFGLANLFAPAPAAPLTSRVVTLWYRPPELLLGATAYEPSVDLWSAGCVFAEMHARRPVLQGRTEVEQIHKIFKLCGSPPDHFWRRSGLSHAAVFRPQQPYPSRLRDTFAASMPDHAFRLLAMLLSLDPAARGTAAAALDAEYFTTAPYACDPGSLPKYAPNKEMDAKFREESRRRSNLRSQGGEGAKRLSWGHKSMQLQDTNQSHVHAEESLPVVAKSGAAVARNDGDSRLLVDLEPVPAIRFSKRHGDDGAGDHAPPYAKTLSSSFKEPARVADRRPLSGPGQLAASTGFAWAKKPRSVARSSTAAAAVTKRSYSKGSGTKNNSSGGGDRARTTSAATATEAAAPYEVEKQEVIKQWAQAADAFSASEAYSSRFRQTLAARQLKNGKMYKGKVSRVDHSGPLLSQPRRIDEFLLHSHEQQVRQAGRRPWFKKGALPIDGHTG

SEQ ID NO: 227127 - protein, 735 aa, Zea Mays
MRDSMVKINDRYEFPLQLDLDRDGGKYIAPNADRSTRNLYTLHSVLVHSGGVHGGHYYAFIRPTLSEQWYKFDDERVTKEDAKKALEEQYGGDEELPQINPGFNNAPFKFTKYSNAYMLVYIRESAKEKIMCTVDEKDIAEHLRVRLKKEQEEKEHKKKEKAEAHLYTIIKVARDEDLKEQIGKGIYFDLVDHEKVHNFRIQKQMPFSCFKEEVAKEYGIPVQFQRFWLWAKRQNHTYRPNRPLTVHEETQSVGQLREISNKAHNVELKLFLEVELGLDLRPLPPPEKGKEDILLFFKFYNPEKEELCFMGRLFVKALGKPSEILAKLNEMAGFPPDQEIELFEEIKFEPNVMCETIDKKLTFHYSQLEDGDIICFQKSPGAEYDAPVRYPDVPSFLEYVHNRQVVHFRSLEKPKDDDFSLELSKLHTYDDVVERVARQLELDDPAKIRLTPHNCYSQQPKPQPVKYRGVVHLSDMLIHYNQTSDILYYEVLDIPLPELQFLKTLKVAFHHPTKDEVVIHSIRLPKNSTIADVIYDLKTKVELSSPNAELRVLEVFYHKIYKIFPLHEKIENINDQYWTLRAEEIPEEEKNIGPNDRLIHVYHFKKDINQTQIQNFGDPFVLVVHEGETLAEVKKRIQSKLQVSADEFSKWKFAFISMNRPDYLQDSDVVPTGFQRREVYGAWEQYLGIEHADTAPKRVYTVNQVPSHARRFGGAFRNLRYLLGKNLHVDLVMYG

SEQ ID NO: 227128 - protein, 546 aa, Zea Mays
MRDSMVKINDRYEFPLQLDLDRDGGKYIAPNADRSTRNLYTLHSVLVHSGGVHGGHYYAFIRPTLSEQWYKFDDERVTKEDAKKALEEQYGGDEELPQINPGFNNAPFKFTKYSNAYMLVYIRESAKEKIMCTVDEKDIAEHLRVRLKKEQEEKEHKKKEKAEAHLYTIIKVARDEDLKEQIGKGIYFDLVDHEKVHNFRIQKQMPFSCFKEEVAKEYGIPVQFQRFWLWAKRQNHTYRPNRPLTVHEETQSVGQLREISNKAHNVELKLFLEVELGLDLRPLPPPEKGKEDILLFFKFYNPEKEELCFMGRLFVKALGKPSEILAKLNEMAGFPPDQEIELFEEIKFEPNVMCETIDKKLTFHYSQLEDGDIICFQKSPGAEYDAPVRYPDVPSFLEYVHNRQVVHFRSLEKPKDDDFSLELSKLHTYDDVVERVARQLELDDPAKIRLTPHNCYSQQPKPQPVKYRGVVHLSDMLIHYNQTSDILYYEVLDIPLPELQFLKTLKVAFHHPTKDEVVIHSIRLPKNSTIADVIYDLKTKVTRADY

SEQ ID NO: 227129 - protein, 448 aa, Zea Mays
MLRVTTELIPSKMMMRAKANRMMRRLAHMRFLGELYSYKHIDSSVVFDTLYLIIVFGHGTPEQDVLDPPEDCFRIRLIITLLQTCGHYFSKGSSKRKLDKFLLHFQRYIISKGPLPLDIEFDIQDLFGELRPTMSRYSSIEELVAALVEFEENERSAPVEKVENERHSDNESQKRHSRDAGPSVNGESAANGTEENGKAHEVADSESYSDTGSIDGREEEEDILSEDKSNDGSDNEGDDEDDGIPVVSDEDENVEVRQKVMNVDPKEQEDFDRELKALLQESLESRKSEARSRLPLNMMVPMNVLEGSKDSRATESESGEETVDEEGGNAGGSSKVRVKVLMKKGHKQQTRQMLIPADSSIVQSTKQQEAAELEEKQSIKRRILEYNEREEELNGASQMGNWGQGATSTSSIRSGGRGSWDGSARGGGRQRHHITGSGGFYHSYGRRR

SEQ ID NO: 227130 - protein, 585 aa, Zea Mays
MTLRYPIMAETNDASPSSKLHTRLRLWEFPDCYVFEPIDGLADLYLSVSRTSGTMNLVQDLPSRGSTTKHKVQTVYGVIGVLKLAVGSYFVVITDRDCVGSYFGHAIFKVTGLKILPCNNAHNTTSTDQKKMETKFSELLDSAERTIGLHFSYDINLTLSAQRLHDLGDEYRALPLWRQAEPRFLWNGYLLEPLIENKLNQYLLPVIQGSFQNIQAEVGSEMVNVTLIARRCTRRIGTRMWRRGADAEGYAANFVESEQIMQSKGFTASYVQVRGSMPFLWEQIVDLTYKPSFDIVRQEEAPRVLERHFHDLQKKYGAVLAVDLVNTGGGEGRLRERYAKSIEPILSEDLRYVHFDFHRICGHIHFERLSQLYDQIKDYLQKHKYFLINDKGEKIEEQTGTTRTNCIDCLDRTNVTQSMIGRKILESQLQRIGVLGAGDTISKHPTFDTNYKILWANHGDAISIQYSGTPALKGDFVRYGKRTTQGILNDLRNALGRYYLNNFVDGTKQDAMDLLQGHYMTSVSRDMAVPSKAGLLQSYASFRLAFALVMGALMFMLMSLRQGSKHLLSVFLSNIIYGLNKVTIS

SEQ ID NO: 227131 - protein, 183 aa, Zea Mays
METPRLVVGRRRGATPRFRRRRLPHPRGGAHCFPFARARPPVLITRCFYFPSSSCVRIPHPAPLRAATLSQLLRTRVRVCVAVPQLFRSSHSCFRVGNTAILEAPVTSGAGDFVGWTASKHIVIRYQVCLMSNVRVMLGSSLAWLNGISCALTSSGLWPWGSRRNCRMKIICFSRKYEYYKQK

SEQ ID NO: 227132 - protein, 546 aa, Zea Mays
MCSTAVLLVRTCVVLVCLAALARAPAKVHAAAGTGDGLLAIPTNASLSHCPSRCGDVQISYPFGIGPGCFRQGFELSCDRTTPSPRLFFVSGNSSIQVTSLYVRNSVVWVSAVGFNVTMSAGVDTYTKSWEAPTATGVCFYPDYNNLYTVGCGVYVYVFGDNMTDIIGSCTSICTDNREIMESANTGSGACEGLGCCSIPIRGGQGFTLKLGRLNSTIPQFGEALSNVKIIFSQNYDFVTDDVYASWVVNTSNVHAMLLNIAITDQPSCASAQSQENKDTYACSSESICYDYLPPSVSQRGYTCFCPGQIEGNPYIEDGCIAYYNPEAPNRNCMRLCGNISVPFPFGIQEGCYANDNLRLDCTSNDTLILDRGYAQYRVTNLSLDDGLLMVTNMLNDTSSNNVGRIIITSNNDKYQEVMDGNYDFSQEDVAIKWVISNITCQKAMQNNATYACVSDNSICKDVMRGNIRDGYRCKCSDGFQGNPYLHNNCTDIDECLIPNKCNGVCHNFDGGFNCTSCPHGKEDCNWACLWSWIHKFCTWCNCTHR

SEQ ID NO: 227133 - protein, 68 aa, Zea Mays
MAPPPRHRVIKLWRRKKALTQEVKTLLNVIQGGSLLHEDEEDLLQSVIQNLTAASSKRSKPFLPENVP

SEQ ID NO: 227134 - protein, 478 aa, Zea Mays
MDRIEQSQLACCSPLSRPGSALTDVNRGGETGSSSQSQCSDDDQSSRINLLLQDSESLTRDQINVVELSIAVLHQDIVRARKLAKKLEGIDIDELWREVAQIEASKSPEVEMLAGPLHHAAQSAYKPMCKLLITQCRCDVNASTIDSCMTPLMFALHHEGNKAIVKYLINNHADPNKGANSGIAPLHIAATEGYYEIVEYLLSRGADVDPLSQDGESPLFCAVFHGHERIVTLLLKHGADYNRVSNLMVTPLLVSLHGSSLDCLEILIEAGADINGAGCSVPPVALAAYKGLDGCIQCLLRNGANPNVPDEDNNIPIQIAAFKGWEKCVEILLPHAPHLPQYEGLSISEIIHWERTERFRRSSSAIEQGDVAYWKKEHDIALRFYNEAAQVGHEVATLYAKKSLCYLHLRDPAKFIDEAINYINMVQPDLSTLNPESDAKKLVLEFGRTWKAPGSSSRQDSGSSPTNKTGETSSREHQ

SEQ ID NO: 227135 - protein, 251 aa, Zea Mays
MIGGSDNPHLPHNHETDQVVYTGTFDNDTDMIAFSCCVYDGGDEEKEMDAAREIGWRGKFTKRGRVIRPGIIRMSGKCPLTPLEVGLMLRGMDFSNKTAIFLASGKIYKAEKNMASLLEMFPLLQTKETLASEEELAPFKMAAVDYSICAQSEVFVTTQGGNPAFFMGHRRYLYGGHSKTIKPDKRRLAVLFNNPRIGWTALKRHLLNMRAYSDVKGIEMKRPNESIYTFPCPDCMCRLNRTEHSKSKQSR

SEQ ID NO: 227136 - protein, 115 aa, Zea Mays
MGSRNRRWPRPPTWVVASADETQRQGARGNDVMDLISQLMSWFMPLIASRRGSPRPPHAARHGQRCRLHEARHGVLPQGGHRCWGQGIPRHGKITDDEINAASVTCCRIYLRLQS

SEQ ID NO: 227137 - protein, 350 aa, Zea Mays
MQIFVKTLTGKTITLEVESSDTIDNVKAKIQDKEGIPPDQQRLIFAGKQLEDGRTLADYNIQKESTLHLVLRLRGGMQIFVKTLTGKTITLEVESSDTIDNVKAKIQKESTLHLVLRLRGGMQIFVKTLTGKTITLEVESSDTIDNVKAKIQDKEGIPPDQQRLIFAGKQLEDGRTLADYNIQKESTLHLVLRLRGGMQIFVKTLTGKTITLEVESSDTIDNVKAKIQDKEGIPPDQQRLIFAGKQLEDGRTLADYNIQKESTLHLVLRLRGGMQIFVKTLTGKTITLEVESSDTIDNVKAKIQDKEGIPPDQQRLIFAGKQLEDGRTLADYNIQKESTLHLVLRLRGGQ

SEQ ID NO: 227138 - protein, 301 aa, Zea Mays
MFLSALVGIGTQLAALILLVIVLAIVGMLYIGRGAIITTFIVCYALTSFISGYVSGGLYSRNGGKNWIKAMVLTASLFPFLCFSIGFALNTIAIFYRSLAAIPFGTMVVMFVLWAFISFPLVLLGTVVGRNWSGAPNNPCRVKTIPRPIPEKKWYLTPSVISLMGGLLPFGSIFIEMYFVFTSFWNYKVYYVYGFMLLVFVILLIVTICVTIVGTYFLLNAENYHWQWTSFSSAASTALYVYLYSIYYYHVKTKMSGFFQTSFYFGYTLMFCLGLGILCGAIGYLGSTLFVRRIYRNIKCD

SEQ ID NO: 227139 - protein, 195 aa, Zea Mays
MTKEQKLKAERLRRAKMFAAIIKSGDKKMNDLAVFAAIIKSGDKKMNDLAASSDPTSEAAKAIPDMNVSGLDQQSVAKEREGSSDPFEHEGPNLTNHNKDSDDEPNRVRKYRKKHRESHEEKDESEDIYKHSRKRHHPEHSRGPSKDVHKHKHKSLKVAQKCPRLDQVPSLNQTSCSMTLHNQLRLQRHISTGYF

SEQ ID NO: 227140 - protein, 450 aa, Zea Mays
MASVPLSSPSQAGLLGPPFPLLPPPFGACLRYRLPRLPTGLSSSVRKGGLLPLPLLVPPRAAGGKDGRAVTKEELEEEEEEFEVTKEGEEVNQETGGGSGATKEAAARGSGRFAADYVSLGVREPVYEVIEVRSNGRMSTKKISRRQLLKSSGLRLRDTRSVDPSLWLMNSMPSLLVREQAILLNLGSLRAIAMYARVLIFNYNSPGGKAFLGLLLSRLNPRNINGGPAMPFQLEVVEAALLSRIQRLEQRLMKIEPHVATLLEVLPNRLTADVLEQLRLSKQALVELGSRAGDLKQMLIDLLDDPHEIRRICIMGRNCTLDRLSDIVECTVPLEKQIAEEEEEEIEMLLENYLQRCESCHGQAERLLNSAREMEDSISVNLSSRRLEVSRVELLLQVGTFCVAIGALIAGIFGMNLKSYLETNAVHFTQTPMKPVTKSWICRNHMKITT

SEQ ID NO: 227141 - protein, 79 aa, Zea Mays
MPFSTFKLVSVRAASGSPRPIDPTSAGSTSPPKGSWASTTWTARPTSRSSSSMARCSSLDFGSASESTTPRKDGRPIRI

SEQ ID NO: 227142 - protein, 490 aa, Zea Mays
MAGRGASPAAAAAVQVRCAGCRGVLAVAPGMTEFICPKCRMAQRLPPELMPPSPPKASPTPPPSGPTPPPPPPPSLPPPPPPPPQPVPHPLTRRSAPRAQGVDPTKIQLPCARCKAVLNVPHGLDRFRCPQCGVDLAVDLSKLRHFLASAGPGFFPPPLPPPPPPQPPVPMPHLPFLPMMPRLPLPMLPMLSPAELPEEINEVAVDVERDEDESGTFGETFIDYRPPKLSFGFPHPDPVVETSSLSAVQPPEPTYKLTIMKELDETNALSSLQIETIVYACQRHHHHLPTGARAGFFIGDGAGVGKGRTVAGLIWENWQQGRHKALWISIGSDLKYDARRDLDDVGAKCVEVHALNKLPYSKLDSKTFGITDGVVFVTYSSLIASSENRSRLQQLVQWCGSEFDGLLVFDECHKAKNLIPEAGSQPTRTGKAVLEIQDMLPQARVVYCSATGASEPRNLGYMVRLGLWGDGTSFENFNQFLGWWKKSIAY

SEQ ID NO: 227143 - protein, 376 aa, Zea Mays
MCGARRPTWRAGFSTNHSSIQSLSRLSSPRFPSPPAVSLTPRARALSFLAFAAGDELELELVPRIEDDGRGMEPMNVDNGGSGGLDAQIEQLMQCRPLAEQEVKALCEKAKEILMEESNVQPVKSPVTICGDIHGQFHDLVELFRIGGKCPDTNYLFMGDYVDRGYYSVETVTMLVALKVRYPHRITILRGNHESRQITQVYGFYDECLRKYGNANVWKTFTDLFDYFPLTALVESEIFCLHGGLSPSIENLDSVRSLDRVQEVPHEGPMCDLLWSDPDDRCGWGISPRGAGYTFGQDISEQFNHTNNLKLVARAHQLVMEGYNWAHEQKVVTIFSAPNYCYRCGNMASILEVDDCNSHTFIQTSRCFFRSPKQTS

SEQ ID NO: 227144 - protein, 372 aa, Zea Mays
MCGARRPTWRAGFSTNHSSIQSLSRLSSPRFPSPPAVSLTPRARALSFLAFAAGDELELELVPRIEDDGRGMEPMNVDNGGSGGLDAQIEQLMQCRPLAEQEVKALCEKAKEILMEESNVQPVKSPVTICGDIHGQFHDLVELFRIGGKCPDTNYLFMGDYVDRGYYSVETVTMLVALKVRYPHRITILRGNHESRQITQVYGFYDECLRKYGNANVWKTFTDLFDYFPLTALVESEIFCLHGGLSPSIENLDSVRSLDRVQEVPHEGPMCDLLWSDPDDRCGWGISPRGAGYTFGQDISEQFNHTNNLKLVARAHQLVMEGYNWAHEQKVVTIFSAPNYCYRCGNMASILEVDDCNSHTFIQVLARARDAC

SEQ ID NO: 227145 - protein, 498 aa, Zea Mays
MFDTCDISSIPGHHGSNNVEDNLSEALEHRNLLPRRELIFDWSIDHVGGGRRHDNPDVGVGLGNGVGRGGGVSRGRGTADIGRGTTGLQRGVGRGTAGGLARGTTRGAACGIGRNSAYLKLSTGAPTAAEPVMADRRSNGGSPPSWSFASQSSHYHLAAMRGSYAPQSLWRPSPMPVRGAALSSTPHVVASAPAEKNFAADFLLGGVSSAVSKTVAAPIERVKMLLQNQDELIRTGRLSEPYRGIGDCFGRTVRDEGFLSLWRGNNTNVIRYFPTQALNFAFKDYFKGLFNFNKDRDGYWRWFAGNIASGSAAGATSLLFVYSLDYARTRLTSDYRAAAKGGERQFTGLVDVYRKTLRSDGVVGLYRGFNVSVAGIVVYRGLYFGMYDSLKPVLLTEKLQDNFFASLALGWMITNGASLASYPLDTIRRRMMMTSGEAVKYKSSMDAFAQIVRNEGPKSLFKGAGANVLRAIAGAGALAGYDQLQLIFFGKKYGSGGA

SEQ ID NO: 227146 - protein, 598 aa, Zea Mays
MKAYYKQTLSFACALLIVLTTQILGYGWAGLLRRYLVDPAEMWWPSNLAQVSLFRALHEKEEEGGKSRGPSRMRFFLIVFFASFAYYALPGYLLPILTFFSWACWAWPHSITAQQVGSGYHGLGVGAFTLDWAGISAYHGSPLVAPWASIANTAVGFVMFIYVIVPLCYWQFNTFDARRFPIFSNQLFTASGQKYDTTKVLTKDFDLNVAAYDSYGKLYLSPLFAISIGSGFLRFTATIVHVLLFHGSDMWKQSKSAMNAVKLDVHAKLMQRYRQVPQWWFLMLLLGSVVVSLLMSFVWKEEMQLPWWGMLFAFALAFVVTLPIGVIQATTNQQPGYDIIAQFMIGYALPGKPIANLLFKIYGRISTVHALSFLADLKLGHYMKIPPRCMYTAQLVGTVVAGVVNLAVAWWMLDNIENICDVEALHPDSPWTCPKYRVTFDASVIWGLIGPGRLFGQHGLYRNLVWLFLVGAVLPVPVWLLSRAFPEKKWIALINVPVISYGFAGMPPATPTNIATWLVTGTIFNYFVFRYRKGWWQKYNYVLSAALDAGTAFMGVLIFFALQNAHHELKWWGTEVDHCPLASCPTAPGIAVKGCPVF

SEQ ID NO: 227147 - protein, 759 aa, Zea Mays
MASRRASNGRSPLVRKQSQITAFFSSPTPSPSPSGPSPGASKPSPSPLNPSARTRSPLAAVSPSSPKLPQPQQKQKEVKKVKEEHDAALVPAPAAAEVVGRCLRVYWPLDDAWYKGKVEAYDAASRRHRVKYDDGDEEEVDLRKEKFEWAAVVEESTLLPARKLRRLRRMSDISVAKSPAEAEDGAGDSTEDEDWKRDTVVEDASEEVELDEEDEEEVVAVRSRKRNPKNSLMSGSTPSTLGSGLTSESEPRISKRRKNVDVASLDFAKRFTFEAVNTNRKVDPEVPMSCGQKGQTTGNDYTAPTGDAAERFGQRDAEKFKFLGEGRKDAKGRRPGNPGFDPRTLLLPPQFLKNLTGGQRQWWEFKSQHMDKVLFFKMGKFYELFEMDAHVGAKDLDLQYMKPHCGFPEKNLSVNLEKLAEKGYRVLVVEQTETPDQLELRRKEMGIKDKVVRREICAVVTKGTLIEGEHLLANPDPSYLLSVTESYQRSPNKSQDTCTIGVSIVDVSTSKFIVGQFQDDPERHGLCSILSEMRPVEIIKPSKMLSPETEKALNNNTRKPLINELVPSTEFWDAEKTIDEIKQYYSSANKQKKADDIQDCVDCLPNLLRELIGAGDKTYALSALGGSLFYLRQTLLDEKILPCAEFEPLACSGFINNIRKHMILDTAALENLELLENTRTGGLSGTLYAQLNHCVTGFGKRLLKRWIAKPLYDRREILRRQSAVATFKGVGQDCAAQFRKDLSRLPDMERLLARLFLKL

SEQ ID NO: 227148 - protein, 172 aa, Zea Mays
MERSKTDEKGCASTLKAFIDYISLRETENFRSRKEENKNSITLTTIHQSKGLEWDVVFIVQANDSEIPLLHEYNGSVKEAGSTLEEERRLLYVAMTRARKKLYILHVTIDSNRQLLQPSRFLREIPDHLLEVQVMFLLMTLKWIHQSESQLWDQTKLHLIQNRLRHALLMIS

SEQ ID NO: 227149 - protein, 194 aa, Zea Mays
MSAAAVALEEPAVQMVMVSVASPRSPAVRSEEDLGPAWLRPLLGTSFFVPCRLHPELSKNECNLFCLGCCTGDALCAYCLPAHRDHHVVQIRRSSYHNVIRVSEVGKLIDISHVQTYVINSAKIVFLNGRPQARPGKGVTNTCQICCRSLPDSFPLLLPRMQGSSSVYSSISSSSSSCFFVPLSLSLFLSLREL

SEQ ID NO: 227150 - protein, 482 aa, Zea Mays
MGLVQARGMVDRFRMRAKGGDGGNGCVSLRRSRSNRHGMPDGGNGGKGGDVILECSRSIWDFSGLQHHMRGGRGGNGVSKNQIGTRGTVIHLVEGEQPSLTVNKPTRALDPWDIPSAEEHSSDLYQIANIVTEGFDGGLPHQHIAPKHNTDGNDTVKGSNSNSDNPKYFHTCSKAQFSNTNRDVRIYSCQEGTDEKDQTESGDEEFWEDEDEFDMDEEEEEDEREEQDVQYCIAEMTKPGQQLIIARGGKGGLGNAFIMKEMRPSKANRQEKIAHLSTGQPGTQSLLILELKSIADVGLVGLPNAGKSTLLSALSRAHPEIADYEFTTLRPNIGSLIYEDYFSVKVADIPGLIKGAHENRGLGHAFLRHIERTKVIAYVLDLAATLNGRKGVPPWEQLHDLVAELEHYQEGMTRRPSLIVANKIDEEGAEEMCQELKRRVQGVPIFPVCAILQEGVPDLRVGLRNLMDDSDPQGKNFEKNDC

SEQ ID NO: 227151 - protein, 126 aa, Zea Mays
MQAQKVRGTLLIPCRTAMRGSFPLNGTYFQVNEVFADHCSSQNPIDVPRSWIWDLPRRTVYFGTSVPTIFRGLTTEEIQRCFWRGFVCVRGFDRTVRAPRPLYARLHFPVSKVVRGKKPGAARAEE

SEQ ID NO: 227152 - protein, 977 aa, Zea Mays
MELWFPSFAAQNIPLPGSTVNQLGESNTLRNGVHQIQPWEITYRLHDSRDNFSLPGNTQFSNGTVNPSSENYIQSNAIHEHQCLENVVAKVPVLSETQNTSTQEGHNHCTAATTDEHIRTTSDEVVRSLTRRASQPTTNGNYNIKSSRVTAEANCTEKPRKRGRPRKVVNPNGEPKERGTKGKQNVGHAELISPKGSCADFLKTNGITYASESSTGITPRMSTVELKSSDQDKEIHGGAMPQATAASVDPLDGIIEKIKLLTINGPDKGVSEVPKNALVPYEGEFSALIAFEGKAKKSRPRAKVNIDPVTTMMWNLLMGPDMGDDAEGLDKDKEKWLDEERRVFRGRVDSFIARMHLVQGDRRFSRWKGSVVDSVVGVFLTQNVSDHLSSSAFMAVAAKFPVKIEVPKKPVAEMSHTPEQKDSCSGLFGDSIKLQGNIYIEEISDIKSLITTEDNEESNNNELIGNSAGNGVNCATGGCHVSYSKSLTGSHGNGLSGSVFPTTGFSGVVETEDGSLEDVISSQNSAVSSQNSPDYVVRRTDPIGSSSLQNFTEEGCIMRNMSNGTGISTDYTLFLPIQDPKGMLGLSEYCGLNPLPVSGVNKDMLLDLNRSYQPLHTYMPYDQNSESDFTGVSCLNHMGKSFHTGPDKVNLSSVTQSEASLYPIDPLEQGDFSPLIKQNFQPLHSSDEVPFFKEHSSCNDFLRNKTEAHFLEPLVCSNPQEVYTTSTDQMGAEQSQSGCGQKYNDARVQTASHERHQSSTLCDNQNSCSVVLQGVASDSTQKFVDTQKGPSKARQNGSKAKVRGRPKKKTDDWDSLRKKVLSNGGDKQRSHDARDTVDWEAVRQAEVREISETIRERGMNNMLAERIKEFLNRLVTDHGSIDLEWLRDVQPDKAKDFLLSIRGLGLKSVECVRLLTLHHMAFPVDTNVGRICVRLGWVPLQPLPESLQLHLLEMYPMLEHIQKYLWPRLCKLDQRTL

SEQ ID NO: 227153 - protein, 877 aa, Zea Mays
MLQRAASNAYSWWWASHIRTTQSKWLEITVVEMEDRVKAMLNLIGADGDSFSKKAELYFKSRPELINHVEEMFRSYQALADRYDRISSELHKANHTIATVFPDQVQFSMEEGDSEGFSKAIGGIDLSNFKFPALEGLSVGSGSQSANRGTSPVPKRGAQAHRKVTPNMTKEKAQEEIDKLQKQILALQTEKEFLKTSYDSALGKYLDIEKQVAQLQDEVCNLQDAFSTGVAIEDNEARALMAAQAIMSCEDTLVNLQDQKNKLTEEAEVELRRANEAIEKLKTFKNECGLPHVQMDGHDHHEIELVHALPFEDSDDSALNGSRLDLQEICQRVKEIIESYPELSVAELADKVDRLVEKVISLELATTSQNAQIDRMKTEIDGLHERLHALEQDKVALVVDSSNLADGLRKVEEMLQEVQQIWKSVQNGFENICKQMTEAAHELTEFVETLHAPEQESSDFVDSSRDSKHDTSLEDYSGLTSLSVQNEPSKSLHDTTNETDKHEETLEDQAQKELVPKESEVEGKILLEDYASVLQSYKDTEQKLSEIEKINKDYHLEAMSELKELKSANATKDEEIHSLRRMLRSLRKKMSASIIESIEKAEETSKISSSPTTEDIEIAKSEETSKISATPSTEDKEIAEIEEYIKQWQINDSLASSVAEEKFRAEIDRVLGENLDFWLRFSTSYHQIRNFQICFDMLKTEMYRLTDEQEDGGNYGFAGSYQVAKLESAVLEKKFRDLNTDLQVWIEKNVLLKGEVENRFSSLCCIQEDISKITTLDKCDEIHFNPFQAAKFQGEVLNMKQENNKVAKELEAGLDHVRGLQVEVGRVLLKLRENLEVIQSCRSIMVPTAILLSDCIAFLCMASIEWQDASGVGSNFF

SEQ ID NO: 227154 - protein, 317 aa, Zea Mays
MSEHNVRAMADVVINHRIGTTQGSNGMYNRYDGIPVSWDEHAVTSCSGGKGNKSTGDNFDGVPNIDHTQPFVRKDIIEWLIWLRKSVGFQDFRFDFTKGYAAKFVKEYIEESKPLFAVGEYWDSCEYSPPDYRLNYNQDIHRQRIINWIDNTGGLCAAFDFTTKGILQEAVKGELWRLRDSEGKPPGVMGWWPSRSVTFIENHDTGSTQGHWPFPSDHIMEGYAYILTHPGIPTVFYDHFYDQGVPLHDEIAKLMQIRKCQDIHSRSSIKILEVGSDLYSAIIDDKLCMKIGDGSWCPSDPEWRLAVSGDRYAVWHK

SEQ ID NO: 227155 - protein, 267 aa, Zea Mays
MDRILREERNYILGMVKKIKAAGCNVLLIQKSILRDAVTDLSLHYLAKAKILVVKDVERDEMEFITKTLNCLPIANIEHFRTDKLGYADVVEEISVGEGKVVKITGIRDMGRTATVVVRGSNQLVIDEAERSLHDALCVIRCLVNKRFLIAGGGAPEIEMSMQLAAWAKELRGMESYCIKEFADALEVIPYTLAENAGLNPISIVTELRNRHARGEKNAGINVRKGQITNILEENVVQPLLVSTSAITLACECVRMILKIDDIVTVR

SEQ ID NO: 227156 - protein, 689 aa, Zea Mays
MVNVYDTTNDRRISMYGSNDTGSGMCQVSTLNFGDPSRKHEMHCRFIQSPPWPWMAITTSIGTLVIALLIGYIIYATAKRIARVEDDFQEMSVLKKRAEDADIAKSQFLATVSHEIRTPMNGVLGMLQMLMDTDLDTTQQDYVRTAQASGKALVSLINEVLDQAKIESGKLELEAVPFDLRTVCDDILSLFCGKAQEKGLELAVFVSDQVPQALIGDPGRIRQIITNLVGNSIKFTEKGHIYLTVHVVEEIMNCLEVETGTQSANTLSGYPVANRKRSWENFRVFSRELNSSEMPFAPIASDSISLIISVEDTGVGIPFDAQSRVFTPFMQVGPSIARIHGGTGIGLSISKCLVGLMRGEIGFASKPQVGSTFTFTAVLTRAHSSRNENKSSEFKGINALVVDHRPVRAKVTRYHLQRLGVQTELTTDLDQYISKINCGSQIAKLVLIDKETWLKESHSMPLLVTKLRNKDQPDSTKLFLLENPKSTAKSNSHIFREFNLNVIMKPLRASMLQVSLHRALGGIDKLHCRNGVLGNSTLGSLLHKKRILVVDDNIVNLKVAAGALKKYGAEVTCADSGKKAITQLKPPHSFDACFMDIQMPEMDGFEATKRIRVMERDLNEQIERGEAPPECAGLRQWRTPILAMTADVIQATHEQCLKSEMDGYVSKPFEGEQLYREVARFFQNQDQVQ

SEQ ID NO: 227157 - protein, 529 aa, Zea Mays
MTVTARGRSGGAGMEEKGDAPGLGFLGLDRMRVLLPPLRLPEKLSARALRTHLFTNYRMRKVRDSSSWLIPLWVLFWVLLASVICLWMSNQAVAKRRESLASMCDERARMLQDQFNVSVNHLQALAILVSTFHHSKTPSAIDQTTFARYAERTAFERPLTSGVAYGVRVTHAEREQFERQQGWSIKKMYSSKTKKQSQGPGNAEDAEVREPAEEYAPVIFAQDAYKHVISFDLLSGADDRDNVLRARESGKGVLTAPFKLLNNRLGVISTYAVYKYELPPNARPQERIQAAIGYLGGIFDIEALVDKLLHQLAGKQSIMVNVYDTTNDRRISMYGSNDTGSGMCQVSTLNFGDPSRKHEMHCRFIQSPPWPWMAITTSIGTLVIALLIGYIIYATAKRIARVEDDFQEMSVLKKRAEDADIAKSQFLATVSHEIRTPMNGVLGMLQMLMDTDLDTTQQDYVRTAQASGKALVSLINEVLDQAKIESGKLELEAVPFDLRTVCDDILSLFCGKAQEKGLECLFLTKFHKH

SEQ ID NO: 227158 - protein, 729 aa, Zea Mays
MDPDDEALKVARAPPQQRRGISYSQPLSRDAASARRAAPRNHSLDDEHILPTSHSINYPLHHDPSGMVPMGYHPPLPPHQRHPSASYSSNTRRSAGGVSEDSMTLERSMSEYGGGNGSLPEFVGAGGGKGIFRVPLRAAMHPGRPPPLEVRPHPLRETQAGSFLRSLAAEPHRRQLWAGTESGIRVWSLDEVFAEWGAGARRGDEESAPFREGMPAPPALCVVVDRANRLLWTGHKDGRIRSWRMDLDAAATAPAPPAAGAGDGGGSSHGGGSNNAPVFREALTWQAYGRTPVLSMVITSYGEIWSGSECGTIKAWPYDAIAKSLSLSPEERHMAALLVERAYIDLRNHCTVGNVCSLPASDVKYMLADHSRAKVWTVTSMTFALWDARTRELLKVFGMDGQFESAKLETPVMPEQPMEEEVNPNPKAKPSKKDKSQGSLNFFQKSRNALIGAADAVRRVATKGTFVEDNRRTGAVAQVTDGTIWSGCTNGAIIQWDGNGNRVQEFQHHTSSVQCIKALGERVWVGYASGMIQVMDAEGNIIAGWTGHSCPVIRMAIGCSYIYTLAHHGGIRGWPLTSPGPLDDIIRTELSNKELSYTRMEKINIMVGSWNVAQGKASAESLRSWLGSVASDVGLVVVGLQEVEMGAGFLAISAAKETVGLEGSANGQWWIDNIGKALDEGTSFHRVGSRQLAALLIAAWARKSLKPYVGDVEAAAVPCGLGRAIGNKD

SEQ ID NO: 227159 - protein, 186 aa, Zea Mays
MAAARARVLRELPARCWTKCLRRASPFPSTSPAASSLSSLSRASTSPFPLASRSRRLLHSLPSAAVRVRVRAQLQTRFLASEAARGGVGGRGPAADSEEEAQEWAVEWEDSEDDGYEPEIGDGGDGGGVALRGVGWGERALVAAEEVLAGHFGDDIAMFAFKVSPKGYVYVRLDKLTDVEDYFLRH

SEQ ID NO: 227160 - protein, 323 aa, Zea Mays
MQLATSSYIYFEVDNEDALLESIMGEDKIAHVIIGLDNTQVFADLDLVSASATEFAQEDDNGDEDDDGSDDDEESDFDEDFNDVEGVFSVDEDDEDDREEEEEEDDDDDDEDLPSWSNLETVNSCHPLYFARMIVETATKSSIDWLDRPPASLVVEGQLRPAFAEESTMVAKHISSDAPKKDTKESGATFFKVEVLSIELITAYGTEPKVKIEEYQKAKPDIIAHSAPNVISRLRAGGDKVTQALKSLCWRSKAIQVEEAAVIGVDCLGFDLRVCSGTQVQTLRFAFPTKATSEFSAEKQIHELLFPRNTHQEGQSPQARQKS

SEQ ID NO: 227161 - protein, 362 aa, Zea Mays
MGKHVWAAALMALAVIVGLGVPPGRIAEARTLEKDDLLGGGGDFGAGEGGGFGGGAGGGLGGGFGGGGGLGGGGGAGGGFGGGAGHGGGLGGGFGGGKGGGAGGGGGLGGGVGGGGGLGTGGGGGFGGGKGGGLGGGGGLGSGGGAGVGGGLGGGAGGGGDLGGGKGGGLGGGGGLGGGGGLGGGAGGGGGLGAGGGGGFGGGKGGGLGGGGGLGGGGGAGEGGGLGVGAGGGGGLGGGAGAGGGLGGGAGSGVGGGFGGGKGGGFGGGIGGGGGAGGGAGGGFGGGKGGGFGGGKGGGFGGGAGGGFGGGKGGGFGGGKGGGFGGGAGGGFGGGKGGGFGGGAGGGFGGGGGSGGGIGGGL

SEQ ID NO: 227162 - protein, 331 aa, Zea Mays
MGKHVWAAALMALAVIVGLGVPPGRIAEARTLEKDDLLGGGGDFGAGEGGGFGGGAGGGLGGGFGGGGGLGGGGGAGGGFGGGAGHGGGLGGGFGGGKGGGAGGGGGLGGGVGGGGGLGTGGGGGFGGGKGGGLGGGGGLGSGGGAGVGGGLGGGAGGAGEGGGLGVGAGGGGGLGGGAGGGFGGGAGGGVGGGGGLGDGAGGGAGGGAGAGGGLGGGAGSGVGGGFGGGKGGGFGGGIGGGGGAGGGAGGGFGGGKGGGFGGGKGGGFGGGAGGGFGGGKGGGFGGGKGGGFGGGAGGGFGGGKGGGFGGGAGGGFGGGGGSGGGIGGGL

SEQ ID NO: 227163 - protein, 254 aa, Zea Mays
MGKHVWAAALMALAVIVGLGVPPGRIAEARTLEKDDLLGGGGDFGAGEGGGFGGGAGGGLGGGFGGGGGLGGGGGAGGGFGGGAGHGGGLGGGFGGGKGGGAGGGGGLGGGVGGGFGGGKGGLGGGAGGAGGGGGAGGGAGAGGGLGGGAGSGVGGGFGGGKGGGFGGGIGGGGGAGGGAGGGFGGGKGGGFGGGKGGGFGGGAGGGFGGGKGGGFGGGAGGGFGGGKGGGFGGGAGGGFGGGGGSGGGIGGGL

SEQ ID NO: 227164 - protein, 439 aa, Zea Mays
MGAMGIVVRACAPPAPAAAAAPAPSGSRDAGQAQRRSKPSRTGRVRVLGGTGRVGGSTATALSKLCPKLGILVGGRNREKGESIAAKLGGQPEFVQVDTRNAGMLEEALQGQYHTSSHVVAVRGVAKPEAAATPARRSRPIPLASVAVWSLVATGAANAAELWDPLALHGSSGLVLADLGIGDWFGGLLFSAGQQANEAVQDQLSALSFSSLAVIFGAGLVTSLSPCTLSVLPLTLGYIGAFGSGKGRSEVVGNSIAFSLGLATTLAILGVAASFAGKAYGQVGQGLPVAASGLAIIMGLNLLEVLELQLPSFFSDFDPRAAAANLPSGVQAYLAGLTFALAASPCSTPVLATLLGYVATSRDPIIGGSLLLTYTTGYVAPLLIAASFAGALQWCIFTWWRCLYPTGQGVSSNINGHVDHGWTRIARHQSVWRANDIWM

SEQ ID NO: 227165 - protein, 420 aa, Zea Mays
MGAMGIVVRACAPPAPAAAAAPAPSGSRDAGQAQRRSKPSRTGRVRVLGGTGRVGGSTATALSKLCPKLGILVGGRNREKGESIAAKLGGQPEFVQVDTRNAGMLEEALQVVAVRGVAKPEAAATPARRSRPIPLASVAVWSLVATGAANAAELWDPLALHGSSGLVLADLGIGDWFGGLLFSAGQQANEAVQDQLSALSFSSLAVIFGAGLVTSLSPCTLSVLPLTLGYIGAFGSGKGRSEVVGNSIAFSLGLATTLAILGVAASFAGKAYGQVGQGLPVAASGLAIIMGLNLLEVLELQLPSFFSDFDPRAAAANLPSGVQAYLAGLTFALAASPCSTPVLATLLGYVATSRDPIIGGSLLLTYTTGYVAPLLIAASFAGALQSLLSFRRYSAWINPIRRRGFEWSLYTIFYIITLYL

SEQ ID NO: 227166 - protein, 888 aa, Zea Mays
MRVPCCSLCNVRYDEEERTPLLLHCGHGFCRACLSRMLAAAPGATLPCPRCRHLTAVGNSVSALRKNFPILSLLSTSPSSPSFLHSDSGSSSDGSEDEDDFFARPSRRPAPAPAAAPPGCSFFDLASHPDLKLARRIGSGPPGPAGQEVWAGTLSRGGGVKRCKHQVAVKRVPLAAGDGLEVVQEEVERLRRASTWCRNVCTFHGAVRVGGHLCFVMDRYVGSVQAEMRQNGGRLTLEQILRYGADIARGIAELHAAGIVCMSIKPSNILLDAHGHAFVSDYGLSAILKNLTSRRVPDDSSAGIDATLLSPNYTAPEAWGPLKKSLNMFWDSANGISPESDAWSFGCTLVEMCTGAVPWAGLSAEEICKSVVKEKKPPPQYSRVVGVGLPGELWKMIGECLQFRASRRPSFQDMLKTFLRHLLDIPRSPPASPEIDFANENLPNGMQPPTTSILEMVHDNPNALHHLVCEGDAAGVRDLLAKAASERNDSLIRSLLEAQNTDGLTALHLACRRGSAELVEAIVAYQENVDILDKDEDPPIVFALAAGSPRCVRALVGRSASINSRLREGLGPTLAHVCAHHGQPECMQELLMAGADPNAVDGEGESVLHIAVARRYTDCAIVILENGGCRSMGISNSQHKTPLHLCIETWNTAVVRRWVEVASLEDIAETIDVPSPVGTALCMAAALKKEHEKEFHKVQDYWTIMFFHLFQTLFVLIVKLLLLAEGRELVRILLAAGADSTAQDDPHCRTALHTAAMIDDVELVKIILEAGVDVNIRNAQNTTPLHVALNRGANSCVGLLLAAGANCNIQDDDGDNAFHIAADAAKMIRENLAWIAQMLLQPSPAVDVRNHRGWTLRDFLERLPREWIYEELMETLEDKGVHLSPTMT

SEQ ID NO: 227167 - protein, 846 aa, Zea Mays
MQDVLPILTELRHALDMQMELETFVEKENYFQAFQLLPEYLQILENYSGLSAVQEMGRGIEAWLVRTIQKLDTHLLGVCHIFDAENYLTVVDAYALMGDVSGMAEKMQSFFLQEVLSRTHYVLKEMLEEEVGNNTQKNRFTYSDLCVQIPEPKLRLCLLRTLEFLFSLMCSYYTIMSFSSGDKNIDSKGQDEAYKDGTSQNSSETLVNLGRGHSSAAVTQDGSAAEKIDRASSSEVSNPDTSTSETGSPFYQLRTDATKLVAQTFQRGRRNLWQLATSRLSVLLSSSAVCSTSTYQFLKNYEDLAIFILAGEAFCGFEASEFRQKLKTVCLNYMVSFHRQNVYALKMVLEKESWTIMSAEASQIISLAGLTGDGAALCSPTSRSPKLPINCYHGTTTANSGKEKLGFASWLVIENPFSFKLENGSAESPKSNMLVDSSASNNHGNGNNSSLDEENEDLLADFIDEDSQLPSRTPKAKMVKGNSLHWKDGDISSQTGSSLSLLRMMDKYARLMQKLEIVNVELFKGISQLFGIFYHYIYETFGNQDKSQSSKPLPDHQSSRLKAALSKITQDSDQWTKPNTVSYSPSSPLSKNSTFGQMDVMPTAPPSSMFTSYGLKERCAAAETLSLVARILNRSRAHLHSVLSKNNSSVVEEFFRTLVDSVPDLTEHIHRTSARMLLHIDGYPDKIANAKWEVKELGIEHNGYVDLLLGEFKHYKTRLDHGGISRELQHLLLEYGVESISEVLVEGLSRVKRCTDEGRALMSLDLQVLINGLQHIVASNVRPKLQTVDTFIKAYYLPETEYVHWARSHPEFSTSQVVGLVNLVATMKGWRRKTRLETVEKIEAGP

SEQ ID NO: 227168 - protein, 846 aa, Zea Mays; identical to SEQ ID NO: 227167

SEQ ID NO: 227169 - protein, 459 aa, Zea Mays
MLACSSSKPHRPVKALGAQFSPALPSAASLQPQQHVHFTCPFLPPFPLPPRHLRSPPPAAPAMAMTEGLVPITRTYLARYYDKYPLPPLPDATTDLAARLRALSADLAAVAPIAPDEELLEQEAAGIPAHKIDENLWKNREQMEEILFLINTSHRPVALQQKSTPEDAEIVCTLDDIEAKLKDMLKNLEQFQLKNADNVFNTVMTYMPQDFRGTLIRQQRERSERNKQAEVDALVSAGGSIHDRYALLWKQQMERPMEEQRERYGPALYTLTKLVLAIRLYLHVSLARYGQRKIEKDDAAVLQQAVVIYTKEFLKFTEFIGEVFVNAPFFISAEDAGAVDARKSDEYKETIIPAGKTHEVILSVEAVNSYIAWDFSLQQGALNMDIGFHVEYISPSGEKTLILPYRRYEADQGNFCTVSSGSYKLVWDNSYSSFFKKVLRYKVDAVPPVVEPALSATEL

SEQ ID NO: 227170 - protein, 487 aa, Zea Mays
MLACSSSKPHRPVKALGAQFSPALPSAASLQPQQHVHFTCPFLPPFPLPPRHLRSPPPAAPAMAMTEGLVPITRTYLARYYDKYPLPPLPDATTDLAARLRALSADLAAVAPIAPDEELLEQEAAGIPAHKIDENLWKNREQMEEILFLINTSHRPVALQQKSTPEDAEIVCTLDDIEAKLKDMLKNLEQFQLKNADNVFNTVMTYMPQDFRGTLIRQQRERSERNKQAEVDALVSAGGSIHDRYALLWKQQMERRVQLAQLGSATGVYKTLVRYLVGVPQVLLDFIRQINDDNGPMEEQRERYGPALYTLTKLVLAIRLYLHVSLARYGQRKIEKDDAAVLQQAVVIYTKEFLKFTEFIGEVFVNAPFFISAEDAGAVDARKSDEYKETIIPAGKTHEVILSVEAVNSYIAWDFSLQQGALNMDIGFHVEYISPSGEKTGNFCTVSSGSYKLVWDNSYSSFFKKVLRYKVDAVPPVVEPALSATEL

SEQ ID NO: 227171 - protein, 474 aa, Zea Mays
MLACSSSKPHRPVKALGAQFSPALPSAASLQPQQHVHFTCPFLPPFPLPPRHLRSPPPAAPAMAMTEGLVPITRTYLARYYDKYPLPPLPDATTDLAARLRALSADLAAVAPIAPDEELLEQEAAGIPAHKIDENLWKNREQMEEILFLINTSHRPVALQQKSTPEDAEIVCTLDDIEAKLKDMLKNLEQFQLKNADNVFNTVMTYMPQDFRGTLIRQQRERSERNKQAEVDALVSAGGSIHDRYALLWKQQMERRVQLAQLGSATGVYKTLVRYLVGVPQVLLDFIRQINDDNGPMEEQRERYGPALYTLTKLVLAIRLYLHVSLARYGQRKIEKDDAAVLQQAVVIYTKEFLKFTEFIGEVFVNAPFFISAEDAGAVDARKSDEYKETIIPAGKTHEVILSVEAVNSYIAWDFSLQQGALNMDIGFHVEYISPSGEKTLILPYRRYEADQVLRYKVDAVPPVVEPALSATEL

SEQ ID NO: 227172 - protein, 437 aa, Zea Mays
MAMTEGLVPITRTYLARYYDKYPLPPLPDATTDLAARLRALSADLAAVAPIAPDEELLEQEAAGIPAHKIDENLWKNREQMEEILFLINTSHRPVALQQKSTPEDAEIVCTLDDIEAKLKDMLKNLEQFQLKNADNVFNTVMTYMPQDFRGTLIRQQRERSERNKQAEVDALVSAGGSIHDRYALLWKQQMERRVQLAQLGSATGVYKTLVRYLVGVPQVLLDFIRQINDDNGPMEEQRERYGPALYTLTKLVLAIRLYLHVSLARYGQRKIEKDDAAVLQQAVVIYTKEFLKFTEFIGEVFVNAPFFISAEDAGAVDASDEYKETIIPAGKTHEVILSVEAVNSYIAWDFSLQQGALNMVLDIGFHVEYISPSGEKTLILPYRRYEADQGNFCTVSSGSYKLVWDNSYSSFFKKVLRYKVDAVPPVVEPALSATEL

SEQ ID NO: 227173 - protein, 287 aa, Zea Mays
MSESDGDGAMEKVLGMDWSRKPGDPVDPAVDAEWIAGIARLGLDTNFVVVHGAGSFGHFQASRSGVHKGGLHSTLVKAGFVATRISVTSLNQEIVRALAREGIPSVGMSPFACGWSTQQRKLASANASQIFQSLHAGFVPVLHGDAVLDELLDCTILSGDVIIRHLAQLLSPKYVVFLTDVHGVYDRPPTDSNAVLLREIEVDDIGGWSIVKPALLQGNTKGVEISVAAHDTTGGMETKILEAAVIARLGIDVYITKAGTEHSLRALKGDVSTDSEDWLGTIIRSSK

SEQ ID NO: 227174 - protein, 154 aa, Zea Mays
MSPFACGWSTQQRKLASANASQIFQSLHAGFVPVSCCSKGFEPLFLQNFIFIKNRAWCSGSLSTCCLEILEKLSKGKDVEKFSSPYPFFCGSFWHWVRTPEVVGMSGIVTHPIFDSIWCYWNMYHIVIFLCMHYFGTRDSAFLYCTLNAKTSPI

SEQ ID NO: 227175 - protein, 257 aa, Zea Mays
MHGMERNTGTLTRRDSKVQTLHLHLKSYTGPRWFSPSIIKFTQHNHFAPLALTTKLSRLLPLPAGVACGGTRLKRRGRAARVEGARGGRRAWGARGRCGGDALAARAHGERGRRFSSVSEPKQRFRYSHSSSVCLSFVLALRFWNQTSTCLGRSLSLTAKASFCFGVRVWLRRKLSSRRRDCSLDSRSFLARCGPPAPPRSSSSSSTLPIGNSSSSPPLAGWFMSRSLMLFPFPLPLLLLHPNPSAAAKQQPSVVHI

SEQ ID NO: 227176 - protein, 532 aa, Zea Mays
MLTPQQQQQLMLHAQQNMSSPTSSDVDNRRLRMMLNRNAVLGRDGQTNSGSDIIPNIGSPSQSGGDIDMLIKKKLAQQQQLLQQQSNSQQLPQQHQLQQPAVSSQQSQSSNQHLQQEKPGIGSMPADGGIPNSFGGAEQTAKKRKKPGSSSGRANSSGTANTAGPSPSSAPSTPSTHTPGDVMSVPQLQQNGGSAKPMVMFGSDGTGSLTSPANPLDDMDPRDNLGRCMDASKGFGFSEVAKARASTAKVVCCHFSADGKLLATGGHDKKVTLWCTDSLNPKSYLEEHSFLITDVRFSPSMSRLATSSFDKTVRVWDADNTDYSLRTFTGHSATVMSLDFHPNKEDMICSCDSDGEVRSWSINNGSCLTCVKVFKGGATQMRFQPRKGKYLAAASDKAIYILDGETQHACRSPLQGHNKNIQSLCWDSAGEYLASVSEDSVRIWSFSSGREGEFVHELNRSGNQFHSCVFHPTYQSLLVIGCYESLELWDIREKNTMTFNNAHDGLVAALASSSATGKVASVSHDRTLKLWK

SEQ ID NO: 227177 - protein, 215 aa, Zea Mays
MMHWSRPVDRRSHFPVLRAVTPPIPDQSPNYFPLRIPMPRTVAVVGAGAAGLVAARQLLREGLDVAVFEKSGRAGGTWAYDPRADADPLSRDPGSPSAVHGSLYASLRTNLTRDLMGFSDFPMAGWVFAGDARAFPGHQEVLAFLDAFAEECGVAARVRLRSEVLRVRERWAVSWRREDGEVAEEVFDAVVVCNGHCTVPRVPGIRDSQPQLSHP

SEQ ID NO: 227178 - protein, 105 aa, Zea Mays
MPLGDGAEATDFVLPDELLAALPQDPYEQLDLARHITALAVSGRVSGLEREAGRLRAEGAGKDRENAELRERVNEIIGRSVLAHGPYGKLEKHLKTQKLLMLTIQ

SEQ ID NO: 227179 - protein, 1266 aa, Zea Mays
MSWGLAWKRSSEIFHLTLNYGDYDDNDDRQPSSPPPPASSSPPASASSTPVYSSSPIATRNGDLGFRIELDWSAGDDEDQVALRLQSQLMVALPPPHDAVSVDLTPRDHGEEEGVRIEMRVVRRREALRSVRVSRAPGSALGSGDGAGVLARLIRSNLAPAPAVDGPTAASGVPVLADHWRPITMVSLCNCGMSMLPVELTRLQFLEKLYLDNNKLSVLPPEVGALKNMKVLSFNNNMLVSVPAVELRQCVMLEELSLEHNKLVRPLLDFRSMPKLRILRLFGNPLEFLPEILPLHNLRHVTLANIRIEAVESLKSVTVQIEVEQACLAISSLASDISSAMQLIKCDIMKPIEAVLKSSDEEELVSVLQVVVTLTFVSDHVAQKVLTKDVLKSLKALCAHKNSEVQRLSLFAIGNLAFCLETRRILMHSESMCDLLIRLTISQECRVSKAAARALAILGENENLRRAIRGRPVAKKGLRILSMDGGGMKGLATVQMLKQIEQGTGKRIHEMFDLICGTSTGGMLAMALGIKQMTLDQCEEIYTKLGKLVFTEPIPKDEAATWKEKIDQLFKSSSQSFRVVVHGSKHSADQFERLLKEMCENEDGDLLIESAVKGIPKVFAVSTLVSVIPAQPYIFRNYQYPPGTLEVSPGMAESPSIGAIGTAVSGAPVGIKRGAFMGSCKHRVWEAIRASSAAPYYLDDFSVDANRWQDGAIVANNPTIFAIREAQLLWPDARIDCLVSIGCGSVPTKSRRGGWRYLDTGQVLIESACSVERVEETLDTLIPMLPEMQYFRFNPVDERCGMELDETDPTIWLKLEAATDEYIQKNFLSVKNLCELLVPRYQEEEKPSDIYKSLSFSRLTSLNQGFSESNPILGWRRVVLLVEASFSPDFGKKINHARSLESFCSQNGIRLALMNSTSGFGKPATALPTPITSPLFTGSFPSSPLLYSPEGTQRISRIDLVPPLSLDGHPTTKSSPPTSPLKSRQPSAHVRSLYDKLQNMPQVGVIHLALQNDSTGSVLSWQNDVFVVAEPGELADRFLQSVKTILSTLLRGCNRKGAYSLSKISCLSELVAEWPSFEIGGIHHRYIGRQTQVMEDNQEIGAYMFRRTVPAVHMAPEDVRWMVGAWRERIIICSGKYGLAHGLVKAFMDCGAKAVISSSIEPPDSKTIVYHGMDVNRSLENGKFVIRDEEADESEPEPVSPISDWEDSDVEKGGNHDVDDEEYLAQFMCLMYDKLFREGVTVDTALQQALRSHPKLKYSCHLPNVL

SEQ ID NO: 227180 - protein, 160 aa, Zea Mays
MSLAVQNVKLIRDKHTGQLQGYGFIEFISRAAAERVLQTYNGTMMPNVELPFRLNWASAGEKRDDTPDYTIFVGDLAADVTDYVLQETFRAHYPSVKGAKVVTDKLTMRTKGYGFVKFGDPNEQARAMTEMNGMLCSSRPMRIGPAANKKATVVQEKGGF

SEQ ID NO: 227181 - protein, 1408 aa, Zea Mays
MRVQLQQQGNKVLPLLFVPRSGDFCFNRTSPDTDGQQHEGTGCVSRGVISVIQRNAGLTGVGKVQGVHQEFAFLMAVGRGCNKGAESRTTFCKAHGGGRRCQELGCTKSVAGKTEFCIAHGGGRWCGIKECSSAARGKSGFCLKHGEGKRWRIEGCTRGAEGHSGLCISHGGGRRCQHPNCELQKDSALPSNSSDSEPEAMELDDNGAGKSHSIEGNRDSPIDTDEGQPSMDVDIKGKSSLNDDVNGKSSSEPFSNPPINMSVESLEKFCKEASRSFFDEVGLISHQINSYNEFVSHGLQELFDSLGEVIVEPGYDPSKKGSGSWKHAIIKFGRVKLEKPVFWTGKDEVSVDFKPWHARLQNMTYASRLRVEVTIQVYSLEKSDKSKTGNDGFVQKRNFMNETHWIFIGLLPVMVKSNLCLLHSLKESECLFDAGGYFLVKGMEKVFIAQELRCLRRLWISDRPCWTISFMSEMKRRRIYIKLVESTRSEDFSGSKIISISFLYATMPVWLLFFALGISSDKEAFDVIDMQDCDASVINTISATIKESDELCGGFRKSDKARQYVDELVKSSKFPPVESFDDYIAKFLFPGISGNRNKALFLGYMVKCLLMAFTGKRKCDNKDDFRNKRLDLPGELLGRELRAHLRQAERRMVKAIQRDLNSDRELQDLERYIDASIVTNGLNRAFSTGSWCHPYKRAERCSGIVATLRRTNPLQMMSDLRKTRQRVAYAGKAGDARYPNPSYWGKLCFMSTPDGENCGLVKNLAVTSIVSSKVVQPLIESFISCGMNKLNDIPTEHIQRMDKIFLNGNWLGSCSDSASFVFRLRCMRRSSLIDPQVEIKRDKHYKEVRLFSDAGRILRPLLVVENLNKIRKPKGRSFSFQELMQQEIIEFIGVEEEEDIQCAWGIRHLFESEGAISSYTHCELDPSFILGLSCGIIPFANHNFARRVLYQSEKHSQQAIGYSTSNPRIRVDTLSHQLYYPQRPLFKTVIADCLGRSDCTTFGRKDDFTRPEYFNGQNAIVAVNVHQGFNQEDSLVMNRASLERGMFRTEHLRSYKADVENKDGTKRLKLKEKIDFGKTESKRGRVDNLDDDGLPYIGASLQTNDIVIGKVSESGEDHSIKLKHTEKGMVQKVLLSANDEGKNFAVVTLRQVRTPCLGDKFSSMHGQKGVVGFLESQENFPFTHDGIVPDIVINPHAFPTRQTPGQLLEAALGKGIACKGTMRYATPFTTASVDVIAEQLHKAGYSRWGAENVLNGRTGERMKSLVFMGPTFYQRLIHMSEDKVKYRNTGPVHPLTRQPVADRKRFGGVKFGEMERDCLLAHGSAANLHERLFMLSDFSQMHICQTCERVANVVMRSVPGGKKIRGPYCGFCKSSENIVRINVPYGAKLLYQELFSMGICLKFETEVC

SEQ ID NO: 227182 - protein, 403 aa, Zea Mays
MGRHSNYKTSCLLRSKASPVSTLPLLPRRAPSKVITTEELSNPYMREDLHISVQRGTGGNWKLEFRPRRPHRPCNEPGFGGALARMVMPISSGGDHHGAEPLLPEKQRGGGAGADDAGDDFHGASFSGAVFNLSTTIVGAGIMALPATMKVLGLVPGLALIALSALLTDASIELLVRFNRAAGVRTYGKTMGDAFGVLGRGLLQLCVVVNNVGILVVYMIIIGDVLSGTSSSGVHHHGVLEGWFGENRWNGRFAILAIATLGVFTPLACVKRVDSLRYTSALSVALAVVFVVITAGIAMFKLARGQILMPRLFADVHDWPSIWRLFTAAPVLLLRLPPLRRLDAGRRPRQLRHRPRHPLQLDLQRRRQGQLRAPPHARLPHRVPGAAAQHGRAPLPLGAAAAL

SEQ ID NO: 227183 - protein, 355 aa, Zea Mays
MLTRHRGLQCEPAVIRALKVTFCHCLCRRCGIVHDESRSRCLSQEHLASRTGTAGQRSTRLDALSGLQSCSPAAQPPASTLSLYLREPAGKEGSNTQGRMGVGECKSNDYGAAAYWDARYSSGSPASAAAGCGFFDWYQTYPALRPLLRARVPTSSRVLMLGCGNSLLSEDMVKDGYEDIVNIDISSVVIEQMREKHKEITQLTYMQMDIRDMGFFGDESFDCVLDKGTLDAMMCADDAPHGAFKMLAEVARLLMPHGIYLLITYGAPKERVPLLDQSGCSWSIALYIMPGYQLRMSKGAQHLIMEEVTLTEGGQLPPDYVLKDPDSHFIYVCEKLEEKGTNCRDTDPKESTNAN

SEQ ID NO: 227184 - protein, 112 aa, Zea Mays
MLAEVARLLMPHGIYLLITYGAPKERVPLLDQSGCSWSIALYIMPTAGYQLRMSKGAQHLIMEEVTLTEGGQLPPDYVLKDPDSHFIYVCEKLEEKGTNCRDTDPKESTNAN

SEQ ID NO: 227185 - protein, 426 aa, Zea Mays
MHTDCLPDLIKLACLLPVKEDNLRTIITKYLLEVSGLYGKDYLEHIMLPVFLVAAGDIDSGDFTYFPLSIQPKVRGLRPKTSTAEKLAIMCVFPLLLSGILGSPSSRQQLEEYLRKVLIQNTKDGSFSMHHTTEIINAVRFLCLFVEHHSVIFNILWEMVASSDTSLKINAAALLRALVPYTDVKIASTHILPALVTLGSDQNLKVKYASIDAFGAVAQHFKNDMVVDKIRIQMDAFLEDGSHEASVSVIRALAVAVPHSTDRLREYLLTKIFKMTCITPVGNDIERRRERANVLCEALRALDATDLPAMGIRDLLLPSIQNLLKDLDALDPAHKEALEIISRERSGGTLESISKVMGAHLGIASSVSSFFGENSLLTKKEGGEEHDPAGPTAPEQNLQAQPESTRFGRIMRSGFGDILRGQSKGQ

SEQ ID NO: 227186 - protein, 651 aa, Zea Mays
MDACVELAKSVGEMRTETELLPQCWEQINHQYEERRLLVAQSCGELAVYVRPEIRDSLILSIVQQLVEDAATVVREAATHNLALLLPMFPNLDKYYKVEELMFQLVCDPSGAVVEVALKELVPAVVRWGDKLDQISRVLLAHILASAQRCPPISGVEGTIDSHLRVLGEQERWNIGVLLRMLTELLPFIHQKAIQTCPFASADPTSSTPENFSASCLKSYATGDSEWSAFEWMHTDCLPDLIKLACLLPVKEDNLRTIITKYLLEVSGLYGKDYLEHIMLPVFLVAAGDIDSGDFTYFPLSIQPKVRGLRPKTSTAEKLAIMCVFPLLLSGILGSPSSRQQLEEYLRKVLIQNTKDGSFSMHHTTEIINAVRFLCVIFNILWEMVASSDTSLKINAAALLRALVPYTDVKIASTHILPALVTLGSDQNLKVKYASIDAFGAVAQHFKNDMVVDKIRIQMDAFLEDGSHEASVSVIRALAVAVPHSTDRLREYLLTKIFKMTCITPVGNDIERRRERANVLCEALRALDATDLPAMGIRDLLLPSIQNLLKDLDALDPAHKEALEIISRERSGGTLESISKVMGAHLGIASSVSSFFGENSLLTKKEGGEEHDPAGPTAPEQNLQAQPESTRFGRIMRSGFGDILRGQSKGQ

SEQ ID NO: 227187 - protein, 66 aa, Zea Mays
MTFCVRRLPKRTSQDLASPANATPGTTDRASSLLVRFARLHSWCSLRRNLDSLLSSPLVATRQSSE

SEQ ID NO: 227188 - protein, 913 aa, Zea Mays
MAWPWSPPPRQTARFVVVVVVAVVLLFAAAPWPRAAAQAGYHVVSVSGTGGQLSARLELTGAGQKAELGPDVRRLSLTASLETDSRLHVRITDADHRRWEVPQSVIPREAPRDDVPLEASTGASPPHSRVLSAATSDLAFTLHASPFRFTVSRRSSGDALFDTSAALVFKDRYLELTTALPPEGGASLYGLGEHTKRTFRLQRNDTFTMWNADIPAANADVNLYGSHPFYLDVRHAGAAHGVLLLNSNGMDVEYGGSYLTYKVIGGVLDLYFFAGPSPLDVVDQYTQLIGRPAPMPYWSFGFHQCRYGYKNLADLEGVVAGYAKARIPLEVMWTDIDYMDAFKDFTLDPVNFPAGPMRQFVDRLHRNGQKYVVIIDPGISVNETYGTYVRGMQQDVFLKRNGTNYLGKVWPGYVYFPDFLNPRAAEFWAREIALFRRTLPVDGLWIDMNEVSNFVDPAPLNALDDPPYRINNSGVHRPINNKTTPASAVHYGGVRDYDAHNLYGFLEARATHGALLADTGRRPFVLSRSTFVGSGRYTAHWTGDNAATWDDLRYSINTMLSFGLFGIPMVGADICGFGGNTTEELCSRWIQVQAFHALQDQHAMSTDMYELSFRCLLVKLGAFYPFARDHSAIGTVRRELYLWELVARSARKALGLRYRLLPYMYTLMYEAHTTGAPIARPLFFSYPKDEATYGVDRQFLLGRGVLVSPVLEPGATTVEAYFPAGRWFSLFDHEVVVASATGKHVTLPGPADTVNVHVAGGNILPLQLPELTTSRARQTAFHLLVALAEDGSASGELFLDGGDLPEMAGPRGEWSLVRFSCTQGRDGVKLMSHVVHDAYGPSRKLVIGKVMFLGLPSLAPPGEFAVYVNGVKMANSTGATLGYQRRGALGAAQVEGLSLVVVEEFELKVVTSS

SEQ ID NO: 227189 - protein, 925 aa, Zea Mays
MPLSGRPWGGGGGSGGGSSGRLASSGALLPAALGGARSGRRPRLRRFIVSPHDPRYVAWEHSLVALVAYSAWVAPFEFGFVPDPRGALAVADNAVNAAFAVDIALTFFVAYADGGTYLLQDDPRRIAWRYARSWLALDVASTVPTEVYRRVLPRQARSYNFFGMLRLWRLHRVGTLFAQLEKDRKFRYFWVRCTRLICVTLFAVHCAGCFYYLLADRYPDPGHTWLSSSMPDFKQQSVWKRYAASMYWSITTLTTVGYGDMHAVNTGEMVFTTFYMLFNLGLTAYLIGNMTNLVVHGTSRTRKYRDAIKAATSFAVRHQLPPRLQEQMVSHLSLKFRTDSEGLQQQETLDALPKAIRSGISHYLFFALVQGVYLFQGVSNDLIFQLVSEMNAEYFAPREDVILQNEAPSDFYILVTGSVELVELRNGSEQVAGVARAGDVVGEIGVLCYKPQLFTARTRSLCHLLRMERSAFLRIVQANVGDGTIIINNLIQYLKEKRDSGAIAGVAEEIEYLLARGQLELPVTLCYAASRGDDFLMHQLLKRGVDPNESDNYWHTALHVSASGGHEQCIKLLLEHGADPNASGACDWGHQPNLALIVIQCPDAQGRVPLWEALSRGHRGAAQLLADGGADLASGDAALYARAAVEAGDVALLEDVARHGGDVTVACCDDGGTALHRAVLQGDVGMARALLEHGADADREDGGGRTPRDLAGQLGHRDMHQLFGPPSQSQHREAVESPIRRQGSGTEDHGSSCRPAVAVAARPAVTRFKSAPAARVPVAVAQHDGAGSSPSPSSSRHSSPRRMVSFRNSLFGVLSSSQVNRHDGAAGGGGHSRHERHTHSRSRVRVTVSCPEQGVGARKLVFMPETMAQLVELAGSQFGFAPTRVVTTDGAQVDDARLVRDGDHLLVVTHQWQRVPDTKIVHTNQ

SEQ ID NO: 227190 - protein, 795 aa, Zea Mays
MAAVPEDLRCKRSDGKQWRCSAPSMPDKTVCEKHYVQAKKRSASSALRASLRRSSASSLAPVFPFSSSPSSAARLRAADEDPPMAVARPLYGRVAGEAVYVAEPVPAPARREVAYEGLPRGNAAGGRTAAGLVGRGPLWFPGGGSEGIRSCHQCRKAGGVIWCTSCDRRGYCARCISRWYSDIPMDEVRNVCPACRGICNCKVCLQGDNLIKARVQEISAVDKLRYLHCLLVYVLPVLKGIYSDQCFEIGVETRSSGPKTDVLRAKITSDEQMCCDFCKVPVFDYHRYCPRCSYDLCLDCCHDIRHSRANVARGEYTEGYVEDKGRDSFNRRARLEPSAESVNDKSLSWPIDINNIDIKSLFPTWRVNNDGSITCGPHEAGGCGSSKLVLRRIFKINWIAKLVKSSEEMVNGCKVHDLEDGCLSCSDGRRSEFTGQQNLGLSKCSNSDEIGRNCLYSPVLEDLKYEGIIHFRKHWKNAEPIIIREAFEPSLSSSWDPLSIWRGIQEIMDEEMDEDVIVKAVDCSNQSEVDIELKQFIKGYSDGSKGGDGPLVDAEIERVAPTQWGLLNLAAKLPPDALQPELGMKLLIAHGSHRELGKGDSMTNLMINMSDVVHMLMHATEVHYQCPKRVRVQSDVSEMIANGTSVHVKYPIYDQTVYLNDYHKKMLKDQYGIEPFTFHQHIGEAVFIPAGCPFQLKNLQSTVQLALNFLSPESLPESVRLSQEIRCLPNGHLAKLKMLEVKKISLYAASSAVREIQRITLDPKFNLDPSFEDQNLTRAVSENLARVNKRKVSCS

SEQ ID NO: 227191 - protein, 610 aa, Zea Mays
MGGQCCELEQCGNVGGSGDTLRERKEAGTSDYLAFCKRPNTQMLEKIYHVVKIRSAFPSANSSGRKVSKTMNGLQKASQLATRSLREASAISISQPPFFCSVVYLVVGGDMQFALALDTNSGPHQIRSCEGDGIDRLEKLSIGGRKQEKALRNRCFGGRVAATTQCILTSDACPETLHSQTQSSRKNYADANRVSAIILGGGTGSQLFPLTSTRATPAVPVGGCYRLIDIPMSNCFNSGINKIFVMSQFNSTSLNRHIHRTYLEGGINFADGSVQVLAATQMPEEPAGWFQGTADSIRKFIWVLEDYYSHKSIDNIVILSGDQLYRMNYMELVQKHVEDDADITISCAPVDESRASKNGLVKIDHTGRVLQFFEKPKGADLNSMRVETNFLSYAIDDAQKYPYLASMGIYVFKKDALLDLLKAVLDHSVQACIFTGYWEDVGTIKSFFDANLALTEQPSKFDFYDPKTPFFTAPRCLPPTQLDKCKMKDAFISDGCLLRECNIEHSVIGVCSRVSSGCELKDSVMMGADTYETEEEASKLLLAGKVPVGIGRNTKIRNCIIDMNARIGKNVVITNSKGIQEADHPEEGYYIRSGIVVILKNATINDGSVI

SEQ ID NO: 227192 - protein, 284 aa, Zea Mays
MYLVVSFISETRFLAMNMEDELEETEIEGFDAQTQTLFCQNAINDLLIQVTANSVRLVSCTSRELVDQWNAPAGFSVNVASANASQVLLATGGGHLVYLEIRDAKLVEVKHAQLEHEISCLDLNPIGEHLEYSSLAAVGMWTDISVRIFSLPDLVLIRKENLGGEIVPRSVLLCTLEGVSYLLCALGDGNLFSFLLNASTGELTDRKKVTLGTQPISLRTFSSKGTTHVFASSDRPTVIYSSNKKLLYSNVNLKEVNHMCPFNTAAFPDRAESLYLQLKMEVCN

SEQ ID NO: 227193 - protein, 455 aa, Zea Mays
MSWSGPELAKWSRDGQEAEQEPESVPRRKSWSAPELAQWSRAGKEKEQEEPESSEPQRKWVALVSVVVLPSNEDERAHEIIPGTDMLMLDLNDPPLPSYLVLHPRVAPNPRRTNEPLSAYILAADRSGCILLQVVEGNRPDFFLCNTHTRTVTILPPVSSYTQANDVGLIYLHLSMGLIADPQHSGHYMCLLRPFTPVPESPRCASSAPGRLEMAGHVAFDRVIKPLVRKRRCVRPSEGKLRFVEIRGLSYKVPVDESNPTVWMWTLVDPEVPNPWTFEYEVAFAEIWEDETYAAAGLQPGEVPDVALVDPNDHYVVYFFQGSKLFGLDLREKKVVGCEEWLIDRDRLEYQSSRPIVDAWELSPPPPSPPILSGDDDYSTDDQSELPCTEEKKRQVAESVESWLNQARLAWTRDADVDASNWRTWKMAPPQSDESSVDAGGQTEDEPEIQLPPSP

SEQ ID NO: 227194 - protein, 1541 aa, Zea Mays
MKSKHSHWRNYDDLNEYFWSVDCFRLGWPMRADADFFKTPKDAYLNLLNGENRSAGNTHWMGKVNFVEIRSFWHIFRSFDRMWIFLILSLQAMIIIAWNGGTPSDIFDAGVFKKVLSIFITAAILKLGQAILDLIFGWKARRNMSFAVKLRYILKLICAAAWVVILPVTYAYTWENPTGLARTIKSWLGDGQNQPSLYILAIVIYMAPNIVASMLFLFPFMRRFLESSNVKVITIIMWWSQPRLFVGRGMHEGAFSLFKYTMFWVLLLATKLTVSFYIEIKPLVQPTIDIMREPIRTFQWHEFFPHGTNNIGVVISLWAPIILVYFMDTQIWYALFSTLIGGIYGAYRRLGEIRTLGMLRSRFESLPEAFNERLIPSDANKSKGLRAAFSSRPKASGDERQKEKRAARFAQMWNVIITSFREEDLIDNREMDLLLVPYCKDRELDIFQWPPFLLASKIPIALDMAADSGGKDRDLTKRIKSDPYFSFAIRECYASFKNIINTLVFGQREKDVLAQIFAVVDQHIEDETLIKDLNMRNLPALSKKFVELLELLQKNKEEDLGQVVILFQDMLEVVTRDIMEEQDQLGTLLESAHGANSRKHEGITPLDQQDQLFAKAIKFPVDESIAWTEKIKRLHLLLTVKESAMDVPTNLDARRRISFFANSLFMDMPNAPKVRNMLAFSILTPYYKEDVLFSLQNLEEPNEDGVSILFYLQKIYPDEWKNFLERVGCKNEEGLREDEELEEKLRLWASYRGQTLTRTVRGMMYYRKALELQAFLDMAEDDDLMEGYRATEVMPEDSQLMTQCKAIADMKFTYVVSCQQYGIQKRSNEPCAHDILRLMTEYPSLRVAYIDEVEAPSQDRNKKIEKVYYSVLVKASVTKPDEPGQSLDQVIYKIKLPGNAILGEGKPENQNHAIIFTRGECLQTIDMNQEHYMEEALKMRNLLQEFEKKHGVRYPSILGVREHIFTGSVSSLAWFMSNQETSFVTIGQRVLANPLRVRFHYGHPDIFDRLFHITRGGVSKASKIINLSEDIFAGFNSTLREGNVTHHEYMQVGKGRDVGLNQISLFEAKIANGNGEQTLSRDIYRLGHRFDFFRMLSCYYTTIGFYFSTMITVWTVYVFLYGRLYLVLSGLDEALATGRRFVHNAPLQVALASESFVQLGFLMALPMMMEIGLERGFRTALSDFILMQLQLASVFFTFSLGTKTHYYGRTLLHGGAEYRATGRGFVVFHAKFADNYRLYSRSHFVKGIELMILLVVYEIFSQPYRGAVTYIFITVSMWFMVGTWLFAPFLFNPSGFEWQKIVDDWTDWHKWISNRGGIGVAPEKSWESWWEKEQEPLRYSGKRGTVVEILLALRFFIYQYGLVYHLNITKKITKDNQSVLVYCFSWVVIFVILLVMKTVSVGRRRFSAEFQLVFRLIKGLIFITFTAIVVILIAIPGMTVLDIFVCILAFMPTGWGLLLIAQAIRPVIHKTGLWGSIKALARGYEILMGLLLFTPIAFLAWFPFVSEFQTRMLFNQAFSRGLQISRILGGHKKDRGTRNKE

SEQ ID NO: 227195 - protein, 1703 aa, Zea Mays
MFGFQKDNVSNQREHLVLLLANVHIMKVPKVDQQPKLDDKALDAVMKKLFKNYKKWCKYLGRKSSLWLPTIQQEVQQRKLLYMGLYLLIWGEAANLRFMPECICYIYHHMAFELYGMLAGNVSPMTGENVKPAYGGDEEAFLIKVVTPIYKVIEKEAERSKTMKSKHSHWRNYDDLNEYFWSVDCFRLGWPMRADADFFKTPKDAYLNLLNGENRSAGNTHWMGKVNFVEIRSFWHIFRSFDRMWIFLILSLQAMIIIAWNGGTPSDIFDAGVFKKVLSIFITAAILKLGQAILDLIFGWKARRNMSFAVKLRYILKLICAAAWVVILPVTYAYTWENPTGLARTIKSWLGDGQNQPSLYILAIVIYMAPNIVASMLFLFPFMRRFLESSNVKVITIIMWWSQPRLFVGRGMHEGAFSLFKYTMFWVLLLATKLTVSFYIEIKPLVQPTIDIMREPIRTFQWHEFFPHGTNNIGVVISLWAPIILVYFMDTQIWYALFSTLIGGIYGAYRRLGEIRTLGMLRSRFESLPEAFNERLIPSDANKSKGLRAAFSSRPKASGDERQKEKRAARFAQMWNVIITSFREEDLIDNREMDLLLVPYCKDRELDIFQWPPFLLASKIPIALDMAADSGGKDRDLTKRIKSDPYFSFAIRECYASFKNIINTLVFGQREKDVLAQIFAVVDQHIEDETLIKDLNMRNLPALSKKFVELLELLQKNKEEDLGQVVILFQDMLEVVTRDIMEEQDQLGTLLESAHGANSRKHEGITPLDQQDQLFAKAIKFPVDESIAWTEKIKRLHLLLTVKESAMDVPTNLDARRRISFFANSLFMDMPNAPKVRNMLAFSILTPYYKEDVLFSLQNLEEPNEDGVSILFYLQKIYPDEWKNFLERVGCKNEEGLREDEELEEKLRLWASYRGQTLTRTVRGMMYYRKALELQAFLDMAEDDDLMEGYRATEVMPEDSQLMTQCKAIADMKFTYVVSCQQYGIQKRSNEPCAHDILRLMTEYPSLRVAYIDEVEAPSQDRNKKIEKVYYSVLVKASVTKPDEPGQSLDQVIYKIKLPGNAILGEGKPENQNHAIIFTRGECLQTIDMNQEHYMEEALKMRNLLQEFEKKHGVRYPSILGVREHIFTGSVSSLAWFMSNQETSFVTIGQRVLANPLRVRFHYGHPDIFDRLFHITRGGVSKASKIINLSEDIFAGFNSTLREGNVTHHEYMQVGKGRDVGLNQISLFEAKIANGNGEQTLSRDIYRLGHRFDFFRMLSCYYTTIGFYFSTMITVWTVYVFLYGRLYLVLSGLDEALATGRRFVHNAPLQVALASESFVQLGFLMALPMMMEIGLERGFRTALSDFILMQLQLASVFFTFSLGTKTHYYGRTLLHGGAEYRATGRGFVVFHAKFADNYRLYSRSHFVKGIELMILLVVYEIFSQPYRGAVTYIFITVSMWFMVGTWLFAPFLFNPSGFEWQKIVDDWTDWHKWISNRGGIGVAPEKSWESWWEKEQEPLRYSGKRGTVVEILLALRFFIYQYGLVYHLNITKKITKDNQSVLVYCFSWVVIFVILLVMKTVSVGRRRFSAEFQLVFRLIKGLIFITFTAIVVILIAIPGMTVLDIFVCILAFMPTGWGLLLIAQAIRPVIHKTGLWGSIKALARGYEILMGLLLFTPIAFLAWFPFVSEFQTRMLFNQAFSRGLQISRILGGHKKDRGTRNKE

SEQ ID NO: 227196 - protein, 55 aa, Zea Mays
MCCATPPDCEWKKRAGNVCVASFDGSCSGVCKSADRMMRHIHCGEGDGAVWNAAT

SEQ ID NO: 227197 - protein, 75 aa, Zea Mays
MQWWHSEAQRGRADLRLQGRPGHVRHVDIGTRGSRSSPEATDVAAPQRRSATACMARPVLVGDHCCTVGTCEQYH

SEQ ID NO: 227198 - protein, 837 aa, Zea Mays
MQLSNVDSPSCSNSITSQNQMGPQNMEAAESPISGQISEYEDTESDNCRASSRYHPLAEMQQLVDGVITENMLYPSASTVGSRQGYHGEMLPITDNLDNRSFSNHDIARMLDGANIGLSDVSSTLFDSVPFNEPFTNYSAGFTEPTLHSSFACLEANDLDDSSCLQTFTSEALYTNHLNQKEADALGFTGILASEVNRDRYNDGSIKHSLLKQSSLDLLTIEAPGLKKNDSFSRWMSKELEELDAYVVNPSLSQDQLFSILDVSPSCAYIGTNTKVSVTGTFLVNKKHVESHRWSCMFGDVEVPAEVLTDGTLRCYAPAHQSGRVPFYVTCSNRVACSEVREFEYRDSEAHYMETSRSQANGVNEMHLHIRLEKLLTLGPDDHQMLAINSLMLDGKWSNQESSVKEVVSTARVQSLKKLVKEKLHQWLICKVNDDGKGPNVLCKEGQGVIHLVAALGYDWAIRPIMIAGVNVNFRDAHGWTALHWAASLGRERTVSVLIANGAAAGALTDPTSEFPSGRSPADLASVNGHKGIAGFLAESALTSHLSALTIRESNDSTVEACGLPFAEDLTGIDSVHLAGEGPDAESLEGSLSAVRKSTQAAARIFQAFRVESFHRKKVVEYGDDTCGLSDECTLSLVSLKNVKPGQHDTHLHSAAVRIQNKFRGWKGRKEFMIIRQRIVKLQAHVRGHQVRKNYRKVVWSVGIVEKVILRWRRKRPGLRGFRPEKQLEGPSQIQPAKAEDEYDFLHDGRRQAEARLQRALARVHSMSQYPEAREQYHRLTTCVAEMKQSRMMQDEMLSQAAGGADDFMAGLEDLICIDDAPPRCLPFGEAEPFYIR

SEQ ID NO: 227199 - protein, 503 aa, Zea Mays
MARMLQLPLGAPRFSFISTFSAVCLKIPVPLKKDKKLRIIDNSNLKESGPKFGTMMGVFVPCLQNILGIIYYIRFTWIVGMSGVWQSLVLVSFCGACTFLTSISLSAIATNGAMKGGGPYYLIGRALGPEVGVSIGLCFFLGNAVAGSMYVLGAVETFLDAVPSAGLFQKSVTVVNNTLVNGTETAGTSTISTPSLHDLQVYGVIVTILLCFIVFGGVKIINKVAPAFLIPVLFSLLCIYLGVFIAPRHNAPKGITGLSITTLKDNWGENYQRTNNAGVPDPSGSIYWDFNALVGLFFPAVTGIMAGSNRSASLKDTQRSIPIGTLSATLSTTAMYLFSVLLFGALATREELLTDRLLTATVAWPAPAVIYIGIILSTLGAALQSLTGAPRLLAAIANDDILPVLNYFKVSEGSEPHAATLFTAFICICCVVIGNLDLITPTITMFFLLCYAGVNLSCFLLDLLDAPSWRPRWKFHHWSLSLVGALLCVGMVLNTLTILFCLS

SEQ ID NO: 227200 - protein, 206 aa, Zea Mays
MQSWYPTSVVGLSSSPATPTSSSSSPHQRASNNLQFSSRGQPSPAEAAEIIAHLKDKSIEELQRLLKEKEAYNAFFNTFDQVKTQNNVRGELRKETLQLARENLEKEQRILELGNQCTIIRTTQLAAAQDRLTDLERQKDDIMRSYSPAALLDKLQTSMAKLDEESEELQQKFLAKDIDFPHLVQKYKKLRTAYHKQALLHLAGQT

SEQ ID NO: 227201 - protein, 490 aa, Zea Mays
MREELFDSILSQDISFFDEETVGDLTSRLGSDCQQVSRVIGNDLNLISRNLLQGAGALIYLLVLSWPLGLCTMFVCATLSAIMLVHGRFQKRAAKFAQEFTANANNVAQEVITLVRTVRVYGTEKQEFKRYANWLDKLYDVSFRQTVAYGGWSLSLNYLYHSTQVIGVVIGGLAIMSGKLTAEQLTKFTLYAEWLILSTWWIGDNWSSLMQSVGASEKVFRLMDLLPSKQLSSEGLKLEKLKGQIQYADVSFSYPSRPTVPILGGLNLTLNPNEVVAIVGLSGSGKSTIINLLLRLYEPTNGQILIDGVPLTELDIRWFRERIGFVGQEPRLFRMDISSNIKYGCPRDVSHEEVIWAAKQAYAHDFIMALPDGYNTIVDDALLSGGQKQRVAIARALLRDPSILLLDEATSALDAESEHYVKSVITKVSRDSKAKRTVVIIAHRLSTIQTADRIIVMENGNIVEDGKHIDLIEKGGLYSRLARRQNDDLK

SEQ ID NO: 227202 - protein, 358 aa, Zea Mays
MPPPAAMLLLTAASGPPTLSLTLAARRAPLRAPSRRRLRALRPARIRAAAAIGGEFGGLGRRRVVVGEFIERLRNVLPGGSWWRLEDGDEAGDGAGRAEGSGTTAVSALRRMWALVAGDRLVIYVGFASLVGAALSEIAIPHLLAASIFSAQNGGAVFYRNAKLLVVLCLVSGVFSGIRSCCFGVANMILVKRMREELFDSILSQDISFFDEETVGDLTSRLGSDCQQVSRVIGNDLNLISRNLLQGAGALIYLLVLSWPLGLCTMFVCATLSAIMLVHGRFQKRAAKFAQEFTANANNVAQEVITLVRTVRVYGTEKQEFKSGLWRLEPELELSIPFYSGHWSGDWRPSNHVWEVNC

SEQ ID NO: 227203 - protein, 311 aa, Zea Mays
MMATLGRKKRQAATTFIVLCILSSFYICKAQFTPADSYLVDCGSSKSTMVGQRTFTADGASPVKVSTSQDILAGTSANGVASFDNSALYQTARIFTGPSSYTFPIQKQGRHFVRFYFFPFTYQSYDLSLAKFTVSTQDVLLLSDFQQPDKTAPLFKEYSLNITRDTLVISFKPSNGIAFVNAIEVVSVPDDLITDDAQMVNPVQQYSGLSTQPLETVYRVNMGGPKVTPDNDTLSRTWVTDLKYLLNPSVTKQVNYGKRVNYKKGGGGATQLSAPDIVYGTATELAATNTSNALFNMTWQFDVDAGFSYLG

SEQ ID NO: 227204 - protein, 362 aa, Zea Mays
MQIVSKLGSSFSVVPFVIVVASCTILAMVASLPVAQLLFFHILLIKKGISTYDYIIALREQEQDDLSGQQSPQMSRVSSYTGLSSASSFGPLRRGSWCTPPRLFLEDQFDVIPSEAASSHNSATKRKEDQGKRKKGSGAVKISPWALARLNAEEVSRVAAEARNKSKVLVPIRKDDYSRGHETDSSYGGTSSGRIDLGPDSKRRTNRRGRQPSDLFLKPVAKISTDAIDSASSDMSNLAPLQLEARSAFHPSRAASSVNVGGSSPDSSLDSPDLHLYRVSAVSSSGAEDLQLTALTAPGSTSHQGIQLSRSTSDGYEASGGEDSDRIPSQIVHRSSNWASIILNSDQSASSSGILVPKNRLS

SEQ ID NO: 227205 - protein, 1192 aa, Zea Mays
MALFRKFFLKKTPDRLLEISDRVYVFDCCFSTDSMGEDEYRDYLSGIVAQLQEFFPDASFMVSNFWSGDKRSRISDILSEYDMTVMDYPQQYEGCPLLQLEMIHHFLKSCENWLSVEGQHNMLLMHCERGGWPVLAFMLAGLLLYRKTYTGEQKTLEMVYKQARRDFIQQFFPLNPQPSHLRYLHYITRQGGGSEWPPISRPLILDSVVLHVVPRFDVDGGCRPYLRVHGQDSSPGNKSAKVLYEMPKTSKHLPHYGQAEVPIKLSVFCRVYGDVVLEFIHIGDNIEHKETMFRIMFNTAFVQSNILALNRDDIDVAWNVNNQFPRDFRAEVHFSDPDSFKPAATVEEIADDGDETDVASVDTGEEFYEAEEDWHDARKDQETRSTDGGISLDDVADGGVATEERSSLEKHQFNEGVKIGVSQNLGSMNEKGASAPTPTFDNQEGLQQPREVLANGKLSSTNGQENSDVHDIQVVATSVDSEGHKFGSTCQEDMKGVIAQTLVTTVDPSCSDEIECQANEQTKISEYPDLDYTAFGSPRSLSRTNGDTHLRTTKNEGLQNGDIKIITENTISMDNDLVIYEEKTIVVNGNTVQEVKNIVNEKSIAAKIDKPIIESRNSLNNNNGKIQIAKPSDTSNGKLDGCRLESCLEEALPTKKTTVHDRIVVLPATDVGTEIKTKQEGLGDKQDFAPPPPPPPLASRAGPPPPPPPPGARSGPPPPPPPPGARPGAPPPPPPPGSRTGAPPPPPPPGAPPPPPPPGGGGRGPPPPPAPRGHLGGPPPPPPPSGRAPGVPPPPRAPGVPPPPGNNPSLGRGRGAVRPLGSAYGAAASRKSTLKPLHWVKVTRALQGSLWEELQRNDDSQSVSEFDISELESLFPAAVPKSDDSSKSERRKSLGSKPEKVHLIELRRANNTEIMLTKVKMPLSDLVSAALALDQSTLDVDQVENLIKFCPTKEEMELLKDNNPSCLSSTLSPSLLLFYPLSFVFSCCQPHESSSEQQATEEGMFFCSLCEVQVLKYSKHCRVCDKCVDGFDHHCRWLNNCIGRRNYRRFFILMSTAVILLILQSAIGVLVLVLCFVERKEFSMQIVSKLGSSFSVVPFVIVVASCTILAMVASLPVAQLLFFHILLIKKGISTYDYIIALREQEQDDLSGQQSPQMSRVSSYTGLSSASSFGPLRRGSWCTPPRLFLEDQV

SEQ ID NO: 227206 - protein, 216 aa, Zea Mays
MESTTGSAELEHAPFLTNHFFLVLCSNTRKADEAREPHRESMPSTTACWVSGTARLAASSFTMTPRARRGRKRGCGSRKSTTRRSCEVEHGRRGDNNHEYVAAHNMDGELRQAQQTRLHDECRHGVEAAGRRRPSPHQRGRRTAKRGVGRRYQAGELERVRWSSDRWSVERVRKQLKARKSSSSAQASVRRELASGLSIWELSTRYKAKASAMRYA

SEQ ID NO: 227207 - protein, 202 aa, Zea Mays
MYYPQPTVSLAAAVALLRPSLRRHSQRASSLLRSSTPPPWVSARRRTAVSDDFFTVELDATGVEPEPDSIDDGLPSPWEGAVVYRRDAAVQHLEYASTLERLGLGDLSSPDSRARAADLGLAGGTLDSTGAQPRTPVLVSVDVTRRRGRLRLDGIVRTVITLGCFRPSRGGTRPRHDFSRGRRQRWCFASLRHGWRSRYRLG

SEQ ID NO: 227208 - protein, 1191 aa, Zea Mays
MYKLRGRGGGRGGSGVAKRPMPSNARGRGVASSIGGMAGPPRSRAAAAALKQPVGREEAFCLESSGLPAFAAIIRLTPDLVDEIRRTEEAGGGARIKFNPNMYNSSENVIDVSGKEFKFTWASERGELCDIYEERRSGEDGNGLLLECGSAWRKVNVQRILDESTKNLVKMRSEEAERLSKSRKSIVLDPANPSVKSQAKSMAAAAVEGNPRRMHWKQKSEFLKKNKAAVITPTKSVLKVKLSNNIPKGNISSSPAPSPEQPGESNPSFPVGSDANNEVITPFDFNKEENSKYEKSVRNKMSNKDINRRASSHAANVDDNTNEVRSYLISVLSKNPKGMGLKALEKAVADAFPNASKKIQSIIKNIANYQGPERYVLKSGLEVESSKSHVSEGVRSISKKIEESAPSLTIDDPDICERIDIVGSLVAPTDGKLSNDSEGKAGTSSDSGSDSDSDSSNSGSDSGSQSRSAAETGSGSSSNSDSDGSSSSKEGSDAAVDITSDDDKANIAHTKVVDDLNLSSSPRDLKRLDVDDEQIDIETNLDYRSTSPHIGLNKFNTGNDDAAAEGFSAGNLSKPSEMSGSKNMTSTRMDSIGVDTKYNEMSFLDNLFDDSMRIASENSPKGEAGQLTVQHVNKRKSTSKDESKFGPVSIAKPKLKRSSGSENSTAKPESAKKVKADIASSIGSLSEHKRSLPPEKYSNDRFNKGTWDVSRHASQDSSPAMKGRPLAPGNLQRIDQSPNLPVPTMHSERTKENTVKSSLKKKSDKSQKPWHGMDGDFGPGYSHGVDHHANFDGSDDFSTRKRSRHGNLLIDDKMFKRSKDANANVDSMNLTKSSRETVVPDEITAFPESNECNGEQSNSQRDNVERSPYGKKKLQREFSDLELAELRKTSLENDDGRIRKQFESSSSKSLDAKLNVINSYPSMNDRKVPVTVFNDTKRKPSPQEYGIGGHINQEGFPRKAAGYEFDDNRPQQNIPDSQHLPRIYNTDFENLIYPDSSGKTSKRETRMTHGGMLEYADIQKKKTTSRLPQNGTNNVRVSRMQKSISPSDNDERSRNDSLIETKTGRKRRGSSSDDDNLFFSKYDKDAPELKDPIKDFSQYKDYVQEYNEKYGVYSYLNSQIDKTMSEFLKIQDDLNVGKERGKEQYYNTLERLRDMYHESGTRHKLMKKVFVLLHEELQNNSQLRSDDELHY

SEQ ID NO: 227209 - protein, 684 aa, Zea Mays
MLLVMGNPGRSRQLSALVASAAILLSLSALPICRPYTYEQDVFAINGLYTALGAPQLPNWTSNGGDPCNEGWQGVSCVASNITSIILSGANLGGQLGNTLGNFTSLITFFLSANQLSGSLPSTLSSLTLLTSMSLNSNHLTGAIPDVFSALTGLANLDFSDNNLTGPLPPSMGNLTSLTSLHIQNNQISGTLNVLQDLPFQDLNVENNLFSGPVPVKLLNLPNFKKDGNPFNTSIAPSAQPPIAPTPLPSIPPSSGHVPSKEPAHSSSVPGGSTSGSGKHTTLKLVGYILIGVVLAVVLVLIAMYCLSKYKEKRSRDDIYMKNKIGRVPQKLGEPKIKEPPLKLKNDAEKETSNVVYDPSPRDGAELRFITDSFSEENIIRDSRFGKVYLAKLPDGELLEILKIDSSNSKVPVDAFLELVVRISELRHPNILGLVGYCAEFEQRLLVYEYCSKMTLHDELRHVDDSSKPLSWNARLQVASEAAKALQHLHDGCQPPVVHQNFEPSVVLLNSTLVVHISECGLASLASKSVSQLSGHTLFHYEAPEVHESGSVSDRSDVYSFGVVMLELLTGRKPYDSSYPRAEQHLVRWATSQLYDIDAITKMVDPSIRGQCSDKALSRFADIISRCIQHEPEFRPPMSEVVQDLTRMMPLTTIDAVVGYFGQCKMGGTQWQDAETAPRFVHCQ

SEQ ID NO: 227210 - protein, 662 aa, Zea Mays
MLLVMGNPGRSRQLSALVASAAILLSLSALPICRPYTYEQDVFAINGLYTALGAPQLPNWTSNGGDPCNEGWQGVSCVASNITSIILSGANLGGQLGNTLGNFTSLITFFLSANQLSGSLPSTLSSLTLLTSMSLNSNHLTGAIPDVFSALTGLANLDFSDNNLTGPLPPSMGNLTSLTSLHIQNNQISGTLNVLQDLPFQDLNVENNLFSGPVPVKLLNLPNFKKDGNPFNTSIAPSAQPPIAPTPLPSIPPSSGHVPSKEPAHSSSVPEKRSRDDIYMKNKIGRVPQKLGEPKIKEPPLKLKNDAEKAPNVVSDGREEHKLKVPTSETSNVVYDPSPRDGAELRFITDSFSEENIIRDSRFGKVYLAKLPDGELLEILKIDSSNSKVPVDAFLELVVRISELRHPNILGLVGYCAEFEQRLLVYEYCSKMTLHDELRHVDDSSKPLSWNARLQVASEAAKALQHLHDGCQPPVVHQNFEPSVVLLNSTLVVHISECGLASLASKSVSQLSGHTLFHYEAPEVHESGSVSDRSDVYSFGVVMLELLTGRKPYDSSYPRAEQHLVRWATSQLYDIDAITKMVDPSIRGQCSDKALSRFADIISRCIQHEPEFRPPMSEVVQDLTRMMPLTTIDAVVGYFGQCKMGGTQWQDAETAPRFVHCQ

SEQ ID NO: 227211 - protein, 445 aa, Zea Mays
MAPGLANWVALVLTVLLGLSCLVVALSEDGLCRTCHALFGISAVLQTCELAWTCAETLDKLRFVRHAQDAPLVSQYNYIVIGGGTAGCPLAATLSEHSRVLLLERGGLPSRNMSDQQHFTDALADTSPASPAQRFVSEDGVVNARARVLGGGSCLNAGFYTRASTDYVRAAGWDARLVNSSYRWVERALVFRPAVPPWQAALRDALLEAGVTPDNGFTFDHVTGTKIGGTIFDSSGQRHTAADFLRHARPRGLTVFLYATVSRILFRQQEGVPYPVAYGVVFTDPLGVQHRVYLRDGAKNEVILSAGTLGSPQLLMLSGVGPQAHLEAHGVQSRAFANFTYANASTESIFTDSANFPVNLLPRHVNDSRTPEQYCRDTVMTIWHYHGGCQVGAVVDDDYRVFGVQRLRVIDSSTFKYSPGTNPQATVMMLGRYMGVKIQAERWRK

SEQ ID NO: 227212 - protein, 1120 aa, Zea Mays
MFAKRLFHRALVHHHQGVGRGGGGGASAPAASPADAIQMDAQISTHCGVPYTASLLAFDPVQRLLAVATLDGRIKIFGGDNIEGLLISPKSVPYKFLQFITNQGLLVAISNENEIQVWNLEFRQLFYSSQWDVNITAFAVIERTFMMYLGDENGLLSVLKYDVDDGKLQIMPYNVHIHSLIERSGVSLQDPQPIVGILIQPDTFGTRLLIAYERGLLVLWDVSEDRAVSVRGYGDLRMKGQINGAQGDSGEDQLNTTIDDSEEEREICSLCWASREGSTVAVGYITGDILLWDMTTKSSRQEKQSDVSSNVVKLQLASGSRRLPVIVLHWSAGSAVHSNKGGHLFVYGGDDMGSEEVLTVLSLESTAGLESVRCMSRTDLKLDGSFADMILIPDTGVPDKSRTSALFILTNPGQLNFYDGGSLFSVQNSKEGTPLPEAQKFPVAIPTLDPNITVTGLYSLTESEFPNISLKKFCARKNAGHFISENMKWPLTGGVPNEMSLDEDHAVERIYIAGYQDGSVRIWDATFPVLMPMFVLDGNVADVNLDGANASVSSLAFCSLSMTLAVGTTSGLVRIYKLREHTGGSSFHFVSEFKQEVHVVHHGKGFHCYVAFLSANSSVLSLLFMASGGLLAAGYQNGQVAMLDPSQLSILFTVDGASGTNSPVVSLGIYSVAASAAKADQSKKDNPQNATLSRDVLLSLTKDARVTVLDCTTGVMINSHIIHQKQSSAISMYVIESDETQTQLSEDKIPSQGQTGKDGNDLDKIQTQGIEKHLKNASQLSQNGGSDSLLVVCCEDVLLLLSLASLIQGSSKHLQKTKLAKPCCWSAVFKNMDDKVCGLILAYQTGTIEMRFGPDLAIVAETSLMSLLRWSYKTGMEKSTSSSNGQVTLVNGSEFAIISLMASENDLRIPESLPCLHDKVLAAAAEAAMSFSTDQRRKQNPAAGIIGGFIKGMKGKAEENAKMRESLTLRAPSEQLESIFSKEPFAEPSIPDLDDPMEELSIDDIEIDDEVAVALAQAASSTSQGNKRTAVEEERAKLFEGSNSADKPRMRTQQEILTKYRFGGDAAAAAAHAKDKLMQRQEKLERISQQTAELQNGAENFASLAQELAKTMENKKWWKL

SEQ ID NO: 227213 - protein, 769 aa, Zea Mays
MGSEEVLTVLSLESTAGLESVRCMSRTDLKLDGSFADMILIPDTGVPDKSRTSALFILTNPGQLNFYDGGSLFSVQNSKEGTPLPEAQKFPVAIPTLDPNITVTGLYSLTESEFPNISLKKFCARKNAGHFISENMKWPLTGGVPNEMSLDEDHAVERIYIAGYQDGSVRIWDATFPVLMPMFVLDGNVADVNLDGANASVSSLAFCSLSMTLAVGTTSGLVRIYKLREHTGGSSFHFVSEFKQEVHVVHHGKGFHCYVAFLSANSSVLSLLFMASGGLLAAGYQNGQVAMLDPSQLSILFTVDGASGTNSPVVSLGIYSVAASAAKADQSKKDNPQNATLSRDVLLSLTKDARVTVLDCTTGVMINSHIIHQKQSSAISMYVIESDETQTQLSEDKIPSQGQTGKDGNDLDKIQTQGIEKHLKNASQLSQNGGSDSLLVVCCEDVLLLLSLASLIQGSSKHLQKTKLAKPCCWSAVFKNMDDKVCGLILAYQTGTIEMRFGPDLAIVAETSLMSLLRWSYKTGMEKSTSSSNGQVTLVNGSEFAIISLMASENDLRIPESLPCLHDKVLAAAAEAAMSFSTDQRRKQNPAAGIIGGFIKGMKGKAEENAKMRESLTLRAPSEQLESIFSKEPFAEPSIPDLDDPMEELSIDDIEIDDEVAVALAQAASSTSQGNKRTAVEEERAKLFEGSNSADKPRMRTQQEILTKYRFGGDAAAAAAHAKDKLMQRQEKLERISQQTAELQNGAENFASLAQELAKTMENKKWWKL

SEQ ID NO: 227214 - protein, 871 aa, Zea Mays
MMYLGDENGLLSVLKYDVDDGKLQIMPYNVHIHSLIERSGVSLQDPQPIVGILIQPDTFGTRLLIAYERGLLVLWDVSEDRAVSVRGYGDLRMKGQINGAQGDSGEDQLNTTIDDSEEEREICSLCWASREGSTVAVGYITGDILLWDMTTKSSRQEKQSDVSSNVVKLQLASGSRRLPVIVLHWSAGSAVHSNKGGHLFVYGGDDMGSEEVLTVLSLESTAGLESVRCMSRTDLKLDGSFADMILIPDTGVPDKSRTSALFILTNPGQLNFYDGGSLFSVQNSKEGTPLPEAQKFPVAIPTLDPNITVTGLYSLTESEFPNISLKKFCARKNAGHFISENMKWPLTGGVPNEMSLDEDHAVERIYIAGYQDGSVRIWDATFPVLMPMFVLDGNVADVNLDGANASVSSLAFCSLSMTLAVGTTSGLVRIYKLREHTGGSSFHFVSEFKQEVHVVHHGKGFHCYVAFLSANSSVLSLLFMASGGLLAAGYQNGQVAMLDPSQLSILFTVDGASGTNSPVVSLGIYSVAASAAKADQSKKDNPQNATLSRDVLLSLTKDARVTVLDCTTGVMINSHIIHQKQSSAISMYVIDAESDETQTQLSEDKIPSQGQTGKDGNDLDKIQTQGIEKHLKNASQLSQNGGSDSLLVVCCEDVLLLLSLASLIQGSSKHLQKTKLAKPCCWSAVFKNMDDKVCGLILAYQTGTIEMRFGPDLAIVAETSLMSLLRWSYKTGMEKSTSSSNGQVTLVNGSEFAIISLMASENDLRIPESLPCLHDKVLAAAAEAAMSFSTDQRRKQNPAAGIIGGFIKGMKGKAEENAKMRESLTLRAPSEQLESIFSKEPFAEPSIPDLDDPMEELSIGSLSPSLCIILY

SEQ ID NO: 227215 - protein, 178 aa, Zea Mays
MCPRPQSASTTLRHFRTHELDLACFRQLRHFLAPDLDVWDSIPNEETRGEYEPSASPLSSVFPIHRSGALHRSFDEDSNDYSSIAPHGDAAKGTTTTTTKPSTMPSVVAHIGACSTMRAPCPAHRQTHPAAAHTRLLMAEAERRHGSDTVWNGEEPKWRLDQSGLGRSQANRRLGSLC

SEQ ID NO: 227216 - protein, 192 aa, Zea Mays
MKTLSLKTQLVARFVSAYYSPIHFDSPHLEAPSASRPSPVQPFLSCPVSRSHSTASISQSRRRRRRVPPAAPMRAISTAAGGMLRARLRSSSRVRGGGDGAGRWTTPGHEERPKGYLFNRPPPPPGETRKWEDWELPCYITSFLTVVILGVGLNAKPDLTIETWAHEKALERLKQQELAAVSGGGDADADAE

SEQ ID NO: 227217 - protein, 439 aa, Zea Mays
MSSKSDNGTNEQLVDEYYDQDEDDLGDFIVYSDDDDESLKHKQHQQEMEDEQQQEDEMEQQQQEDEMEEEIEEEVEVEEEEEAPVGQQEILSLREQLKEEIRRKNAAMVPSAHKPDLSSPSKNQTMPTVNDGYGTFFGPSKPVLARRVIEEGCSSSMMKDLQNIPSSKRDVSLASKMRPGAVQNVQKQKFVSEEKRKADTLRKNRDYSCLFSDDADTHPPTEEAQDGGPVNARKGTAQPATLSLGKKAHAERKGTIASGRNSLPNNLKKKSPGLLSSSKSQELQPSLHNKRLQASIPGQKLRQQSQSHQRPQGNGRQPPLQGRRLQGQLIGQNRSAAQNARLKSAQKQLIHSSEFKASRGVEKYTVKRRKSSDDRQIMHSDDEDESDMEADFASIQREERRSAALARREDEEQLRLIKEEERRERANKRKRAAQKESRS

SEQ ID NO: 227218 - protein, 457 aa, Zea Mays
MSSKSDNGTNLVDEYYDQDEDDLGDFIVYSDDDDESLKHKQHQQEMEDEQQQEDEMEQQQQEDEMEEEIEEEVEVEEEEEAPVGQQEILSLREQLKEEIRRKNAAMVPSAHKPDLSSPSKNQTMPTVNDGYGTFFGPSKPVLARRVIEEGCSSSMMKDLQNIPSSKRDVSLASKMRPGAVQNVQKQKFVSEEKRKADTLRKNRDYSCLFSDDADTHPPTEGHPSSRASLALKSEAQDGGPVNARKGTAQPATLSLGKKAHAERKGTIASGRNSLPNNLKKKSPGLLSSSKSQELQPSLHNKRLQASIPGQKLRQQSQSHQRPQGNGRQPPLQGRRLQGQLIGQNRSAAQNARLKSAQKQLIHSSEFKASRGVEKYTVKRRKSSDDRQIMHSYHKFAGSDDEDESDMEADFASIQREERRSAALARREDEEQLRLIKEEERRERANKRKRAAQKESRS

SEQ ID NO: 227219 - protein, 121 aa, Zea Mays
MASSSRTADVAASRVLSEKGAAAMAECVGLLFGKWTALQLAVQNQWGGHDSQAKADRLASSVLSWFTRAAAARGAGALDPDELEDLLYVTMDESFNADIDDGGVEEGGAVSLKEAAIPAPR

SEQ ID NO: 227220 - protein, 121 aa, Zea Mays
MHRRSADRPGGHPIDPSRGQTQPWPRPPARPTSPPAGCCPRRGRPQWRSASACFSGSGRRCSWRCRTSGAATTRRLRPTGSPPPSSPGSPAPPPPEARAHSTRTSWRICCTSPWTSPSTPT

SEQ ID NO: 227221 - protein, 121 aa, Zea Mays; identical to SEQ ID NO: 227219

SEQ ID NO: 227222 - protein, 672 aa, Zea Mays
MFFSGDPSARRRVDLGGRSSKERDRKVLLEQTREERRRRQGLRLQNTSATKIQKFFRGKKALELARSEVRKNFCSTFGEHCERIEWNIFGTNSDFLRQLLFFFNANEDNDIAILCHVCNLLLQYVKQGGDVVTLFTGVNGSSLQPLVAHRVKKFALICVQAVYQKRHDWGSQLLTTPGTTSVPSVSLLETVGCLINPKFLWNCKVVGYLQQRKIYCLFRGIIVSVPQNVRNSGHFDSASVLEQVLMLVASHVGHHPCCCLKVDPRWSFSSQLLSIPFLWHRLPQLKKVFSVNGLNKYYIHQIACLLPSLVDVLPNDISANHPGYACVLANVLEAATWILSDAKLASDSAADIIAVCTSLLDTLPAVTTPTERADDDDEMPMDVNIKINLDVDLERQITAAIDSKLLQHLVNALFRGTLSTNDSDLSGPSDAEVDAVGSICAFLHVTFNTFPLERIMTVLAYRTEIVPALWKFIKRCHASRRWPFFLKFASSLPADSPGWLLPMSVFCPIYKHMLKIIDTGEFYEQEKPLSLKDLKSLVLILKQALWQLLWVIPSSSTQKVSPNPSGLKKLSVENVKTRARVGLSELLTQLQDWNSRLPFTAASDFYSQEATSENFVSQAILGNTRASEIIKLAPFLAPFTSRVKIFTRFKIRRSRLLEDAFDQLSLLSEEDL

SEQ ID NO: 227223 - protein, 403 aa, Zea Mays
MLVASHVGHHPCCCLKVDPRWSFSSQLLSIPFLWHRLPQLKKVFSVNGLNKYYIHQIACLLPSLVDVLPNDISANHPGYACVLANVLEAATWILSDAKLASDSAADIIAVCTSLLDTLPAVTTPTERADDDDEMPMDVNIKINLDVDLERQITAAIDSKLLQHLVNALFRGTLSTNDSDLSGPSDAEVDAVGSICAFLHVTFNTFPLERIMTVLAYRTEIVPALWKFIKRCHASRRWPFFLKFASSLPADSPGWLLPMSVFCPIYKHMLKIIDTGEFYEQEKPLSLKDLKSLVLILKQALWQLLWVIPSSSTQKVSPNPSGLKKLSVENVKTRARVGLSELLTQLQDWNSRLPFTAASDFYSQEATSENFVSQAILGNTRASEIIKLAPFLAPFTSRVKIFTC

SEQ ID NO: 227224 - protein, 547 aa, Zea Mays
MFFSGDPSARRRVDLGGRSSKERDRKVLLEQTREERRRRQGLRLQNTSATKIQKFFRGKKALELARSEVRKNFCSTFGEHCERIEWNIFGTNSDFLRQLLFFFNANEDNDIAILCHVCNLLLQYVKQGGDVVTLFTGVNGSSLQPLVAHRVKKFALICVQAVYQKRHDWGSQLLTTPGTTSVPSVSLLETVGCLINPKFLWNCKVVGYLQQRKIYCLFRGIIVSVPQNVRNSGHFDSASVLEQVLMLVASHVGHHPCCCLKVDPRWSFSSQLLSIPFLWHRLPQLKKVFSVNGLNKYYIHQIACLLPSLVDVLPNDISANHPGYACVLANVLEAATWILSDAKLASDSAADIIAVCTSLLDTLPAVTTPTERADDDDEMPMDVNIKINLDVDLERQITAAIDSKLLQHLVNALFRGTLSTNDSDLSGPSDAEVDAVGSICAFLHVTFNTFPLERIMTVLAYRTEIVPALWKFIKRCHASRRWPFFLKFASSLPADSPGWLLPMSVFCPIYKHMLKIIDTGEFYEQEKPLSLKDLKSLVLILKQYYIN

SEQ ID NO: 227225 - protein, 2576 aa, Zea Mays
MEAAAPDGAAQASPPPAEADRPPEPRPPPLPAAGTHDPHFLSSIIGDAAPPPPPPPLGQKRKRGRPPKRKDGAAVAAGPVVPAPAPALARAARRRQDEEEVVCFICFDGGNLVVCDRRGCPKVYHPACIKRDEAFFQSRSKWNCGWHICSSCEKAVHYMCYTCTYSLCKVCIKQDLKGKLSLTLEELTTAKNRWNVPSTSARKEKEESSDDLYDANNDDDAGSDCSSGKRRRTNSRKKGQKRRKVNRDCSILEKKVELPLRNTESIPVEVPNERVPYPVHTKVPNGRVPMPVDTKVPNEPVSLAANTKWASPELLEFIGHMRNGDQSFISQFDVQTLLLDYIKKNNLRDPQRKSQIICDSRLHFLFRKARVAHFEMLKLLEMHFLTNETSTVTNSSQVTINLNSAHVDTNGHNDTAAKVSPDKRRRIYRKMERDTQVNLEDYAAIDMHNINLIYMRRSLMEDLVDDVKFSDKIHGGFVRIKISDVCQKQDIYRLVKVIGTHKVPEKYSIGKKMTNVALEILNLNKKEIITMDTISNHDFTEEECKRLRQSMKCDLISRLKVGDILEKAKILQYVRVNDWFENEKQRLGHLRDRASETGRRKELREYVEKLQLLNDSEERTRRIIEILELHVDSHMDPNYESAEETDEKGTVGKSVNQTRPDTTISRRISRYLSTVQNHPKKVSDSSHLPKSLSTESAICGSGARSLENSTANRTMYGAGPLSSSVVTMTNDTEPEKVWHYKDPSGNVQGPFTLLQLSNWTSYFPRDLRVWLTFESEERSLLLTEVLSKQQKDFTQAASHTSSKATLVGTGHTRNNPSVDQTNAFSPVGHSVVSSSGIPVQYNKYSVPERESVYSPDDSLSLSTSSVPPKDAYTVNSQAHCQNKHSVFIQSPGSSYGHTDLNHDGIQGGCSGESNHHHSSRALWSPTVAHVSCGRGNVESHQNQHVSWSESQHESKNGSQGGFVKDLNSRQDLSKNLPAQRIGKDVSSPLFAWSPAESRTASSQQEGSCLSSTTNPSFLDELHSSIASAKPKSCAPATPIEDRGSSSPSDMLSHEERVPICSPQSAPLASASDMCKMEEIMNQQRTLVVDTSNASVNQSPESRAFPVSSPDNQDIDREFPSPVPRSENKDIAVDSSELAPASPENITTNLPVSDTCKMEEVVSQQQVIGAVVSNSSDNHSPQSKVSPVSSNNEDTKHKYPSSTPRPENKNPAVDSLLSTSAAPENLTTTSTHDSDTCKMEVVNQPKTFEADASNAPLHQLPHSHSFLVPSDNQDIECECPGPTPRSDSEEALMNNSATTASASDTSKMEEFVNQQKTLEADSSNAPLNQSPHSHIFSVPSDKQDIERECPGPTQRSDTKEPLMNNSVLTSGPSEIQTTASAASDTCKMEESVDQPKALEADASNAPLNHHPHSHIFRVSSDNQDNQCEHPSPNPKSDSKEPLVDNSVLTSVVPGMLATTSASDKCKMEEFANQQKALEVDASNASFNQPHIFAVSSDNQDMERERPSPTPRSECKESLTENSVLTSLAPEILARSSASASDKCKTEEFVNQQKPIEADASNASLNQPHVFAVPSDNQDIERECPSPTPRSECKESFMENSVLTSAVPEIARSSVSASDTCKMEFVNQQRPIEADASNASLNQPRIFAISSDNKDIERECPNPTPRSECKESIMENSVLTSAAPEILAISSASASDTCKMEFVNQQRPIEADASNASLNQPHIFAISSDNKDIERECPSPTPRSECKESLMENSVLTPATPEILARSSASASDTCKMEEFVKQQRPNEADASNASLNQPHIFTVSSDNKDIERECPSPTPRSECKESLMENSVLTSAAPERSSASASDTCKMEFVNQQRPIEADAPNASLNQCRTFAVSSDTKDIERECPSPTPRSECKESLMENSVLTSAAPEILARSSASASDTCKMEEFVNQQRLIEADASNASLNQPHIFAVSSDNKDIERECPSPTPRSECKESLMENSVLTSAAPEILVRSSASASDTCKMEEFVNQQRPIEVDASNASLNQPPRCHIFTASSNNQDIERECPSSTPRSDSKEPFVDNLVLTSAVPGNLLTSSAVASDTCKMEILNKKITLEADASNAPLNQPPLSSVFASSSGDDQDNVCGRPSPNPRPEGEQPLMGNSGLISTVPRNLTSTSASASDICKMEILNEKRTLEANPSNGLITQSPQPKVFLVPSPDILECEFSSETPRHEFKEPVADSSGLTSAAHENLGTKPHVHSPDAFVPPKSGALTGELGDTKSDFKGEETIQKEQYFGSESIAATRENLLIDPSSGVESIDVSDVLDSLMEERSGTSYMPGSIEDFLAEEEPQYSSPIALSPWGEPSYYQGDAVDSALWGTQDLINDMWSLLSPRPMLQPSSGIGTEGKETFDINEVAVTHVSSDYFQKGSMFGEENVNQANLSAAADWMLPEQVPSIPNGMSTSSVDESTIVLGSQPSTNQSLDWGGTTWSIGQNASVYSNEKAEPSSKSYWEEPRKQETAKSSVSISGQAIGNNKGLDPRDNAANRGSRLSHHHRGRYSQISESWLLSSSHSRSRSDRFGSGGSSRSTSKGQSRG

SEQ ID NO: 227226 - protein, 2592 aa, Zea Mays
MEAAAPDGAAQASPPPAEADRPPEPRPPPLPAAGTHDPHFLSSIIGDAAPPPPPPPLGQKRKRGRPPKRKDGAAVAAGPVVPAPAPALARAARRRQDEEEVVCFICFDGGNLVVCDRRGCPKVYHPACIKRDEAFFQSRSKWNCGWHICSSCEKAVHYMCYTCTYSLCKVCIKQGKFFSVRGTKGFCDTCYGTILLIECKDESATKVDFDDILSWEYLFKLYWLDLKGKLSLTLEELTTAKNRWNVPSTSARKEKEESSDDLYDANNDDDAGSDCSSGKRRRTNSRKKGQKRRKVNRDCSILEKKVELPLRNTESIPVEVPNERVPYPVHTKVPNGRVPMPVDTKVPNEPVSLAANTKWASPELLEFIGHMRNGDQSFISQFDVQTLLLDYIKKNNLRDPQRKSQIICDSRLHFLFRKARVAHFEMLKLLEMHFLTNETSTVTNSSQVTINLNSAHVDTNGHNDTAAKVSPDKRRRIYRKMERDTQVNLEDYAAIDMHNINLIYMRRSLMEDLVDDVKFSDKIHGGFVRIKISDVCQKQDIYRLVKVIGTHKVPEKYSIGKKMTNVALEILNLNKKEIITMDTISNHDFTEEECKRLRQSMKCDLISRLKVGDILEKAKILQYVRVNDWFENEKQRLGHLRDRASETGRRKELREYVEKLQLLNDSEERTRRIIEILELHVDSHMDPNYESAEETDEKGTVGKSVNQTRPDTTISRRISRYLSTVQNHPKKVSDSSHLPKSLSTESAICGSGARSLENSTANRTMYGAGPLSSSVVTMTNDTEPEKVWHYKDPSGNVQGPFTLLQLSNWTSYFPRDLRVWLTFESEERSLLLTEVLSKQQKDFTQAASHTSSKATLVGTGHTRNNPSVDQTNAFSPVGHSVVSSSGIPVQYNKYSVPERESVYSPDDSLSLSTSSVPPKDAYTVNSQAHCQNKHSVFIQSPGSSYGHTDLNHDGIQGGCSGESNHHHSSRALWSPTVAHVSCGRGNVESHQNQHVSWSESQHESKNGSQGGFVKDLNSRQDLSKNLPAQRIGKDVSSPLFAWSPAESRTASSQQEGSCLSSTTNPSFLDELHSSIASAKPKSCAPATPIEDRGSSSPSDMLSHEERVPICSPQSAPLASASDMCKMEEIMNQQRTLVVDTSNASVNQSPESRAFPVSSPDNQDIDREFPSPVPRSENKDIAVDSSELAPASPENITTNLPVSDTCKMEEVVSQQQVIGAVVSNSSDNHSPQSKVSPVSSNNEDTKHKYPSSTPRPENKNPAVDSLLSTSAAPENLTTTSTHDSDTCKMEVVNQPKTFEADASNAPLHQLPHSHSFLVPSDNQDIECECPGPTPRSDSEEALMNNSATTASASDTSKMEEFVNQQKTLEADSSNAPLNQSPHSHIFSVPSDKQDIERECPGPTQRSDTKEPLMNNSVLTSGPSEIQTTASAASDTCKMEESVDQPKALEADASNAPLNHHPHSHIFRVSSDNQDNQCEHPSPNPKSDSKEPLVDNSVLTSVVPGMLATTSASDKCKMEEFANQQKALEVDASNASFNQPHIFAVSSDNQDMERERPSPTPRSECKESLTENSVLTSLAPEILARSSASASDKCKTEEFVNQQKPIEADASNASLNQPHVFAVPSDNQDIERECPSPTPRSECKESFMENSVLTSAVPEIARSSVSASDTCKMEFVNQQRPIEADASNASLNQPRIFAISSDNKDIERECPNPTPRSECKESIMENSVLTSAAPEILAISSASASDTCKMEFVNQQRPIEADASNASLNQPHIFAISSDNKDIERECPSPTPRSECKESLMENSVLTPATPEILARSSASASDTCKMEEFVKQQRPNEADASNASLNQPHIFTVSSDNKDIERECPSPTPRSECKESLMENSVLTSAAPERSSASASDTCKMEFVNQQRPIEADAPNASLNQCRTFAVSSDTKDIERECPSPTPRSECKESLMENSVLTSAAPEILARSSASASDTCKMEEFVNQQRLIEADASNASLNQPHIFAVSSDNKDIERECPSPTPRSECKESLMENSVLTSAAPEILVRSSASASDTCKMEEFVNQQRPIEVDASNASLNQPPRCHIFTASSNNQDIERECPSSTPRSDSKEPFVDNLVLTSAVPGNLLTSSAVASDTCKMEILNKKITLEADASNAPLNQPPLSSVFASSSGDDQDNVCGRPSPNPRPEGEQPLMGNSGLISTVPRNLTSTSASASDICKMEILNEKRTLEANPSNGLITQSPQPKVFLVPSPDILECEFSSETPRHEFKEPVADSSGLTSAAHENLGTKPHVHSPDAFVPPKSGALTGELGDTKSDFKDVSDVLDSLMEERSGTSYMPGSIEDFLAEEEPQYSSPIALSPWGEPSYYQGDAVDSALWGTQDLINDMWSLLSPRPMLQPSSGIGTEGKETFDINEVAVTHVSSDYFQKGSMFGEENVNQANLSAAADWMLPEQVPSIPNGMSTSSVDESTIVLGSQPSTNQSLDWGGTTWSIGQNASVYSNEKAEPSSKSYWEEPRKQETAKSSVSISGQAIGNNKGLDPRDNAANRGSRLSHHHRGRYSQISESWLLSSSHSRSRSDRFGSGGSSRSTSKGQSRG

SEQ ID NO: 227227 - protein, 2606 aa, Zea Mays
MEAAAPDGAAQASPPPAEADRPPEPRPPPLPAAGTHDPHFLSSIIGDAAPPPPPPPLGQKRKRGRPPKRKDGAAVAAGPVVPAPAPALARAARRRQDEEEVVCFICFDGGNLVVCDRRGCPKVYHPACIKRDEAFFQSRSKWNCGWHICSSCEKAVHYMCYTCTYSLCKVCIKQGKFFSVRGTKGFCDTCYGTILLIECKDESATKVDFDDILSWEYLFKLYWLDLKGKLSLTLEELTTAKNRWNVPSTSARKEKEESSDDLYDANNDDDAGSDCSSGKRRRTNSRKKGQKRRKVNRDCSILEKKVELPLRNTESIPVEVPNERVPYPVHTKVPNGRVPMPVDTKVPNEPVSLAANTKWASPELLEFIGHMRNGDQSFISQFDVQTLLLDYIKKNNLRDPQRKSQIICDSRLHFLFRKARVAHFEMLKLLEMHFLTNETSTVTNSSQVTINLNSAHVDTNGHNDTAAKVSPDKRRRIYRKMERDTQVNLEDYAAIDMHNINLIYMRRSLMEDLVDDVKFSDKIHGGFVRIKISDVCQKQDIYRLVKVIGTHKVPEKYSIGKKMTNVALEILNLNKKEIITMDTISNHDFTEGDILEKAKILQYVRVNDWFENEKQRLGHLRDRASETGRRKELREYVEKLQLLNDSEERTRRIIEILELHVDSHMDPNYESAEETDEKGTVGKSVNQTRPDTTISRRISRYLSTVQNHPKKVSDSSHLPKSLSTESAICGSGARSLENSTANRTMYGAGPLSSSVVTMTNDTEPEKVWHYKDPSGNVQGPFTLLQLSNWTSYFPRDLRVWLTFESEERSLLLTEVLSKQQKDFTQAASHTSSKATLVGTGHTRNNPSVDQTNAFSPVGHSVVSSSGIPVQYNKYSVPERESVYSPDDSLSLSTSSVPPKDAYTVNSQAHCQNKHSVFIQSPGSSYGHTDLNHDGIQGGCSGESNHHHSSRALWSPTVAHVSCGRGNVESHQNQHVSWSESQHESKNGSQGGFVKDLNSRQDLSKNLPAQRIGKDVSSPLFAWSPAESRTASSQQEGSCLSSTTNPSFLDELHSSIASAKPKSCAPATPIEDRGSSSPSDMLSHEERVPICSPQSAPLASASDMCKMEEIMNQQRTLVVDTSNASVNQSPESRAFPVSSPDNQDIDREFPSPVPRSENKDIAVDSSELAPASPENITTNLPVSDTCKMEEVVSQQQVIGAVVSNSSDNHSPQSKVSPVSSNNEDTKHKYPSSTPRPENKNPAVDSLLSTSAAPENLTTTSTHDSDTCKMEVVNQPKTFEADASNAPLHQLPHSHSFLVPSDNQDIECECPGPTPRSDSEEALMNNSATTASASDTSKMEEFVNQQKTLEADSSNAPLNQSPHSHIFSVPSDKQDIERECPGPTQRSDTKEPLMNNSVLTSGPSEIQTTASAASDTCKMEESVDQPKALEADASNAPLNHHPHSHIFRVSSDNQDNQCEHPSPNPKSDSKEPLVDNSVLTSVVPGMLATTSASDKCKMEEFANQQKALEVDASNASFNQPHIFAVSSDNQDMERERPSPTPRSECKESLTENSVLTSLAPEILARSSASASDKCKTEEFVNQQKPIEADASNASLNQPHVFAVPSDNQDIERECPSPTPRSECKESFMENSVLTSAVPEIARSSVSASDTCKMEFVNQQRPIEADASNASLNQPRIFAISSDNKDIERECPNPTPRSECKESIMENSVLTSAAPEILAISSASASDTCKMEFVNQQRPIEADASNASLNQPHIFAISSDNKDIERECPSPTPRSECKESLMENSVLTPATPEILARSSASASDTCKMEEFVKQQRPNEADASNASLNQPHIFTVSSDNKDIERECPSPTPRSECKESLMENSVLTSAAPERSSASASDTCKMEFVNQQRPIEADAPNASLNQCRTFAVSSDTKDIERECPSPTPRSECKESLMENSVLTSAAPEILARSSASASDTCKMEEFVNQQRLIEADASNASLNQPHIFAVSSDNKDIERECPSPTPRSECKESLMENSVLTSAAPEILVRSSASASDTCKMEEFVNQQRPIEVDASNASLNQPPRCHIFTASSNNQDIERECPSSTPRSDSKEPFVDNLVLTSAVPGNLLTSSAVASDTCKMEILNKKITLEADASNAPLNQPPLSSVFASSSGDDQDNVCGRPSPNPRPEGEQPLMGNSGLISTVPRNLTSTSASASDICKMEILNEKRTLEANPSNGLITQSPQPKVFLVPSPDILECEFSSETPRHEFKEPVADSSGLTSAAHENLGTKPHVHSPDAFVPPKSGALTGELGDTKSDFKGEETIQKEQYFGSESIAATRENLLIDPSSGVESIDVSDVLDSLMEERSGTSYMPGSIEDFLAEEEPQYSSPIALSPWGEPSYYQGDAVDSALWGTQDLINDMWSLLSPRPMLQPSSGIGTEGKETFDINEVAVTHVSSDYFQKGSMFGEENVNQANLSAAADWMLPEQVPSIPNGMSTSSVDESTIVLGSQPSTNQSLDWGGTTWSIGQNASVYSNEKAEPSSKSYWEEPRKQETAKSSVSISGQAIGNNKGLDPRDNAANRGSRLSHHHRGRYSQISESWLLSSSHSRSRSDRFGSGGSSRSTSKGQSRG

SEQ ID NO: 227228 - protein, 2026 aa, Zea Mays
MKCDLISRLKVGDILEKAKILQYVRVNDWFENEKQRLGHLRDRASETGRRKELREYVEKLQLLNDSEERTRRIIEILELHVDSHMDPNYESAEETDEKGTVGKSVNQTRPDTTISRRISRYLSTVQNHPKKVSDSSHLPKSLSTESAICGSGARSLENSTANRTMYGAGPLSSSVVTMTNDTEPEKVWHYKDPSGNVQGPFTLLQLSNWTSYFPRDLRVWLTFESEERSLLLTEVLSKQQKDFTQAASHTSSKATLVGTGHTRNNPSVDQTNAFSPVGHSVVSSSGIPVQYNKYSVPERESVYSPDDSLSLSTSSVPPKDAYTVNSQAHCQNKHSVFIQSPGSSYGHTDLNHDGIQGGCSGESNHHHSSRALWSPTVAHVSCGRGNVESHQNQHVSWSESQHESKNGSQGGFVKDLNSRQDLSKNLPAQRIGKDVSSPLFAWSPAESRTASSQQEGSCLSSTTNPSFLDELHSSIASAKPKSCAPATPIEDRGSSSPSDMLSHEERVPICSPQSAPLASASDMCKMEEIMNQQRTLVVDTSNASVNQSPESRAFPVSSPDNQDIDREFPSPVPRSENKDIAVDSSELAPASPENITTNLPVSDTCKMEEVVSQQQVIGAVVSNSSDNHSPQSKVSPVSSNNEDTKHKYPSSTPRPENKNPAVDSLLSTSAAPENLTTTSTHDSDTCKMEVVNQPKTFEADASNAPLHQLPHSHSFLVPSDNQDIECECPGPTPRSDSEEALMNNSATTASASDTSKMEEFVNQQKTLEADSSNAPLNQSPHSHIFSVPSDKQDIERECPGPTQRSDTKEPLMNNSVLTSGPSEIQTTASAASDTCKMEESVDQPKALEADASNAPLNHHPHSHIFRVSSDNQDNQCEHPSPNPKSDSKEPLVDNSVLTSVVPGMLATTSASDKCKMEEFANQQKALEVDASNASFNQPHIFAVSSDNQDMERERPSPTPRSECKESLTENSVLTSLAPEILARSSASASDKCKTEEFVNQQKPIEADASNASLNQPHVFAVPSDNQDIERECPSPTPRSECKESFMENSVLTSAVPEIARSSVSASDTCKMEFVNQQRPIEADASNASLNQPRIFAISSDNKDIERECPNPTPRSECKESIMENSVLTSAAPEILAISSASASDTCKMEFVNQQRPIEADASNASLNQPHIFAISSDNKDIERECPSPTPRSECKESLMENSVLTPATPEILARSSASASDTCKMEEFVKQQRPNEADASNASLNQPHIFTVSSDNKDIERECPSPTPRSECKESLMENSVLTSAAPERSSASASDTCKMEFVNQQRPIEADAPNASLNQCRTFAVSSDTKDIERECPSPTPRSECKESLMENSVLTSAAPEILARSSASASDTCKMEEFVNQQRLIEADASNASLNQPHIFAVSSDNKDIERECPSPTPRSECKESLMENSVLTSAAPEILVRSSASASDTCKMEEFVNQQRPIEVDASNASLNQPPRCHIFTASSNNQDIERECPSSTPRSDSKEPFVDNLVLTSAVPGNLLTSSAVASDTCKMEILNKKITLEADASNAPLNQPPLSSVFASSSGDDQDNVCGRPSPNPRPEGEQPLMGNSGLISTVPRNLTSTSASASDICKMEILNEKRTLEANPSNGLITQSPQPKVFLVPSPDILECEFSSETPRHEFKEPVADSSGLTSAAHENLGTKPHVHSPDAFVPPKSGALTGELGDTKSDFKGEETIQKEQYFGSESIAATRENLLIDPSSGVESIDVSDVLDSLMEERSGTSYMPGSIEDFLAEEEPQYSSPIALSPWGEPSYYQGDAVDSALWGTQDLINDMWSLLSPRPMLQPSSGIGTEGKETFDINEVAVTHVSSDYFQKGSMFGEENVNQANLSAAADWMLPEQVPSIPNGMSTSSVDESTIVLGSQPSTNQSLDWGGTTWSIGQNASVYSNEKAEPSSKSYWEEPRKQETAKSSVSISGQAIGNNKGLDPRDNAANRGSRLSHHHRGRYSQISESWLLSSSHSRSRSDRFGSGGSSRSTSKGQSRG

SEQ ID NO: 227229 - protein, 93 aa, Zea Mays
MVPSAARGVLESSSGTHSGGFMMKRCGHPSSTRSWRDPSACTSPLTPINDYHSALSLLLCYVVGVLGAAAACKPPWNLQAGQETNKKITYQCR

SEQ ID NO: 227230 - protein, 291 aa, Zea Mays
MTPASVVAMPRSVPLALALAPFPAPARAEERRNARSFRPSACGAGDDQKPPSMAAMPASLRTIQTRRKQAAAQRGVPRATATSAAGCAVAALVKAMEAVQGAAAGGATEAARGAGDAVAWVFSKVHLQSPDLAVGLPLLGMVACCLGTIVEAAEMGRVEAKKPEASSGDAEADHPDGNGDAAAEEPEDDDDDMPELVEADIEKELWGQIGILHGGGLFGDSSYVHEELDEEEIKEIDSARARRRKAAYERAIASGGANSLIMSNYAQLLYEFDKDIDRILTRECVTTRHMY

SEQ ID NO: 227231 - protein, 563 aa, Zea Mays
MAPVKMLIRPVGARQSGRVVAGSRAGAEHDHDPVALARDPGAGELAVVEEPVVLRLGVVSEDDDGDEAQHARRHHLAVLGHRRVEVAAVQGSTYKPAKRGAPHRTASRSHRSVDVRKTPGSCALLTLSTSVSGSRFQLRSNPASVPRRASTSGAGAAGEIREHSSPATPHRPWPQLAADRERRRRGRADPDPVGGKDLIAPTTMAGAVSALFLLDMKGRVLVWRDYRGDVSALQAERFFTKLLDKEGDSEVHSPVVYDDAGVTYMFIQHNNVFLLTAARQNCNAASILLFLHRVIDVFKHYFEELEEESLRDNFVVVYELLDEMMDFGYPQYTEAKILSEFIKTDAYRMEVTQRPPMAVTNAVSWRSEGIRYKKNEVFLDVVESVNILVNSNGQIVRSDVVGALKMRTYLSGMPECKLGLNDRVLLEAQGRATKGKAIDLDDIKFHQCVRLARFENDRTISFIPPDGSFDLMTYRLSTQVKPLIWVEAQIEKHSRSRIELMVKARSQFKERSTATNVEIEVPVPSDATNPNIRTSMGSAAYAPERDAMVWKIKSFPGGKQPIL

SEQ ID NO: 227232 - protein, 129 aa, Zea Mays
MATLRSCPPPPDLTTFELIWSGKVPFLPSGFLATKLKVAFCLRSHHSHFILCVLLSAPGRQWACCSASRTCTGSRCAPRGWTAATSSAVPPRDRSCPTTSACSGRCRTCASRISRSACSASSPSCTLRR

SEQ ID NO: 227233 - protein, 505 aa, Zea Mays
MALVGVVGIGITKRPSQQCLDAVESAARRAEAEEGTVEQNTPPWMATKKVTALAAICLVALPILMVTTVSRRDVPRTPASFWPLATLARQACRRPARAGVRRAVVPQPLPVRVLPQEPGAVAVRAPHQAAAPARGAAAPVRPGHRGVQGRGGAAQIVVAPQWQQRRQRHPRRLQVPGAGAVPGAREQDPGRGVGVPLRRARRPRPAPRRRDVAGRRLLRAVPGDVVAAAAAVPDRRPPEPDGRRAGELREPGAAERQRGGGGGVRAPVRVRGPRPLVHVPRQALLLRRRRAAVPPARGVAGDEDGRVLRAGAVPEPGVPGRARRDVPSEGLGVLPPGALPVPPDERGLGAGDEVPQVVPEGLGRKAGHPGEGVRRRRPVPAHPGPDPRLHFAGTPAPRRGGDARAVGGPRRAVQGRPDDRPQLVVLREDTVEVLAVGDGHRRGRERVPAEPRGAPALRLHDARHEGGGGDVPAGHDRQDRHQRLVDVRLRRARPRRAHAVDHVQA

SEQ ID NO: 227234 - protein, 747 aa, Zea Mays
MVHEGQLKNTEPDIGVNMGDDELIYLPDIEEYDMDALMGDEDQLNTDQAIFCEEHNLDKVSSSKRPKRFTVQQLQQLESSFQKCSHPDDEMRQELAAKVGISARQVKFWFQNRRSQIKVRSCGTENNKYRRQNAELLATNMELKEQLKGMTCSRCDAPTIMQKWQLMDENAKLREMYSLASAELTKLMQEANLPPSVILEDMALVTSMNPLSSNASSSRSTINQDELLSYVECAIKEFEMLVRDGTPLWLPTIGGDVLNSKEYACQRFPRLHGTIRPEGFVVEATRDTAIVKGSAPDIVDILTDVPRWYKAFPCIVAALRAYHVIFSGPFASGNVLIQEINVDLSVESPRPPLRNMKFLRITKQNANGDFVVVDVSINDVQGIHEQQGSQHKHTMLPSGCLIKDKGDGYCQVTWIVHAEYEEASVPPLFRQFYQSGLAFGASRWLASLQRHCEYMVVKHSIQVPTGCVSGSGVLTLSALGRWNLLELAQRMMAIFYKTTSGLPTVEPGNIVTRWGRGCMGTTGEMLEPAVRMVLGNYFGAMDGQPSPLQVLSATTTVWLPGTPPESVFNYLCNGQRRGEWDAFVCAGAVQELSSVATCPHLHGNAVSVLCPNVTNAANNAMLFLQQTSIDVSRALVVYSVVEETMLRSVLDVSDDTSNLVLLPSGFAILPDGHGRAHHAAASNSSSALAGLNGTAGCLLTAAYQVPVPFNNLRHPDVQETYENAGKRICHAIKKIMDAVGAPIVVPI

SEQ ID NO: 227235 - protein, 106 aa, Zea Mays
MASSRVIPSSSPSHTASDLARLAQAASRPGGGGSGPGSMNVEELLRGIYSDMPTPAPPASEPGRPMPPAPAPVSATRKTAEEVWKEITGGGDAGGLPGQGERGEGG

SEQ ID NO: 227236 - protein, 180 aa, Zea Mays
MVAPPGSLPARAPCSPWLSASPTSSSSREHGLPPLMRSGAELLLQHRPRGLPCTNSGRAPVLMKVVFPTRPPSVPCSLCDALLCVVLARSGLASSICATPVRLSVPPPSISSMHEQQQPRASSASCHRPARWNAAASSTRSAALARYRRNPRNRVGPQQHVVDLQSLALWSTLDDDGEGR

SEQ ID NO: 227237 - protein, 237 aa, Zea Mays
MAMQATRRLASLSLQRRLLLLSQTEAPSIPTAAAAAFLHSHATSFGYKQIREEDKSKLVGNVFSSVASSYDLMNDLMSVGLHRLWKDRLISKLNPFPAMKHLDVAGGTGDVAFRVLERIKSVSHRAMQGTLTETEEDTHIYVCDINPNMLNVGKKRAAERGYSEEHCLSWIQGDAEALSFEDGSMDGYTIAFGIRNVTHIEKALSEAYRVLKRGGRFLCLELSHVDVPVFKEIAGCW

SEQ ID NO: 227238 - protein, 2019 aa, Zea Mays
MPLFISDEELRLLGGDTAAVAERADAAIRELRRQVDTVRAEADAAAIAAEQTCALLEQRYASLSAEFDRSKAEAAELTASAERRAAELASSQAEIHQLRIQAIAKDGEVERLKIEISELHKSKCQSLELIEQRDAEIKEKDGIIQSYYNKIVNLAETSAGKEARIQEVEAKFTHCQAICNRMTQEKELLEKHNVWLDEELKAKVKNLAELRKTNMDEEARLSASIAELEREISESSSSLRRSKERISELEQRVSYMEKELRSTKDTAAANEQRLGAELSTVKKLAELHQESSEEWSKKAGELEGVIKALETHLTQVEDEYKEKLEKETLSRRDLEKEAVNLKQKLEKCEFDLENTRKSSELSLVPLTSIAAGSSDVVDTTVQGLPISDAVNQNDLMVIPKVPSGVSGTALAASLLRDGWSLAKIYEKYQEATDAFLHERRGRRHAEAVLERVLHEIEEKAELILDERAEHERMVEAYAMMDQKLQQALLEHDNFENNVRNLKSELKRRERDHSVAQKEIDDLQKQVAVLLKECQDIQLRCGSSLPNVGYVASSSLVNVLSNVEHDIKDNMSFKDINGLVQQNVQLRNQIHMLSADLDKKDMELRESFQIELKKITDAAASRVEKVMKKSEEQAIMIESLHRSVAMYRKLCEEQQKARSNVESAPTTLQDSSRTDLMVLFEGSQEVSKKAYEQVSERARSLDEELTKLRTELESLRSERDKAVLEADFARDRLNGFAAELEHQRKESNSASLRNAELTRLVVDYERRLREDLDSKQALEENLRKLSMEVSTLKNAKESLEKSERRALDEVRDLTERVHRLQATIDTIHTTEEVQENARSMERRNHEEHIKRLERDWAELNKELQEQRDHVRVLSLDKKNVFDSCMKQVEDMRKELNNSWKAVSDAEARAAIAEAKCSDLEAKVKSRKAISRDGCHEISAASEENDELFQLKEELEKYKEEAQANKNYMVQYKEIAHSNEVALKQLESAHQDYKAETEVGRKALEDEIVNLRDKLSEMEKSYVIKCEEAANAIESKEKHITSLMNEISVLRTEVSQKLPQLEKLEIELALSKSSLDEQYKRWRTAQDNYERQVILQSETIQELTNTSKQLSSLQHEITVLRQTADALKNENECLRSSAEQEKIGLLKEKDDALQKYNELNDQNRILHNQLEALHIRLAEKERNIAGLSSHRTDNSHAEDDLQSVISYLRRSKEIAETEISLLKQEKSRLQIELESSLKSAKEAQDLLRSQADSARALMFKDEEFKSLQIQVREINLLRESNIQLREENRHNFEECQKFREEAQKAKMESERLQNLLLEKEVDAEMCKRELEMQKAEIANLNQSISELIENSKGIDLNTYEAMKNELQNIKSTLRENSMELESAKILLSEKEVAIKILEDKLSLCQSELDSKEKKLNDVEASLKSEIDKHKKINLNLKRKHDNLMKEKGEIAKENQSLVKQMEDLKSTAQKTTSETTLEQAIKEKDFRIQTLERTLEKERDDNKKEKAKSRRNENTIFGALQKVQQDKKQVEESIDKHKQAVRELIENYPGLSSEVPPISALEEQLLSYFRAAKDMEESSSPFRDGAATQTPVVETAPVDAPTSAGVAGRPVDTSSRPAKAKMTEERAVPKPSSEVRRPGGRRPLVRPTLERTEEPHADTDISAVDASTVQDKGGPPAEQETSGILPVLQPLSRKRLITSSQTVDSASQGEANDVNPPSKKPKEEESSQGTSELKSGQPPLGDVAAQVNVLPATDDLDGQQPTEEIDTDQAPEPMVEVEATREEDGGDKDDSGDASTDIKGQDADANIDANAIPLEEEHVVAKSEAIIESFDDDRKTEDSKEDAQRTTATDVDDDMEEGELAEEPEDKSDVDMSEIEGEATAERAAVEPDQSPITQPGAADASPSRTADASPAREPSPSPVQAGASSRPQNTSTATEAREPSSNPAQAGASSEQRNTSTVVEAAETRSRTINLSERARQNRQTRFQRAQQPGTARGRGQQSVTLRVWFLYSCSFQLGAYIQH

SEQ ID NO: 227239 - protein, 123 aa, Zea Mays
MVHLGNRRETRLLGILSFIHSTVWKVLFGKVADSLEKGTEHEDEYMISEKELLVNRFISVPKDMGAFNCGAFVAGIVKGVLDNAGFPAVVTAHFVPIEGQQRPRTTILIKFAEEVLHREARLG

SEQ ID NO: 227240 - protein, 866 aa, Zea Mays
MDEENVVELLQRYRRDRQVLLNYILSGNLIKKVAMPPGAISLDDVDIDQVSVDYVLNCAKKGEPLDLGDAIRLFHDSLDYPYVNNTGAVDEFYLLTKPEYSGPAPTREPPPIPATAPSSVVIPPPDVEPAPIIVSSPVTATNLPKSQPFDSPTEKELTIDDIEDFEDDEDEFDGRRASRRHQTDASDLSLLLPSFETGITDNDLREAAYEILVAAAGASGGLIVPQKEKKKEKRHRLMRKLGRSKSESVDINTQRQPGLVGLLETMRAQLEITESMDIRTRQGLLNAMVGKVGKRMDNLLIPLELLCCISRTEFSDMKAYLRWQKRQLNMLEEGLINHPVVGFGELGRKVNEIRSLFRKIEESESLPPSAAEVQRTECLRSLREVATSLSERPARGDLTGEVCHWADGYHLNVALYEKMLGSVFDILDEGKLTEEAEEILELLRSTWRTLGITETVHDTCYAWVLFRQFVLTGEQGLLKVVIDNLRKIPLKEQRGPQERLHLKSLRSSVDAEGSYQDFTFFQSFLSPIQKWTDKKLNDYHLHFSEGSSLMADVVTVAMLTRRILGEENDKVAESPDRDQIDRYITSSVKNTFLKMAHSVEFKADTTNEHVLASLAEETKKLLKKDTAIFTPVLTKWHPQAAVVSASLIHKLYGNKLRPFLEHAEHLTEDVVSVFPAADALEQYVMSVMASVTGDDGLDSLCRHKLVPYQIESKSGTLVLRWVNGQLERIETWVKRAADQEVWDPISPQQRHGNSIVEVYRIIEETADQFFAFKVPMRDGELNSLCRGLDKAFQVYTQLVTAPLVDKEDLAPPIPVLTRYKKELGIKAFVKKEVQEVRTVDERKASEITQLTMPKLCVRLNSLYPVE

SEQ ID NO: 227241 - protein, 930 aa, Zea Mays
MDEENVVELLQRYRRDRQVLLNYILSGNLIKKVAMPPGAISLDDVDIDQVSVDYVLNCAKKGEPLDLGDAIRLFHDSLDYPYVNNTGAVDEFYLLTKPEYSGPAPTREPPPIPATAPSSVVIPPPDVEPAPIIVSSPVTATNLPKSQPFDSPTEKELTIDDIEDFEDDEDEFDGRRASRRHQTDASDLSLLLPSFETGITDNDLREAAYEILVAAAGASGGLIVPQKEKKKEKRHRLMRKLGRSKSESVDINTQRQPGLVGLLETMRAQLEITESMDIRTRQGLLNAMVGKVGKRMDNLLIPLELLCCISRTEFSDMKAYLRWQKRQLNMLEEGLINHPVVGFGELGRKVNEIRSLFRKIEESESLPPSAAEVQRTECLRSLREVATSLSERPARGDLTGEVCHWADGYHLNVALYEKMLGSVFDILDEGKLTEEAEEILELLRSTWRTLGITETVHDTCYAWVLFRQFVLTGEQGLLKVVIDNLRKIPLKEQRGPQERLHLKSLRSSVDAEGSYQDFTFFQSFLSPIQKWTDKKLNDYHLHFSEGSSLMADVVTVAMLTRRILGEENDKVAESPDRDQIDRYITSSVKNTFLKMAHSVEFKADTTNEHVLASLAEETKKLLKKDTAIFTPVLTKWHPQAAVVSASLIHKLYGNKLRPFLEHAEHLTEDVVSVFPAADALEQYVMSVMASVTGDDGLDSLCRHKLVPYQIESKSGTLVLRWVNGQLERIETWVKRAADQEVWDPISPQQRHGNSIVEVYRIIEETADQFFAFKVPMRDGELNSLCRGLDKAFQVYTQLVTAPLVDKEDLAPPIPVLTRYKKELGIKAFVKKEVQEVRTVDERKASEITQLTMPKLCVRLNSLYYGISQLSKLEDSINERWARKKSENTNIRRKSEKSKSAVPNQKNQFDGSRKEINTAIDRLCEFTAAIC

SEQ ID NO: 227242 - protein, 223 aa, Zea Mays
MRKTLVYYKGRAPNGHKSDWIMHEYRLETNENGPPQEEGWVVCRVFKKRLPTTRRESDHDAPCWYVDEDGTFMHDLNSPMGGLPPHHSIAQLHEQHLQMLNNSYKRRELKLQFQMPSHHILNAAAAIPHELEPPSFHSLLVSPDHHQAAKAHHRAVQLMDEHAADQVTDWRVLDKFVASQLSHDDAAKGVDYTDEGDILQINEKQATEYASTSTSSSQVDPWK

SEQ ID NO: 227243 - protein, 208 aa, Zea Mays
MRIRTSVHTAAFCQPRPATRSRPTPQPAAALATARIRGFHPEISVAIASRNRHNPPNLALPCALRPPHFTQPISAPCAVFVREVGADDGGGGADSDFCGGQVGDTGDARRGASGGSRVPRLAARVRGPPRVLGLLPLRAVERAVEPGTPQPQPEQPCEIGARTIALFAMEPPRRRLSPARAIPSRRLSAPDTTSAVMGNLQGLNGATV

SEQ ID NO: 227244 - protein, 124 aa, Zea Mays
MRKKLDTRFPAPRIKKIMQTDEDVGKIAQAVPVLVSKALELFLQDLCDRTYDITIRKGVKTVGSSHLKQCIQTYNVYDFLREVVSKVPDIGPSDVIADDKLGKRRKAEEDGSEEELKRTRNKIW

SEQ ID NO: 227245 - protein, 218 aa, Zea Mays
MEQSLKETINHIQIHKGNFGKQHLIGLQYAATQFQTDMQLPLGLPGESGPSSWFQNGGADGQQAMMLTDESGLLHQRDIAQGYPSYFSTVKQDPDTGGSSSDHGQVVLHHPQPPDFSQTECLTSLHLPSQQFPYPPFDHHGLYSDRIFRPDAVELHAGGVASMDFLSGQYDLPRPGDDASFHNWASAAACSATMFDQQQQQQHQHHQQPQSSPAQQQL

SEQ ID NO: 227246 - protein, 244 aa, Zea Mays
MEQSLKETINHIQIHKGNFGKQHLIGLQYAATQFQTDMQLPLGLPGESGPSSWFQNGGADGQQAMMLTDESGLLHQRDIAQGYPSYFSTVKQDPDTGGSSSDHGQVVLHHPQPPDFSQTECLTSLHLPSQQFPYPPFDHHGLYSDRIFRPDAVELHAGGVASMDFLSGQYDLPRPGDDASFHNWASAAACSATMFDQQQQQQHQHHQQPQSSPAQLPAATTLATASFDHAVYHSSSQHQQVMIG

SEQ ID NO: 227247 - protein, 386 aa, Zea Mays
MQSNCLALDAAPRKKTTRWACDPDTAVAIGVISALTLLVVVLAMGRVKLKIKRLENNSGRQVTYSKRRSGILKKAKELSILCDIDLMLIMFSPTDKPTICIGDRSTLEEVVAKYTQLTPQERAKRKLESLEALKKTFKKLDHDVNIQDFLGSRVQTVEGNFGKQHLIGLQYAATQFQTDMQLPLGLPGESGPSSWFQNGGADGQQAMMLTDESGLLHQRDIAQGYPSYFSTVKQDPDTGGSSSDHGQVVLHHPQPPDFSQTECLTSLHLPSQQFPYPPFDHHGLYSDRIFRPDAVELHAGGVASMDFLSGQYDLPRPGDDASFHNWASAAACSATMFDQQQQQQHQHHQQPQSSPAQLPAATTLATASFDHAVYHSSSQHQQVMIG

SEQ ID NO: 227248 - protein, 244 aa, Zea Mays
MTSKFGLAGGIPERRVRPIWDAVDSRQYKPALKLCTALLAKHPTSPYALALKALILERMGKPDEALSGALNAKELLYSDNIFHFDDLTLSTLQIVFQRLDRLDLATSCYEYACTKYPSNLELMMGLFNCYVREYSYVKQQQTALKMYKTVGEERFLLWAVCSIQLQVHFSSGGVKLLALAEALLKKHINSHSLHEPEALSLYVSILEQEKKYDTALEVLSGDLGSLLGREEDKLRLQNISSCNQ

SEQ ID NO: 227249 - protein, 725 aa, Zea Mays
MSDIAPSPSSSPSSGGNGGGNNSTAPAPRGSSSSSSPPKPRNGWPSSSPPPTPSSDSEGSRSTPPSDWQDPSSSSSSPPPSRSSPPPPSSQPPPSPPPSPSSWSGGGNSTSSSPPTPPSQPSPPPSGRSSSPPQRSSEGSSPSPQSSSSNQAPPAPSGWSPSPSRESPPQSSSQSPPPQSDVDQPNSQPSNTPQSPPPPPSPPSSSPPAPPTNQSVVIIPVPVPSNNSPPGALPPPGLVPTAPGATVMSSTSVPGSAASSSSQEASTGASNGGGGSTSTRVVGSSHVAAAIAGAAITGLMFALLAVFLVSKRRKKKTDGSNYNMASGQFMGSNNPSYTQPAAGESADMGGGGGYYHYQNQSGSMDAAAAPGSMASFSYEELTSITSNFSRDNVIGEGGFGCVYKGWLGDGKCVAVKQLKAGSGQGEREFQAEVEIISRVHHRHLVSLVGYCVAQHHRMLIYEFVPNGTLEHHLHGRGMPVMDWPTRLKIAIGAAKGLAYLHEDCHPRIIHRDIKSANILLDYSFQAQVADFGLAKLTNDTNTHVSTRIMGTFGYLAPEYASSGKLTDRSDVFSFGVVLLELITGRKPVDQARQGEESLVEWARPVLVDAIETGDLGAVVDPRLVDGGAAYDRGQMMVMVEAASACVRHSAPKRPRMVQVMRALDDEGGMSDLSNGVKVGQSRNFDSGHQQAAAIQQLRATAFASEEYTGEFEQSSGMDYLKSGVP

SEQ ID NO: 227250 - protein, 1012 aa, Zea Mays
MARAEANWERLVRAALRGERLGSAYGQPVTGIAGNVPSSLGNNVHIEEVLRAADEIQDEDPTIARILCEHGYTLAQSLDPNSEGRGVLQFKTGLMSVIRQKLAKRGGAAIDRSQDIAKLQEFYKLYREKHKVDELIEDEMKLRESAVFSGNLGELERKTRKRKKVLATLKVLWSVIEDMTKDISPEDANKLISEEMKRVMQKDAARTEDVVPYNIIPLDSLTSTTNAIVNFPEVRAAISTLQYYTDLPRLPGTFSVPDARNSDILDLLQCVFGFQGDNVKNQREHIIHLLANEQSRVGKLSGNEPKIDEGAVHAVFSKALDNYIKWCNYLPLRPVWDNNDSLTKEKKLLYVCLYYLMWGEAANVRFIPEGLCYIFHHLARELGVILQKQTAEPAESCNSGGGVSFLDNVIYPFYEIIAAEAANNKNGRAPHSEWRNYDDFNEFFWSHKCFHLRWPWNLSDPFFSKPSRKYKGLLSRNHHYGKTSFVEHRTFLHLYHSFHRLWMFLIMMFQGLTIIAFNDGSFDRKTILQLLSLGPTYVVMKFIESLLDILMMYGAYSTSRGSAITRVAWRFCWFTIASVAICYLYIKTLQDGTESATFKIYVFVISAYVGIKIIFSLLMSVPCCHGLAEACYRWSAVRLVKWMHQENNYVGRGMHESPLDYIKYATFWIAILGAKFSFTYFLQIKPLVEPTRTIINFTGLQYAWHDFFSKNNHNALTILSLWAPVLSIYLLDIHVFYTVLSAIYGFLLGARDRLGEISTVEAVHRFFEKFPGAFMHRLHVEVPKRKQLLSSGQEIELNKFDASRFSPFWNEIVRNLREEDYINNFELELLLMPKNDVGVLPIVQWPVFLLASKVFLAKEIAEDCKDSQEELWLRISKDEYMQYAVVESFHSIYHILTSILEKEGRLWVERIYGGIRDSISKRTIQSDLHFKKLLNVIAKLVAVLGILRGTTESSDLKKGLVNAIQDLYDVVHHEAFSVDMSGHIEDWDQINLARAEGRLFNKLKWPNDPKLT

SEQ ID NO: 227251 - protein, 108 aa, Zea Mays
MTSEAQSVSAIHEAREGEGSKSRKRKQSHVGAALEDYVEFKKSQTNKTLDALKELSMRKCMKEMEAMDGFTDEEKSYDVEVFESEINREAFMSTMNHNVRRMWLKRKI

SEQ ID NO: 227252 - protein, 108 aa, Zea Mays; identical to SEQ ID NO: 227251

SEQ ID NO: 227253 - protein, 110 aa, Zea Mays
MSVSSLTLFIFCSKNRGGIRAAYFVSRLICRAPDLVSVNAAGNLLPPESLEVICNSLKQGTCNLERVDLTGNMHLSSNIFPAFLEFKKHGKPILVVPPNLSTSAPYDDDP

SEQ ID NO: 227254 - protein, 399 aa, Zea Mays
MIWFVCRFDRRKQKKITDFRQHHLEFIEEWDLAEENVHENDELHNNSDYRRYQAWYQGATHCKLRQQWTSDDYADIDSSDDEDTEYDQTTRLGTQVEAAPILDRVGNTLRRSVQDIDRQLLIVGDHNMRSFLERLSRRLRGAAARCGCRTNVAHYVHVPLYSHTTMPSIRLDVGLDYDQNEIRPSQILKFLGGKALGGKALYYYIYACAKQGRAEISRMIWKPPPSNESITNGHLETPTPSCTEVAQNDAARVPRGAHTKAVTDGEGRHEEVKPELDGTRRQSLRMRRRSLSDVTARSGEQQAWWRWRRQDEEKRESAREDAKAARRRQEHVVASGVRRVRMHSSTSSAVRFRHEEGSRLYRKLLQQSTVLLKPPLILDTKKKWSGHVDFLCLFRIDKW

SEQ ID NO: 227255 - protein, 244 aa, Zea Mays
MIWFVCRFDRRKQKKITDFRQHHLEFIEEWDLAEENVHENDELHNNSDYRRYQAWYQGATHCKLRQQWTSDDYADIDSSDDEDTEYDQTTRLGTQVEAAPILDRVGNTLRRSVQDIDRQLLIVGDHNMRSFLERLSRRLRGAAARCGCRTNVAHYVHVPLYSHTTMPSIRLDVGLDYDQNEIRPSQVQGPCQKAIRWYLNGPRRLSKKNLCVISGYRAAPREIYSLATACQVAGNVHGLIKKYE

SEQ ID NO: 227256 - protein, 79 aa, Zea Mays
MSAAAGGLRRLLAAAATAGAAEVRASIFGHALNPTGRRAATKLLRKKMVGDQVAQWYPYDIKRDDPLVMAREEKDAPSR

SEQ ID NO: 227257 - protein, 236 aa, Zea Mays
MIHDEVPLSGGCSAFSVGDILEMDVEISKLPEFSLVESGPLILAWAVFLCLVLSLPESNTNLGPVSGYRGILRTFISAFIASYEVSYQKEHSSFDMISSILCEVYDGEESLCMQFWDKDSFVDGPIRSVLHMLEEEYPFQISELIRFLSAVCHGTWPANCVYNYLERMNGVTTIYTIPCVADGVGYGHQIESHHPVSIPSIEGITIPQGTHGYILKVLQEDTTLVRWEDGLSFESW

SEQ ID NO: 227258 - protein, 245 aa, Zea Mays
MFRRKHGADVNSDDAEQREAKISELKAALGTLSARGEKYCSEACLRRYLEARNWNVAKSRKMLEESLKWRAAYKPEDIRWPDVSVEAETGKMYRASFRDREGRTVVVMKPTKQNTSSHEGQIRFLVYTLENAIFSLPEGQEKMVIKIFLDPKSVEKVNFVYQKDEESMKVMYKYIDPEVLPVEFGGKSNVVYNHEEYSELMIQDDIKTASFWAVDAKTNHANPAINGTLVPEVAPQSSSLAAKAS

SEQ ID NO: 227259 - protein, 177 aa, Zea Mays
MQENMSARTLTLSSSTQQTIVRFVKLPLVDKITAWIFLEKLLRYSATTARAKVLKEVRNIAVTISMEKGAMARGKKENLMLPGSSIKKVPWWGGGGDGQTISEAGREVKEIEELEEKASFFRSWHVSWRGNSTFACLAYMSYMRVAIRFAYGCWPTRMVVWPVTDWKAATDSSFSQE

SEQ ID NO: 227260 - protein, 797 aa, Zea Mays
MKSPPVMDPEAPPSPPLPGTPPDDEEEKRGGRNGVPWRMTLSLAYQSLGVVYGDLSTSPLYVYKAAFAEDIQHTESNEEILGVLSFVFWTLTLVPLLKYVCVVLRADDHGEGGTFALYSLLCRHARAALLPPGRTAAGDEDQFLDGADGGTKKATAQNGNAVTLGGGAAASVRRLLERHKVLQRVLLVLALVGTCMVIGDGVLTPAISVFSAVSGLELSMEKEHHKYVELPIACIILVCLFALQHYGTHRVGFIFAPVVVTWLLCISVIGVYNIIHWEPTVYRALSPYYMYKFLRKTQRGGWMSLGGILLCVTGSEAMFADLGHFNQLSIQIAFTCMVYPALILAYMGQAAYLCKHHTMESDYRIGFYVSVPVVGSQAVITGTFSMIKQCTSLGCFPRVKIIHTSAKVHGQIYIPEINWILMILCLAVTIGFRNTKHLGNASGLAVITVMLVTTCLMSLVIVLCWHKSIFLAIGFIVFFGTIEALYFSAALIKFREGAWVPIVLAFIFILIMCIWHYGTIKRYEFDVQSKVSINWLLGLSPNLGIVRVRGIGLIHTELETGVPAIFSHFVTNLPAFHQVLIFMCIKNVPIPHVRPEERFLVGRIGPKQYRMYRCIVRYGYHDFHKDDIEFEKELVCSVAEFIRSGSSKLNGMPEEFDEEEQRMAVVRSNSIRMLEEEATVEKTVGPSQASREIRSPSPTPPPVVGPKKRVRFVLPAASPKPNAGVQEELQELSDAREAGMAFILGHSHVKAKSGSSFLRRFVINFCYDFLRRNSRGPNYAVSIPHASTLEVGMMYYI

SEQ ID NO: 227261 - protein, 906 aa, Zea Mays
MALFDRNQRQRSSFCSTATFVVFVALCLLGMWMISSPENVPSAISLSSEKVVKSDVKEEDSSIDATNTVKQDSANVVSEATTDGGAATESAEDVDLPGKPGGGGASEGDGGKASSKDQSFDDENGRTESGELVKPGAGETDAVAGQEQDKGTGEDPVLENDAKVDAAGKEQTPIDTKDASGLDQSVEQTVTDTKASASEQAAATGLDKVSSAEAGGGTPKKLTFDDENGKMDGVDLVKDDGNKTRISEESAKVEGAALTVKPSAKAATATATDAEKQEEASAVATDAEKQEEASAVATDASTTASTTTSEDERKQDGVEQQLPATEAQPNVQAELLTERAAQNGSFTTQAAESTEEKKNRAEKKGKKGKKKAAGVAAVAWKLCNSSAGADYIPCLDNVAAIKKLKTDKHYEHRERHCPEVAPTCLVPAPPEYREPIRWPHSRDKIWYYNVPHTKLAEYKGHQNWVKVSGEYLTFPGGGTQFKHGALHYIELIQNSFPDVAWGRQSRVVLDVGCGVASFGGYLFDRDTLTMSLAPKDEHEAQVQFALERGIPAISAVMGTQRLPFPANVFDVVHCARCRVPWHIDGGMLLLELNRLLRPGGFFVWSATPVYQKLPEDVEIWDEMVKLTKAMCWELVAKTRDTVDLVGLVIFQKPIDNVCYDRRPEKEPALCEPSDDPNAAWNIKFRACMHRVPEDQSVRGARWPVLWPARLRKAPYWLDRSQVGVYGKPAPDDFAADLQHWKKVVRSSYLAGMGIDWKTIRNVMDMRAVYGGFAAALRDMKVWVMNVVTIDSPDTLPVIYERGLFGIYHDWCESFSTYPRSYDLLHADHLFSKLKPRCKVLPVIVEVDRILRPNGKLIVRDDKETVDEIQGVVRSLQWEVRMTVSKNKQAMLCARKTTWRPTEIETR

SEQ ID NO: 227262 - protein, 906 aa, Zea Mays; identical to SEQ ID NO: 227261

SEQ ID NO: 227263 - protein, 1072 aa, Zea Mays
MQAVLLCKRASKPSDPSDYDPTTDTTMKVTPWNTKRLQEAIRNGADIHPGATHYRDNNSMYKLQAVPAKRRSIAKMLPASRGSICQPGRDPNCEFESKVVYRHLQDGDIVLVNRQPTLHKPSMMAHFVRVLPGEKTLRMHYANCSTYNADFDGDEMNVHVPQDEISRAEAMNIVDANKQYIGPRSGDAVRGLIQDHIVGAVLLTKPDTLLSREEYSQLVFGSCVPSSNCGSHHPAKVSAIEDYDTLELVHPAIWKPRPLWTGKQVITTILNHLTKGCPPFTVEQKGKIPKEYLKEDPSAQKEKEDPSARKEAHSAKKGKREDPSAQKEKDSSVNKEKQEKIQKQKQKDRSELVLYIHNNELIKGIIDKAQFGKYGIVHTVHELYGAYTAGILLSTFSRLFTLFLQLHGFTCGVDDLLLLPEKDKLRSKILSGSEVRSNEVHWKFTGADEDHKGDLVKLHMEVEKAVRSNGESDTATLDNDMKNALNGITTDVNKILFPDGLQKPFPGNCLSLMTTTGAKGGPVNMNQISSLLGQQELEGKRVPRMVSGKTLPCFPPWDISSRAGGFISDRFLTGLRPQEYYFHCMAGREGLVDTAVKTSRSGYLQRCLIKCLESLKVSYDHTVRDADGSIVQFCYGEDGVDVLKTSFLNEFKELADNRKAVLAKLGGCSKDPTLSKCNGYITELPPKLIDKAEEFLKHSKECCRYNIEAKELKELLKVKFLSSLVDPGEAVGVVAAQSIGEPSTQMTLNTFHLAGRGDMNVTLGIPRLKEILMTASDNIRTPVMKCPLLEHISEDDAKMVVAKLRRVRVADVVEKIEVCTVPFYNSNGRVSTLYKLQMKLYPQDQLESGLTIDECQATLRTVFVEAMEHAIEKHLDLLYKINEIRAVKIEDTEGSLLNGDEESQSRHADGGDTGTSDDDDQNDNDVDLGTDAEKMKRQEKDEMEYDDDTETEEGMGSESEESDEDPAESGDDSQEADKEHTISKSETTSVDDLPYSVKKGKKSKDDRGTAKLEEKNQNEGRLDDQKQGQIKKRRKKLKHTIHVESSDLDFEIHYAFHDEPHILLAQRPFHYR

SEQ ID NO: 227264 - protein, 143 aa, Zea Mays
MANEEYQERREESSEDMKKTRKNFMHALKCLVVESEQGADGCDRAVGSLGLRLRAIRGDVQGVSTPQAEELFVEVVALEGKAFDTRCALMKVWSELLCALWDSSSVAKTLLLLTISTKSYELGYLDCLEQMIVHERTITRWIP

SEQ ID NO: 227265 - protein, 988 aa, Zea Mays
MRPRPSRFLQLLLVVVIACAVPGVRCSDRRFPHLDRVRELQRREGSSSAEQEAAARGLLARLLPSHSTSFEFRVISTSTELCGGKTCFVINNHPLFDGEGTPEILILGASGVEISAGFHWYLKHYCAAHISWDKTGGAQLSTIPRPGSLPRVPDGGVLIQRPIDWSYYQNAVTSSYSFAWWDWDRWEKEIDWMALQGINLPLAFTGQESIWQRIFERYNISKSDLDDFFGGPAFLAWSRMANMHGWGGPLPQTWLDDQLVLQKKILSRMYSFGMFPVLPAFSGNIPAALKSKFPSAKVTHLGNWFTVDSNPRWCCTYLLDASDPLFVEIGKMFIEEQIREYGRTSHIYNCDTFDENTPPLSDPNYISSLGAATFRGMQSGDNDAIWLMQGWLFTYDPFWEPPQMKALLHSVPVGKMIVLDLYAEVKPVWINSDQLYGVPYIWCMLHNFAADFEMYGVLDALASGPIDARLSDNSTMVGVGMSMEGIEQNPIVYDLMSEMAFHHRQVDLQVWVKTYPTRRYGKPVKGLQDAWWILYRTLYNCTDGKNDKNRDVIVAFPDVEPFVIATPGLHVNTRQMYSTVPSKNYIRKDVSSDAYEHPHLWYDTNAVIHALELFLQHGDEVSDSNTFRYDLVDLTRQVLAKYANDVFLKIIESYKSNNMNQVTILCQHFLSLVNDLDTLLSSHEGFLLGPWLESAKGLARNSEQEIQYEWNARTQITMWFDNTETKASLLRDYANKYWSGLLQDYYGPRAAIYFKHLLLSMENNAPFALKEWRREWISLTNNWQSDRKVFSTTATGDPLNISQSLYTKYLSNADLLGLVEVGWGSFQLGYSGNADLEPGRCRRTDGKKWRCSRDAVADQKYCERHMNRGRHRSRKHVEGQPGHAAKAMSAVAVAAAVAALAGAEATAAAGLAVNQHRQPGKSYATVIGKSGANVRRVEQQTGARIKVQEIDKDASGERLIIVSSNEIPTEPISPTIEALILLHDKVGR

SEQ ID NO: 227266 - protein, 235 aa, Zea Mays
MAVKWEDRSIEVREGSWSYIASTSSVGYAPEKIVGTGTVMKDHQENKVVWSLSTGDTLTIRLGDELSFQLKNDSSEEEARLLVGRRLSYRVNTDNASSNLVEEEQYLTLVRKSPYHHGDRATVLLNWKLLAVEFLPEEDAVFVLLLCMVIARTMTEIRREDVAGLLVRRRISEARAGQRDWGSVMLPGSLSPDPHLQPWYRNATQVLSSAETGPVLTKYSPADGKDMLYRQALIP

SEQ ID NO: 227267 - protein, 1175 aa, Zea Mays
MHCIAPRLLLLPLPTVSRHALSPTQTPPLPPLLPSRACKFHLASARSPSRAAASVSGDDEDEEVDVDDDEDDETTIRNVDDEYDDDFEDGDEGDEGDEEAVDEESGGEYEEEAGEDEDKREDTAARRRDSEEYKSRRVAKLVAEVREFGEDVIDYNELAGIYDFPIDKFQRLAIQAFLRGSSVVVSAPTSSGKTLIAEAAAVATVARGRRLFYTTPLKALSNQKFRDFRNTFGDHNVGLLTGDSAINKDAQILIMTTEILRNMLYQSVGMTASEGRLFQVDVIVLDEVHYLSDISRGTVWEETVIYCPKEVQLICLSATVANPDELAGWISQIHGKTELVTSNKRPVPLTWHFSKKYSLQPLLDGKGKKMNRKLRMSNSQNLASPKSEFYYVKGKRRFRTNKIEQGNSRPLDISKQVQLSKHELSNMRRSQVPLIRDTLSQLWENGMLPAIWFIFSRRGCDAAVEYLEDCRLLHDCEASEVELELRRFKMQYPDAIRESAVKGLMRGVAAHHAGCLPLWKSFIEELFQRGLVKVVFATETLAAGINMPARTAVISSLSKRIDAGRQLLTPNELFQMAGRAGRRGIDTVGHAVLVQTPYEGPEECCDIIFAGLEPLVSQFTASYGMVLNLLAGSKVTHKQKESDDVKDKHSGRTLEEARKLVEQSFGNYVGSNVMVAAKEETERIRQEIQYLSSEITDESIDRKCREELSEEDYAEISLLQKRLKEEKQIRNELKKKMELERMAAWKNRLEEFESGHLPFMCLQYKDKDSIQHTIPAVFIGNLNSFADQKIMNMVEDDSLVSGKPKRDSGEQLYRPSYYVALSSDNSWYLFTEKWIKTVYKTGLPAVPSVEGGTLPRETLKQLLLREELVWDKVEKSEYGSLLSMEGSLDTWSWSLNVPVLNSLSEDNEVERFSQEHQDAVECYKQQRRKVSHLKKTIKATRGFKEFQKIIDMRNFTKEKIERLEARSRRLTRRIRQIEPTGWKEFLQISKVIQEARALDINTQVIYPLGETAAAIRGENELWLAMVLRNKVLLDLKPSQLAAVCGSLVSEGIKLRPWKNSSYVYEPSSVVTGVISYLEEQRNSLIDLQERHSVKIPCEIDAQFAGMVEAWASGLTWREIMMDSAMDDGDLARLLRRSIDLLAQIPKLPDIDPVLQKNAQIACSVMDRVPISELAG

SEQ ID NO: 227268 - protein, 485 aa, Zea Mays
MPQPPEYIERGEVSEKFDIFSLGVVMIHLVSGRGGFERYACMHSEEFINQVKTNWRKRFKQLQRNSLRKVKVYCHEVETCTRIALNCVEKDTQKRPDIDMVINNLKDRKTHRFKSTWTSSFRQDGRMYGSYMPYSNRYLNKLMSGSICTETKFYRREKLPNVGEEFIIGRKEEKQKIVASLLQSMTQHITILPIYGIGGIGKTTIAKLIYYDTNFNSYSRVWVYVSPKFDLKKVGNTVISQLSSEESQINETQMIHSCLMKLLSGKKVLIVLDDLWEDSLFQLNNLKDMLSYGDSINVIVIVTTRSKHVAENVSTNVEPHKIEPLTDSMCWDIMKQRSNFEAKNHKEHLAHIGMEIAVKCGGVALAAQSLGFMLKPMELCDEWIEVRDSDIWNKSISKDANSPNHVLASLMLSCTKMDRCLILCFIYCAIFPKGHHIVKEELIQQWISLGFIQPTKLHSNMQICEKYILQLIGLSFIQDTMSPKS

SEQ ID NO: 227269 - protein, 300 aa, Zea Mays
MMVLTSVATTSFAILLLFSLPSCLHLRATPFSAEGVGACASSPYSFDTSPDTDSRSGYCTSTRTFHIMRAPSFSPSSDVPFVFPAFATFFLPNLLPPPTVATASRPTLVDAGKVKNRFRTSRGTEASAVPHSGSPPRLPERFAAQSLRIGFNPVDLSARRRHGTPEVAFDSAGAVEAGMGLGEAAGRLLAAVDWEREAYPAYDDFLALPAFVLFFPTVRFLLDRFVFKWVAMRLIHGQGHQRANNDTEEARKKIRKFKESAWKCVYFLSGELLSLSVTYNEPWFTNTRYFWVGPGEQIET

SEQ ID NO: 227270 - protein, 479 aa, Zea Mays
MSLNLYRFYRDAVVQQCTLPTYSSRIAVSAVDNIIMVHQIDAKVVMLYDVSLDSYAPVSAPLPLLLRGLPINSRQVSQTADSQSSAYGGTIYGEGWNFLIPDLICDAENGLLWKLHLDLAAIAASSSDAPSILEFLQRRKSDPSMVKTLCLAIVRTIILERRSVPTVAKAMDVVLDSYTRLMKMGGAFPGVRRIHEQNQQSGSQPIDGSHVVSQESSPGTTVSPAVNPDHGSEAVDIYVQSNPGVEHTIDRGLLNINISSDSVDNTSDAVDKRQQAVGEASRPLSSGTMTQHGQHAGTVAISPIEMFQSVFTLVEDEMMGDPAYLIAVIIEFLRSVSKAGLKAPHNLYVMTATLLARSNRYAEIALFVSNKILEPCKELAMQLMELGLQHPPTRKLGMDMLRERGLHHDYVTAMLQDGYYLEALRYARKYKPALFLEKALAKNSAHNLAAVLSFFCEFTPSFKATSDFVRYRHILSEMV

SEQ ID NO: 227271 - protein, 960 aa, Zea Mays
MFFHVICSKGFSVSYPLLPPTHQHHMWDAWDMAAEICLSKLPQLIADPNTEFQPSPFFMEQLMAFEVWLDHGSKDKKPPELLPIVLQVLLSQPHRSRVLVLLGRFLDMGPWAVDLALSVGIFPCVLKLLQSSAMDIRQNLVFIWTKILSLDKSCQVELVKDGGHAYFIKFLDSLDAFPEQRAMAAFVIAVIVDGYRMGQEACMNAGLMDVCLRHLQPENSHAQTEPLLLQWLCLCLGKLWEDFPEAQLLGLQTNGPEIVICLLSEPQPEVRAAAVFALGNLLDTTSNSHDDGSDDDEKVKAEINVVRSLLQISSDGSPLVRSEVAIALTRFALGHNKHLKSVASEYWKPQPNSLLKSLPSLANISNPSNVYSPNNILQGRIGPVLRVASDSGAAGRDGRISTSNPIATSSIMHGSPESDDSSQHSDSGILLRGNASNGGFSYTRSRPVDNVIYSQFISTMYSVSKDPDPTIATIGRRALSLIGVEQVVMKNTRFNSGGSHRGETSASNFGMARSSSWRDMKSGSILMKFMTPPVSPPQHDYLPGLRRVCSMEFGQHPINPPNGLADRLLSSAAGPSNAEPLPQSTIYNWSCVQFSRPVLTVSDDNEETNARREEREQIALDYITKCQRSSCKMTSQIASWDTKFELGTKAALLLPFSPIVVAADENEQIRVWNYDDALPVNSFQNHKLSGRGLSKLLLINELDESLLLAASSDGNVRIWKNFAQKGGEKLVTALSSVQGHRAAGRSIVIDWQQQSGYLYASGDMSSILVWDLDKEQLLSTIQSTADTAISSLSTSQVRSGHFAAGFADGSVRIYDVRSPDRFVYVARPHAPRTEKVVSIGFQPGFDPYKIVSASQAGDIQFLDVRRAAEPYLTIEAHRGSLTALVVHRYAPVVASGSAKQMIKVFSLGGEQLTIIGYLPSFMGQRIGSVNCLSFHPYKSLLAAGAGDNALVSIYAEENYK

SEQ ID NO: 227272 - protein, 208 aa, Zea Mays
MQQHDILILVDSGSSHTFVSDRLRPQLSGVQELPRTISVQVANSQVLPCRYHLPAAEWSMSDCQFVTNMKFFPLTVFYVVLGMNWIQQYSPMKVDWANKWAVIPYNGSPAYLQGVQVTLPAGAVTELLLLSVESQATPAGQSVDPKVQAVLDQFVEVFEDPVGLPPSRTCDHTIPLVPGTNVCVLPLSSKLSQCQTMLKMTTPSGAAL

SEQ ID NO: 227273 - protein, 140 aa, Zea Mays
MSSIGTGYDLSVTTFSPDGRVFQVEYATKAVDNSGTVVGIKCKDGIVLGVEKLVTSKMMLEGSNRRIHSVHRHSGLAVAGLAADGRQIVSRTKSEAASYEKNWQIVWQVMFIFARCTGGSDLLVVVLFLEVMIGMDHSFT

SEQ ID NO: 227274 - protein, 270 aa, Zea Mays
MKRSSTVFSRKKRLDRDPPWHLAHSNLIHSPLLSSSHTRICSLVSPVASAFSQTRLLPTPSALSLLCSSLTPVPSPGCTHHPPPFSSWTPPATNLLLVALVACGLPSFWAVAVCTRFLGRQSATCRPSGSTALDLGACCLSTAAPLWNTDVYLYTTTSTHACTPCSSYILTGGCTNICSISGCVQIAIYLARYACGLTAPPASKVVLPQLASVVVAWEVLGKLGYLCFSSWGLLCLGFSRSSAYSTVSWSRQWLASGSGSGIITFLQNEC

SEQ ID NO: 227275 - protein, 739 aa, Zea Mays
MASGGGGIRATTSGRMKSRGWGDSSDDFGTPAIALRRGGDCSGTASSDSSAVFFAVAFCAPSPGLSVTAAAAMVEMRQRRKPLVLASTQALLDSLPGDRPPPPPQKPVRLKAGVLRFPSGGGGAEFGELASFVGIPAPALRRLAVVTGTPVLVKNTDNNVGRIVKAVLFGNPSLDKSCSEHTDQVVSASLSGHAMGFLPCRTFPAIGFTSMDEDVGYVSPLLAFNLGLHVSCLKLLIQREGQPFKFCSRAEEIDATASSGSDLSLHLDLLPCPQVPKYALHLRVSVVRIPDCGVLASLKIYSSFGGSEYQDMVDQALNEYFKFDRFLARGDVFGIQNSWKCGSSCCLACNKQDNKLNPRNMIYFKVTGMEPSDEPILRVNCNETALVLGGAASAAIPPYSFFASSGNSVPLHSEVVEHLASVIAPALCPSDILPKIKFSTFLYGPPGCGKRTVVRHVANHLGLHVVECSCHDLMTSSESGAPAALATAFKEAQKYSPCIILLRHFDAIGNASSNEGPQSEQSGIASNIESVIKQYIGQRWVAKDSLPGKDVNGSSYLVEPECVSSLQIILVATADSSEGMQQSIRRCFRYEIDMKTMNEEQRNELISETLQGIPKVADESICDKFIKDLAAQTSGFMPRDILALVADAGVSFAHKIAAGKDSKAISKHTEVLPESSSATQNEEHHFSKEDIMSSLERAKKRNRAALGTPKVPNVKWEDVGGLEDVKKVILDTIQYFSCL

SEQ ID NO: 227276 - protein, 859 aa, Zea Mays
MASGGGGIRATTSGRMKSRGWGDSSDDFGTPAIALRRGGDCSGTASSDSSAVFFAVAFCAPSPGLSVTAAAAMVEMRQRRKPLVLASTQALLDSLPGDRPPPPPQKPVRLKAGVLRFPSGGGGAEFGELASFVGIPAPALRRLAVVTGTPVLVKNTDNNVGRIVKAVLFGNPSLDKSCSEHTDQVVSASLSGHAMGFLPCRTFPAIGFTSMDEDVGYVSPLLAFNLGLHVSCLKLLIQREGQPFKFCSRAEEIDATASSGSDLSLHLDLLPCPQVPKYALHLRVSVVRIPDCGVLASLKIYSSFGGSEYQDMVDQALNEYFKFDRFLARGDVFGIQNSWKCGSSCCLACNKQDNKLNPRNMIYFKVTGMEPSDEPILRVNCNETALVLGGAASAAIPPYSFFASSGNSVPLHSEVVEHLASVIAPALCPSDILPKIKFSTFLYGPPGCGKRTVVRHVANHLGLHVVECSCHDLMTSSESGAPAALATAFKEAQKYSPCIILLRHFDAIGNASSNEGPQSEQSGIASNIESVIKQYIGQRWVAKDSLPGKDVNGSSYLVEPECVSSLQIILVATADSSEGMQQSIRRCFRYEIDMKTMNEEQRNELISETLQGIPKVADESICDKFIKDLAAQTSGFMPRDILALVADAGVSFAHKIAAGKDSKAISKHTEVLPESSSATQNEEHHFSKEDIMSSLERAKKRNRAALGTPKVPNVKWEDVGGLEDVKKVILDTIQLPLMYKHLFSSKLRKRSGVLLYGPPGTGKTLLAKAVATECSLNFLSVKGPELINMYVGESEKNVRDIFEKARSARPCVIFFDELDSLAPARGSSADSGGVMDRVVSQVSLASSLRRCHNFSQVFC

SEQ ID NO: 227277 - protein, 1001 aa, Zea Mays
MASGGGGIRATTSGRMKSRGWGDSSDDFGTPAIALRRGGDCSGTASSDSSAVFFAVAFCAPSPGLSVTAAAAMVEMRQRRKPLVLASTQALLDSLPGDRPPPPPQKPVRLKAGVLRFPSGGGGAEFGELASFVGIPAPALRRLAVVTGTPVLVKNTDNNVGRIVKAVLFGNPSLDKSCSEHTDQVVSASLSGHAMGFLPCRTFPAIGFTSMDEDVGYVSPLLAFNLGLHVSCLKLLIQREGQPFKFCSRAEEIDATASSGSDLSLHLDLLPCPQVPKYALHLRVSVVRIPDCGVLASLKIYSSFGGSEYQDMVDQALNEYFKFDRFLARGDVFGIQNSWKCGSSCCLACNKQDNKLNPRNMIYFKVTGMEPSDEPILRVNCNETALVLGGAASAAIPPYSFFASSGNSVPLHSEVVEHLASVIAPALCPSDILPKIKFSTFLYGPPGCGKRTVVRHVANHLGLHVVECSCHDLMTSSESGAPAALATAFKEAQKYSPCIILLRHFDAIGNASSNEGPQSEQSGIASNIESVIKQYIGQRWVAKDSLPGKDVNGSSYLVEPECVSSLQIILVATADSSEGMQQSIRRCFRYEIDMKTMNEEQRNELISETLQGIPKVADESICDKFIKDLAAQTSGFMPRDILALVADAGVSFAHKIAAGKDSKAISKHTEVLPESSSATQNEEHHFSKEDIMSSLERAKKRNRAALGTPKVPNVKWEDVGGLEDVKKVILDTIQQLPLMYKHLFSSKLRKRSGVLLYGPPGTGKTLLAKAVATECSLNFLSVKGPELINMYVGESEKNVRDIFEKARSARPCVIFFDELDSLAPARGSSADSGGVMDRVVSQLLVEIDGLSDNSQDLFIIGATNRPDLLDSALLRPGRFDKLLYVGVNTEASYRERILKAQTRKYKLHKNVSLLSVAQRCPPNFTGADIYALCADAWFHAAKRSVETFEIDPSRSNEASAEEVIVEIDDFITVLGDIAPSLSLDELQNYEQLRQKIEGPSR

SEQ ID NO: 227278 - protein, 351 aa, Zea Mays
MCLVAQSVFEAGLKRFMHEPGYILEYTDFLCRLNDDRNVRALFERALSLLPPEESTEVWRRFAQFEQNYGDLSSMLKVEQRRKEALSRTSEDALSASENTLHDIVSRYSYMDLWPCSSKELDYLARQEWLAKNIVKKVEKPAMLNSGSMLDKGAAGFSASARLLPQSAKVVRPETSQMVIYDPRQMKGPEFAATSSGYTKEVEATLKVLSPSMVSFIKNLPAIEGPSPDIDVVLSVLLQSTLPVAQSAGKAGGVSELSGVGKTGLNQNGSVHRPPRERRKDVERQGAQEEEDASAVQSRAAVPRDIFRLRQIQRSRGLGVGGAAVSQSGSSAFSFSGGGSAFSGDHSASTD

SEQ ID NO: 227279 - protein, 363 aa, Zea Mays
MSATRLSCPFWVLHKVAQSVFEAGLKRFMHEPGYILEYTDFLCRLNDDRNVRALFERALSLLPPEESTEVWRRFAQFEQNYGDLSSMLKVEQRRKEALSRTSEDALSASENTLHDIVSRYSYMDLWPCSSKELDYLARQEWLAKNIVKKVEKPAMLNSGSMLDKGAAGFSASARLLPQSAKVVRPETSQMVIYDPRQMKGPEFAATSSGYTKEVEATLKVLSPSMVSFIKNLPAIEGPSPDIDVVLSVLLQSTLPVAQSAGKAGGVSELSGVGKTGLNQNGSVHRPPRERRKDVERQGAQEEEDASAVQSRAAVPRDIFRLRQIQRSRGLGVGGAAVSQSGSSAFSFSGGGSAFSGDHSASTD

SEQ ID NO: 227280 - protein, 419 aa, Zea Mays
MTAKTVYESLLGENASETSLANIQFIRFLRRTEGTEAARKYFLDARKSPSCTYHLYVAYATMAFCVDKDAKVAQSVFEAGLKRFMHEPGYILEYTDFLCRLNDDRNVRALFERALSLLPPEESTEVWRRFAQFEQNYGDLSSMLKVEQRRKEALSRTSEDALSASENTLHDIVSRYSYMDLWPCSSKELDYLARQEWLAKNIVKKVEKPAMLNSGSMLDKGAAGFSASARLLPQSAKVVRPETSQMVIYDPRQMKGPEFAATSSGYTKEVEATLKVLSPSMVSFIKNLPAIEGPSPDIDVVLSVLLQSTLPVAQSAGKAGGVSELSGVGKTGLNQNGSVHRPPRERRKDVERQGAQEEEDASAVQSRAAVPRDIFRLRQIQRSRGLGVGGAAVSQSGSSAFSFSGGGSAFSGDHSASTD

SEQ ID NO: 227281 - protein, 590 aa, Zea Mays
MKNSGGGAAHGDGGDIYNVRAAEILANEALLLPINEAAPIYENLLATFPTAAKYWKQYVEAYMATNNDEAAKQIFSRCLLNCLHISLWRCYINFIRRINDKRGSEGLDETKKAFDFMLNYVGNDAASGPVWMEYINFLKSMPVVTPHEESHRMTTVRKVYQKAILVPTNHVEQLWKDYENFENSVSRTLAKGLLSEYQPKFNSAKAVYRERKKYIDDIDWNVLATPPTGSYKEEQQCMAWKRLLVFEKGNPQRIDATTANRRITFTYEQCLMYLYHHPDIWYDYAMWHVKNGSMDSASKIFQRALKAIHDSEVLKYAFAEMEESRGAIQTAKTVYESLLGENASETSLANIQFIRFLRRTEGTEAARKYFLDARKSPSCTYHLYVAYATMAFCVDKDAKVAQSVFEAGLKRFMHEPGYILEYTDFLCRLNDDRNVRALFERALSLLPPEESTEVWRRFAQFEQNYGDLSSMLKVEQRRKEALSRTSEDALSASENTLHDIVSRYSYMDLWPCSSKELDYLARQEWLAKNIVKKVEKPAMLNSGSMLDKGAAGFSASARLLPQSAKVVRPETSQMVIYDPRQMKEWEITVD

SEQ ID NO: 227282 - protein, 1364 aa, Zea Mays
MAEVEAPAAAVAAATPEVATVTEGGAATEAKGPHKLHRQWTFCLYDHVFRPSKLPGTADFHLFKAGVEPKWEDPECANGGKWTVPCNRKPTFETMWLETLMALVGEQFDETDDICGIVASVRPRGDKLALWTRTASNEAVQVNIGKKWKDVIDYNDKIIYTFHDDSRRDKPSRGGRYTVKLGRAGRAQHVCFGNTASVRHISRLDLEASPDVFVMHLPALACALINAGLPNSRLVRDATPPPYRPPRRLTSHHTSRLPSAISPWPLPCPFTDTSPPQPPVDRSAIGMDAGSVTGGLAAGSHMRDELHVMRAREEPNAKVRSADVKTCRVCADEVGTREDGQPFVACAECGFPVCRPCYEYERSEGTQCCPQCNTRYKRQKGCPRVEGDEEEGPEMDDFEDEFPAKSPKKPHEPVAFDVYSENGEHPAQKWRTGGQTLSSFTGSVAGKDLEAEREMEGSMEWKDRIDKWKTKQEKRGKLNHDDSDDDDDKNEDEYMLLAEARQPLWRKVPIPSSMINPYRIVIVLRLVVLCFFLKFRITTPATDAVPLWLASVICELWFAFSWILDQLPKWAPVTRETYLDRLALRYDREGEACRLSPIDFFVSTVDPLKEPPIITANTVLSILAVDYPVDRVSCYVSDDGASMLLFDALSETAEFARRWVPFCKKFAVEPRAPEFYFSQKIDYLKDKVQPTFVKERRAMKREYEEFKVRINALVAKAQKKPEEGWVMQDGTPWPGNNTRDHPGMIQVYLGNQGALDVEGHELPRLVYVSREKRPGYNHHKKAGAMNALVRVSAVLTNAPFILNLDCDHYVNNSKAVREAMCFLMDPQLGKKLCYVQFPQRFDGIDRHDRYANRNVVFFDINMKGLDGIQGPVYVGTGCVFNRQALYGYDPPRPEKRPKMTCDCWPSWCCCCCCFGGGKRGKARKDKKGDGGEEPRRGLLGFYRKRSKKDKLGGGSVAGSKKGGGLYKKHQRAFELEEIEEGLEGYDELERSSLMSQKSFEKRFGQSPVFIASTLVEDGGLPQGAAADPAALIKEAIHVISCGYEEKTEWGKEIGWIYGSVTEDILTGFKMHCRGWKSVYCTPTRPAFKGSAPINLSDRLHQVLRWALGSVEIFMSRHCPLWYAYGGRLKWLERFAYTNTIVYPFTSIPLLAYCTIPAVCLLTGKFIIPTLNNLASIWFIALFLSIIATSVLELRWSGVSIEDWWRNEQFWVIGGVSAHLFAVFQGFLKVLGGVDTSFTVTSKAAGDEADAFGDLYLFKWTTLLVPPTTLIIINMVGIVAGVSDAVNNGYGSWGPLFGKLFFSFWVIVHLYPFLKGLMGRQNRTPTIVVLWSILLASIFSLVWVRIDPFIPKAKGPILKPCGVEC

SEQ ID NO: 227283 - protein, 1420 aa, Zea Mays
MTAEGTACNGAGEALKAEFAPEKVVAVSLEEKPVGEREGEDVGGPFLIVNGGDSDGHSEPGSDLGKAPDEDPASEEDDVPTFNAAPDAAVAGDHGTAEGQVGAQGAALGASSADGGDRASDGSEGSADESRGDPSSDCVAEVAQQEAVGEEDSGAAALASRECEPTITSADSEAHYVDSEVEDKEGTVDGSAVVDAVEAVVHQEASTEQDEDAAVMSSGHDDALTSPKSCSAAVESEVIREDSKEQSITDGVEPQQQGTVGASTLVENEHLCADMMADSFVAANEPDSQEDAAVMSSGHDDALTSPKSCSAAVESEVIREDSKEQSITDGVEPQQQGTVGASALVENEHLCVDMAADSFVAATEPDSQEDAAVESCGHDDLLTFTESGSADIESEVYGEDSEQKESNTVVVEIVVQGVGRADVLMANGHLCADTQAGSSEATTEPENHANGSKLTDVAESVEGDAGSGEQDTMDSSQTNGHIYVALSADSCIVPSESKAHSFETDGQRTDQLQEEAPKLEAEVLEGVLKPTERNCAGSVEKLIGEEVGTDGHASIGGTADAYGEQEAKPMQVEGEVTCGILEFEKVDKDGEEGLCDDYTVGVVSSNEETELPMKEKVDEAVPSVNVGGPEKVTDNTSQDTKTVDFIDEITAESNFKAENMVEVKSAAREVDKTEVKDLAFADEANVAPLHLQRDCESVMETIEHEKVELPGGCQAHEIVYSSELEPKKEFEMGVDGAVPLQGAAASVASVFHHEPMSIDLSENDSGNHSGPTTALESCDHVQNEESISQEISMTTIEQPIAIDQVEPVNLNVDELVVDDDQPGFAPRCESARLDKPGCTSKKDDSNEIVEDSKSLENQLEICNAATMSDECSSRNANEDPSPINMSAECSSRTANEGFSPINEASHLAEESCLSDKSYNAISYENGNGPAKSSEEPDKSCNAIICENENEPAKSSDVVETRCVEALAPSSVGTVVTAEQKDNGHRASGEWHGDNVQVIGQQQKIYIIKVPKFAGDDLWNKIQAAQAHLDHLTQERDAINRRRQKQKAVCDQYREKLEAARREEREARTAHGDKKNDLNNVRSVLGKLHQANSAEELDELIAKKERTMQHETISLKEEKLLIKEINELKAQRKQLSTTMGSKAEINEAFDQKDHIHERHKVLKKDSDVLLTNLKFLEENTRKIQKSFEDERTGLRKLTEEHRAANEIRQKAYIEWTELRSEPSKKNEYFFRYRDDRNAAEIFRANGDINGLKSHCNSQIEGVMEMWNKNEEFRKQYVESNKVSTLKRLGTHDGRKLGPDEDPPVISSRRPSSIYPLSASSPGVATLASIPAPVVAAPAAVSAKEDSFPVLEAPQTSKRTKSKASDICAQTENNSVIVSEAEALEQTLKEKARLLEEQLELARKAESREGQGESRVQSAQGS

SEQ ID NO: 227284 - protein, 413 aa, Zea Mays
MTTLDDVIYEALELRDGGSDYLGKGVLKAVNNVNSIIGPAIVGKLDGTSNEWGWCKQKLGANAILAVSLAVCKAGAMVQKIPLYQHIANLAGNKTLVLPVPAFNVINGGSHAGNKLAMQEFMILPTGASFKEAMKMGVEVYHHLKEHNQEELKKYGQDATNVGDEGGFAPNIQENKKGLELLKAAIEKAGYTGKVFIGMDVAASEFFSEKDKTYDLNFKEENNDGSNKISGDSLKDLYKSFVSEYPIVSIEDPFDQDDWTTYAKLTGEIGQQVQIVGDDLLVTNPTRVAKAINEKTCNALLLKVNQIGSVTESIEAVRMSKRAGWGVMASHRSGETEDTFISDLSVGLATGQIKTGAPCRSERLAKYNQLRLGSRKSSVLPQSTPERSSEHQWSPTEPRVPRAWRKKMRMFPH

SEQ ID NO: 227285 - protein, 1094 aa, Zea Mays
MQMALQSLVDSADMMESDLPVQNAIEPLPLLPACSPSFSSIVDEVFEYERGSTAAQNRCLPVDIQGINARVVSPMHDGCLSYTQANNNMNVHPNVSLNSYFPSNFRHLQGANKSLQLVPSSNDNSNQIPAQSSHSGNLGNATPGHLIGSSTTTGGLGKLITAGSDGASRKHYLSDFLSSIPSLRGLQPSEPRKRRKKTESVQSLLPLQAHSSNLQSRGSLTYGDVLAERNNCVPATIYASVLLHVIRHCSLCIKHAQLTAQMDSLAIPYVEEVGLRRPSSNLWLRLPFAQDDSWNHICLRLGKAGSMSWDVRINDPHFRELWELNGGSTKTQWGVGIRIANSSEMDSHISFDSSGVVLTYNTVEADSVQKLVSDLRRLSNARSFALGMRRLIGVKFQDKLDDNQLTMEVKSQSVNKGNSDAADKLSEQMRKTFRIEAVGLMSLWFSYGTMPMVHIVVEWEIAKAGCTMHVSPDQLWPHTKFLEDFVNGGEVASFLDCIRLTAGPLLALGGAIRPARMPVAVSSGYSSMPKQPNIPTQGPLVNGSSSTIHHAPGPSNAASAHLGSHNLHAAAMLSAVGRGGPGLVPSSLLPFDVSVVLRGPYWIRIIYRKKFSVDMRCFAGDQVWLQPATPPKGGPSVGGSLPCPQFRPFIMEHVAQGLNALEPNFMNATQASGHLNNNAGVPQTAPSANRLNATPGVSMVRPTSGVANHVAASLSRAGNAMLASSALASGISGTSVRLTAGAGLPVHMKGELNTAFIGLGDDGGYGGGWVPLAALKKVLRGILKYLGVLWLFAQLPELLKEILGSILKDNEGALLNLDQEQPALRFYVGGYVFAVSVHRVQLLLQVLSVKRFHHQQQQQQAQSNAQEELAAVEINEICDYFSRRVASEPYDASRVASFITLLTLPILVLREFLKLITWKKGLSPVHGDIATAQRARIELCLENHSGSASSDNTENSSLAKSNIHHDRAHSSVEFALTFVLDHALIPHMNVAGGAAWLPYCVSVKLRYSFGDNNHIAFLAMNGSHGGRACWLQFEEWERCKQKVSRAVETVNGSGVAGEVGQGRLRMVAEMIQKQLQLCLQQLRDDPLSAGSTAS

SEQ ID NO: 227286 - protein, 1687 aa, Zea Mays
MAGELGQQTVELGAVVRRAAEESYLALRELVEKSQAEAEGKGIGAGANGSWQRSDTEKKIDLLKFITRTRQRMLRLHVLAKWCQQVPLVHYCQQLGSTLHSHETCFTQTADSLFYMHECLQQARAPMFDVPSAIEVMLTGGYQRLPRCIEEIGSQHKLSPDEEKRALRKLDASVRYRVLVTPRPKEVSNVSVTDGIAVFRVDGEFKILLTLGYRGNVDLWRILHMELLVGEKKGPIKLDESRRFALGDDIERRMAASENPFAVLYAILHEFCISLAMDTIIKQANVLRQGRWKDAIRSELISDSATVQTGNTPLMQLVQDAEFDSSGFKIPGLKVNYWLDEKSTSTAEPDSSPFIKIEAGLDMQIKCQHSSFILDPFTDKEASLSLDLSCIDVEQLILRAVSCNRHTRLLNIQRQLCKNVQIFQSPKDVVLTRDVAAAKDPMMNAEKGFSDCFGNEVLQVRACGQAYVSLGINIRSGRFLLQSPENILPRAALMDCEEALNKGSTSATEVFSSLRTRSILHLLAATGSFFGLKVYQQSQGTLKIPKTLLHGSDLMVMGFPHCANAYYLLMQLDKDFRPVFHLLETQCDANGNTNASGDVKEAIRYNKINIGQMQILKNEMNENPFDVKLQALQSLVDSADMMESDLPVQNAIEPLPLLPACSPSFSSIVDEVFEYERGSTAAQNRCLPVDIQGINARVVSPMHDGCLSYTQANNNMNVHPNVSLNSYFPSNFRHLQGANKSLQLVPSRLGKLITAGSDGASRKHYLSDFLSSIPSLRGLQPSEPRKRRKKTESVQSLLPLQAHSSNLQSRGSLTYGDVLAERNNCVPATIYASVLLHVIRHCSLCIKHAQLTAQMDSLAIPYVEEVGLRRPSSNLWLRLPFAQDDSWNHICLRLGKAGSMSWDVRINDPHFRELWELNGGSTKTQWGVGIRIANSSEMDSHISFDSSGVVLTYNTVEADSVQKLVSDLRRLSNARSFALGMRRLIGVKFQDKLDDNQLTMEVKSQSVNKGNSDAADKLSEQMRKTFRIEAVGLMSLWFSYGTMPMVHIVVEWEIAKAGCTMHVSPDQLWPHTKFLEDFVNGGEVASFLDCIRLTAGPLLALGGAIRPARMPVAVSSGYSSMPKQPNIPTQGPLVNGSSSTIHHAPGPSNAASAHLGSHNLHAAAMLSAVGRGGPGLVPSSLLPFDVSVVLRGPYWIRIIYRKKFSVDMRCFAGDQVWLQPATPPKGGPSVGGSLPCPQFRPFIMEHVAQGLNALEPNFMNATQASGHLNNNAGVPQTAPSANRLNATPGVSMVRPTSGVANHVAASLSRAGNAMLASSALASGISGTSVRLTAGAGLPVHMKGELNTAFIGLGDDGGYGGGWVPLAALKKVLRGILKYLGVLWLFAQLPELLKEILGSILKDNEGALLNLDQEQPALRFYVGGYVFAVSVHRVQLLLQVLSVKRFHHQQQQQQAQSNAQEELAAVEINEICDYFSRRVASEPYDASRVASFITLLTLPILVLREFLKLITWKKGLSPVHGDIATAQRARIELCLENHSGSASSDNTENSSLAKSNIHHDRAHSSVEFALTFVLDHALIPHMNVAGGAAWLPYCVSVKLRYSFGDNNHIAFLAMNGSHGGRACWLQFEEWERCKQKVSRAVETVNGSGVAGEVGQGRLRMVAEMIQKQLQLCLQQLRDDPLSAGSTAS

SEQ ID NO: 227287 - protein, 770 aa, Zea Mays
MAVSDNKESEKQIPRPPPCPSGEQQKPKDDGDLSDDSPSNSTNQSDHIDGEHHYNIPIYRPYKYDPYRFMCRRERRNHWNDDYPYMCGFQNPWNPKTSLHTDDYWSPWPSPEPDQRMERYNSGSCWSWPSPEPDCEKERYTVAAGLSNPHLWTCFLNCVLQCMVHTVPLLLKLRKADHPDPCPRVSIGFCCYCSLKHHVDECMRLSGSSFYPEIFVNHLKSISSNFRSGVQQDAQEFLRCLLDKLDEDSIAPRFSEESSSSEESSSTEEGSVVKEIFSGCLKSQLRCPECNHYSDKSEPFLDLSLDLNMVETLMDALQSFTNTELIKDFMCDGCKSRVNLEKHFKIEQAPEVLVIHLKRFTNFESKIRDKVKFPIELDINSFMSSSDDTLQKYDLYGVVEHLGAYGSGHYVCYIRSSEADWYKFNDDKVCKCSVASALDSAAYLLFYVKQGSSPWFSTLLEKEDKCPLAGSVSLEEQGETAPFNKEGQARYNNESCLVESPGPHLWRKDLPQFIHSSDPTHASSTGSANKEEEAASSHGQGKIARNNKEEATTSLEQRNGSTLLDLSEQLQRNGNVNTLSDASDKLEEGCRMGETSTGTQGPSCLIGSGDKNGHADGCWEPSGKMKDVSPGGSLNKKEAKPMTCGSVEVEVDHAVTQGGSPRNENNCHSLQLSHKHKDNCDFLEVDHAVTQGVSPQINENNCHVLQLPHDRRDNFCRRSLSLQVDEIGGCCGAPSTGMGASNSENERVEPISNELRDDNRDTSKGKCKRL

SEQ ID NO: 227288 - protein, 923 aa, Zea Mays
MADEDAAETVGAAYMTVPPPLVMPDAAVPPPVAAETVATLPPVSDDDTEAAVAAMLVVLLPPPPEQMVAIPQPFSSESKLPEVTVQALGHLLEEEHPVMAVSDNKESEKQIPRPPPCPSGEQQKPKDDGDLSDDSPSNSTNQSDHIDGEHHYNIPIYRPYKYDPYRFMCRRERRNHWNDDYPYMCGFQNPWNPKTSLHTDDYWSPWPSPEPDQRMERYNSGSCWSWPSPEPDCEKERYTVAAGLSNPHLWTCFLNCVLQCMVHTVPLLLKLRKADHPDPCPRVSIGFCCYCSLKHHVDECMRLSGSSFYPEIFVNHLKSISSNFRSGVQQDAQEFLRCLLDKLDEDSIAPRFSEESSSSEESSSTEEGSVVKEIFSGCLKSQLRCPECNHYSDKSEPFLDLSLDLNMVETLMDALQSFTNTELIKDFMCDGCKSRVNLEKHFKIEQAPEVLVIHLKRFTNFESKIRDKVKFPIELDINSFMSSSDDTLQKYDLYGVVEHLGAYGSGHYVCYIRSSEADWYKFNDDKVCKCSVASALDSAAYLLFYVKQGSSPWFSTLLEKEDKCPLAGSVSLEEQGETAPFNKEGQARYNNESCLVESPGPHLWRKDLPQFIHSSDPTHASSTGSANKEEEAASSHGQGKIARNNKEEATTSLEQRNGSTLLDLSEQLQRNGNVNTLSDASDKLEEGCRMGETSTGTQGPSCLIGSGDKNGHADGCWEPSGKMKDVSPGGSLNKKEAKPMTCGSVEVEVDHAVTQGGSPRNENNCHSLQLSHKHKDNCDFLEVDHAVTQGVSPQINENNCHVLQLPHDRRDNFCRRSLSLQVDEIGGCCGAPSTGMGASNSENERVEPISNELRDDNRDTSCGEERRGRGGGESKKRKSANGGRSKALRKRMKRTHRTVARHFAFCRWRAVAGTVWKSKTRRR

SEQ ID NO: 227289 - protein, 195 aa, Zea Mays
MAAAGHCYYHDDYGDDDHNPWSPFMQSEAQISPLRQQVQSLALIDIWEDRKIFDTQAQSLKDDFFRRLKDIRNQLKNTGSEQLEKVVSSYKHVLNAPMDEDTLMRKCQAALINFDELNKTYGNNSILGSSNRSGFMQELQEQHSILRNSIEQLKVSESLRATLIFHLKEALNEQELKVEHLRSQLQERYILSWCF

SEQ ID NO: 227290 - protein, 110 aa, Zea Mays
MFLLPLRCSCSFPPPVPPHRPMRPRPLTSAAADRGPATVREAAEAIAAPPPPTSHLHSPHPSSPRPRLRLMATHWVQPKVYPLFVTMGVAMGICGLQLFRNITGNLEVRG

SEQ ID NO: 227291 - protein, 1655 aa, Zea Mays
MPPPPPDRRDYLYREGRRHDGGVGDSLLPPAPTPPRWRDSPYHPPPPPPLRDPARPSPRRAPPLASSEGYYRQGGGAYDRSYPDDPPSVYTPSRSDRYWPEDDDGGYKGFGRYGSGGRRDGRDMRGSYRKSPYRGGYGSDFSRNHSEQPPPPPPRRSPLRSVAVPICYDPPGNRINRGDRDNLPRVTPWRRRESRSEVADADGPLSVGQSTRLSASGKEASAQPLAAAGPHGTEDEAPRKKARLGWGQGLAKYEKQKVQGPSDPAEVVADVSSGDGEQKTSLAPAPSVASVFPAAPLPESAPAPPAALALSSAPMRCSSPVTAPPYCSSAPEDKSCEMTPNTVTNSTKDVLEADGKTFNNEFSIKLDQLGDDPINGLTNILVELMQHNDSCSGDSNGPTSTCKLLQLKESISKEIEKTELQIDSLEGELKSVNTEAVTTLESSPTGVTHTENLSPSGGTSKVPGSAEICDTFDMIKEPGELIVSPKVPVVQDADVKGVDMMEVETAPVRNAKTVPSEESAVTPGVAEGKACAAADLSSLIASEEAGSQNDIDNDRPKTSLCHADSMKIKVSDELPVKQWTYCDHMSDLHSSFTSANNDIAKEMNEVLFKSLPAGTSALDLLASSDLLSQRKIDLIVKERLGVRKTRLRLKEQILTMKFKAYRHLWKEDVRLLSAKKQRLKSNKRIDQNNRTSQIGSQRQRFSNRSRLAMPAGNLSTFSTPEMSDVARKLFSESQIKRCRNYLKMPALIIDEKEKEHLRFLTKNGLVVDPVLVEKERIMINPWTQDEKEIFMEMLAKFGKDFSKISSFITHKTTADCVEFYYKHHKSDSFREVKKLLDLHQQLPASNYLGAKSGQKWNPESNAASLDMLGVASAEAAHDLEYANKVEKISVKSLIRTAYGSNVSFVTKKSSDKECIDNVPLHERESVAADVLAGICGTPSPDGMGSCITSSADPGLKISMKRVEHVLSQENDKNVNEEESLSDQECEFDPVDWNDDEKSIFIEAMNNYGKDFSRISSCVKSKSYEQCKVFFSKARKSLGLDLIHQGAADVSMPASDTNGGRSDTDEACAVEMDSAICRKQSCSKIVQDVCPTEGAILGPDSVLISKQTEGDISNRCIVDVKIEEDDKEADKNCSNVDDKRSSDSTHQAGPININCPESTDKLQGTDDAVDQVNMHSSVLNSSNEHAMAMHSEVRSSLHSVDVLQTDKAEGTGTDPSQVEECSHHAVYTPMTAGNSGSSAFLTSDSGIKDNVHISNMSGASTVSPAFTSNYQHSLPGDMPLSKPKPLVTSLTPKDLMPVQFSSVLPDPTAFRFEGIKPNFEDSSGNKVSSALGAKDICKYPAFKDPSDNEHDTLFRNIDGYMNNHLTTELPVFSQRTASGTVSTSQTKFQNGRSSSVCLPNSSEGIQWPRKPEEVPEDSLRPCARNAKTEGGEKQKRPGDVKLFGQILSHQPTLPSSGSLCNGSQSKPPSPKIDKTSVRLTNNPRDLVVFSSRPGVSPHVGLEERSVRSYGHLDGSTIQPEPLLVMAKCQRSLASVPFYSAKNSTVGVFPDYQQPSMQPHQLDPKPLEMFSDSQKRNGLELVSGFGGAGILVSNVSDHVAALKARYGPGSKIMGSDADPWKDIGSSTIPFGSLTCQQRPSATVGSLEVITRCFVSRV

SEQ ID NO: 227292 - protein, 1623 aa, Zea Mays
MPPPPPDRRDYLYREGRRHDGGVGDSLLPPAPTPPRWRDSPYHPPPPPPLRDPARPSPRRAPPLASSGYYRQGGGAYDRSYPDDPPSVYTPSRSDRYWPEDDDGGYKGFGRYGSGGRRDGRDMRGSYRKSPYRGGYGSDFSRNHSEQPPPPPPRRSPLRSVAVPICYDPPGNRINRGDRDNLPRVTPWRRRESRSEVADADGPLSVGQSTRLSASGKEASAQPLAAAGPHGTEDEAPRKKARLGWGQGLAKYEKQKVQGPSDPAEVVADVSSGDGEQKTSLAPAPSVASVFPAAPLPESAPAPPAALALSSAPMRCSSPVTAPPYCSSAPEDKSCEMTPNTVTNSTKDVLEADGKTFNNEFSIKLDQLGDDPINGLTNILVELMQHNDSCSGDSNGPTSTCKLLQLKESISKEIEKTELQIDSLEGELKSVNTEAVTTLESSPTGVTHTENLSPSGGTSKVPGSAEICDTFDMIKEPGELIVSPKVPVVQDADVKGVDMMEVETAPVRNAKTVPSEESAVTPGVAEGKACAAADLSSLIASEEAGSQNDIDNDRPKTSLCHADSMKIKVSDELPVKQWTYCDHMSDLHSSFTSANNDIAKEMNEVLFKSLPAGTSALDLLASSDLLSQRKIDLIVKERLGVRKTRLRLKEQILTMKFKAYRHLWKEDVRLLSAKKQRLKSNKRIDQNNRTSQIGSQRQRFSNRSRLAMPAGNLSTFSTPEMSDVARKLFSESQIKRCRNYLKMPALIIDEKEKEHLRFLTKNGLVVDPVLVEKERIMINPWTQDEKEIFMEMLAKFGKDFSKISSFITHKTTADCVEFYYKHHKSDSFREVKKLLDLHQQLPASNYLGAKSGQKWNPESNAASLDMLGVASAEAAHDLEYANKVEKISVKSLIRTAYGSNVSFVTKKSSDKECIDNVPLHERESVAADVLAGICGTPSPDGMGSCITSSADPGLKISMKRVEHVLSQENDKNVNEEESLSDQECEFDPVDWNDDEKSIFIEAMNNYGKDFSRISSCVKSKSYEQCKVFFSKARKSLGLDLIHQGAADVSMPASDTNGGRSDTDEACAVEMDSAICRKQSCSKIVQDVCPTEGAILGPDSVLISKQTEGDISNRCIVDVKIEEDDKEADKNCSNVDDKRSSDSTHQAGPININCPESTDKLQGTDDAVDQVNMHSSVLNSSNEHAMAMHSEVRSSLHSVDVLQTDKAEGTGTDPSQVEECSHHAVYTPMTAGNSGSSAFLTSDSGIKDNVHISNMSGASTVSPAFTSNYQHSLPGDMPLSKPKPLVTSLTPKDLMPVQFSSVLPDPTAFRFEGIKPNFEDSSGNKVSSALGAKDICKYPAFKDPSDNEHDTLFRNIDGYMNNHLTTELPVFSQRTASGTVSTSQTKFQNGRSSSVCLPNSSEGIQWPRKPEEVPEDSLRPCARNAKTEGGEKQKRPGDVKLFGQILSHQPTLPSSGSLCNGSQSKPPSPKIDKTSVRLTNNPRDLVVFSSRPGVSPHVGLEERSVRSYGHLDGSTIQPEPLLVMAKCQRSLASVPFYSAKNSTVGVFPDYQQPSMQPHQLDPKPLEMFSDSQKRNGLELVSGFGGAGILVSNVSDHVAALKARYGPGSKIMGSDADPWKDIGSR

SEQ ID NO: 227293 - protein, 285 aa, Zea Mays
MDISHPHPKACSARSYARAPRTSTPLVFHWLNRRMHSNTEYCSIHGSKAMEDKDSVPHSVVEKDTEALLLHDVLLNGILAIGTLGHHVDSLCPVACIEEDDLFIMDDEKAIVEERDDEEPRNDQVKEDVALETEPCEPVWPIVEPAKMHSLSMKEDNFTCFVAEEILIREVEDGGGANIQERPLLMLEKVEKVRTTLADLFAAEVFSSSSPREYSCQDIIDVAVASTSKHASCMEKMHQKKPRKPTPKPLKATRKLSRVMRKMLGKKIHPEQLNGRSNAEGPLTA

SEQ ID NO: 227294 - protein, 437 aa, Zea Mays
MAAEELLRKLRELEEGQAELKREISKLVPEQQQQHHHHHYHSSRRPPQPSPVRRALPAAPSLPSRLQRVGRVGLTDRQHIRALHALGQAVHIIAPGGKLIYWNRYAEQMYGYSTSEAVGHDAVELLVHPDDAEAANNIIGNIFMGKCWRGKFPVKKKSGERFFIVANNTPLYDDDGSLVGLICLSVDTKTLEDIIGPSTSMKSHTHPVKPRFQVNNRPKCNLLNKSSIESEQTVQSSIASKITTLVSLMKKLRHPNIILFMGAVASPERLCIVTEFLPRGSLFRLLQKNTAKLDPRRRVHMAIDIARGMNYLHHCSPPIVHRDLKSSNLLVDKNWTVKVADFGLSRLKLETFLRTKTGKGTPQWMAPEVLCNEPSDEKSDVYSYGVILWELVTQKIPWDNLNTMQVIGAVGFMDQRLDIPSDTDPKWASMIESCWDR

SEQ ID NO: 227295 - protein, 236 aa, Zea Mays
MARRERVFKVVIKFAARADLHHLAMFLAGRQADAPQEALQVLDIVLRELPTARYSPVGRSFYSPNLGRRQKLDMSSTAFIEPLPMIDFVAQLLNRDILVRPLSDSDRVKIKKTLRGVKVEVTHRGNMRRKYRISGLTSQATRELSFPVDDRGTVKTVVQYFMETYGFSIQHTTLPCLQVGNQQRPNYLPMEVCKIVEGQRYSKRLNEKQITSLLKVTCQRPQERELDILQDSGSHQ

SEQ ID NO: 227296 - protein, 875 aa, Zea Mays
MATESAFRLIGGTGARDWSKGFGAFGSSAGALSGEDLGFVDNDTGVYGGWNKSVPNRSGSAPPSMEGSLAALGHLIDQQSGSFEASLTTLDNITDSSKSEEQLRADPAYFEYYGSKVNLNPRLPPPLISRESRRLMNRVGKAKEWRMVSQDNSSKGSIYVPRSMLSTHKEEPEDDKSPRLDSSSVEDAQIVSSASNFQSQDFMLERFQQSVASSPDSSSSNPSNSNTGDSMPVYSDINLLKSLSFDALKQSDLNSWTPKGPLKSNVNNDLSSPPLSSSSYPGSKTGTQTFEQEKAAADTKHGNVVLGSGAAVTEVDNVDSIMKNLKLSLDVHTSSPAKQRWQDNVLQQYGSFLPAQGDPIQLTTQGPHPPHVPFVDNLSHAQLKLPDIHQNLPQPSMTTPFYTPNSFGNPYYQNLHPANAFPTSIGTGGYAVSGSILPPFMAGYAPQGPLATPLDSSMTPSFSGRPSGFLPAGNLTGGTDFMQSCKVYGQFEPGMQPSIPDPNFIHFFQHPSLFQYTGGNQYNTMGPRFTVVGNLAESFDSQNTIPQAASAYPSDQRLPLPITGFPNSPTARRGGTVPNYQGISSYIGVPMTYPTSPVFQGQTLPGVLPPVRRNDSAGFLPPSRNITGSPGIQGQRARQKFDESKTCSFLEELKSNRARMVELSDITGRVVEYSADQHGSRFIQQKLENCTAEEKTSVFAEILPHASALMTDVFGNYVIQKFFEHGTREQRRDLATKLVGHVLPLSLQMYGCRVIQKPRKPYRLSLSRSCLGLWRRHRRFTLLLLRQPVAVASVSGVRLSGSGLPTSTSGSAPPDRYVGALKKVQKDLGASVFEPLVQAYAAVGKFPGMWQRLKIENVEVGEGTAQLLDSICADQ

SEQ ID NO: 227297 - protein, 793 aa, Zea Mays
MDDFLLEDEEVLAQGHGVVLLNNRDAGTLSVTNFRLLFVSQAKKCVIELGTIPLTTIEKLNDDVKLQPLPHLSDKNHPRELLQVIGKDMRIIVFAFIPRTQQKNEVFDALRRYTKPANLWDLYAFSCDPSTIKHDSEPKWRLLREYFRLFRRSLPLQGVEEVSLCNEWWRLTRVNSSYSLCSTYPSELIVPRSISDEDLFQASPFRSGKRLPVISWCDPGSGAVLARSSQPMVGLMMNFRNNADEKLVCALSSRTIDEKGSPRKLYIIDARPRANAIANGAKGGGSESSSNYHKSEVLFLGIQNIHTMRESLSRLRDYVDAHGSISSNGSPSAVSVVGDRRNRGSTWGGGNLNSMTSFSSTLGEWLNHIQNILVGASWIAAQISEEAASVLVHCSDGWDRTTQLVSLACLLLDPYYRTFSGFQALVEKDWLAFGHPFAERMGVPTVAENGGSQYELLRQPSLGNLSSSPSRNTLGPPGPSSNSPVQSQTSNNTSPILLQWLDCISQLLRLYPSAFQFSSKFLVDFMDCVLSCRFGNFLCNSEREREQSGVTISCRCMWSHLANLRASGGSFHEHYNPFYDPVNHNGALLPPAAALAPTLWPQFFLRWTCPIESQGGDLESQWHAMNKKYADTMKAKDIAEWRAKDIKLKLESMKQDLQREKRINSTALAAARSAQRENAAIKKAIESIGCTIKFSTSENEDRTEVLSCSLGRGTDGRAQQDENGDFSVAIEDSLVSDAPADHFCESLCPFRTREGCRWPDAPCAQLGSQFVGLKANFDAFDRLSIHDCYFGPE

SEQ ID NO: 227298 - protein, 320 aa, Zea Mays
MSTVSSLRSSPRIYKTSIPLFPSKSDTCRPTPIADRHGGRRRKPRTITAVVGGSRCLNGLGLEITSRDDLQTPWMLYARLIRTKVGRDPGATARTTGGGEAAVEVTRSGERDRKLSTLRAKADRLDSEATRLRSRRDENEHRVREAAGVPQQFGPPSHATYDAATGSEDEPDRAPKIPVHGRVTFLPIVLYWVYTDGYQLILHPLEQYRLHTLDEEEEKFVSLCTVVCGILLQHLVHVIHVMILFMLPLVMENDVIARYYGQGKGIVVKAIYDREVTWNQLGTRVNQLSNNTLLAELLLTTPASRKLKFEHMTIDRACLL

SEQ ID NO: 227299 - protein, 282 aa, Zea Mays
MMWRTMLYAACVPGILIVAGMQFAVESPRWLAKVGRFDDARKVVESLWEPSEVEKSMEEIKAVVLNDDSRGSWSDLLVEPHNRVALIGGSLFFLQQFAGINGVLYFSSLTFRDVGISSGALASLYVGITNFGGALVASNLMDKQGRKKLLIGSYLGMAFAMFLIVYGISFPLDEGVAHSLSIAGTLLYVLSLSILSSKPLRGLGWFGDKGIGGDPWRRKSIAIQNCCSSLAEGLLRTFCGNYTCGFLNVWKSFTYIMNNVKGFLVRSLLHDMMINELHLVNV

SEQ ID NO: 227300 - protein, 318 aa, Zea Mays
MPLLIGFLVVILVPHCKLREKFRFPSSPQILLIAGVFQHLRVSTSPGYAQASNYRKIPLTYLHLIPNQVSYRTRKMEYTLLPDLAPHKIHAKIQVHVSRKWLFRGATDSGPLQHVDMVLSDREGNAIYAEIPGNLAEQKATNIEEGGVYDISRFRVCAAKTVFKIVDGDKMIQFTFHTIVKRATSPPTTFPLYVYRLTSFDLIEPHVQTTNNFVDVLGVITEIHELTPVHVRSQLTPTVTRTIIIEDLSNKTMKITLWADQAIMFNLHDVYDTNTNKLILVLFVGCLSKIFKGVYLSGGPACRWYFNPTIPEAEPYLT

SEQ ID NO: 227301 - protein, 182 aa, Zea Mays
MEYTLLPDLAPHKIHAKIQVHVSRKWLFRGATDSGPLQHVDMVLSDREGNAIYAEIPGNLAEQKATNIEEGGVYDISRFRVCAAKTVFKIVDGDKMIQFTFHTIVKRATSPPTTFPLYVYRLTSFDLIEPHVQTTNNFVDVLGVITEIHELTPVHVRSQLTPTVTRTIIIEDLRSGDNVQSS

SEQ ID NO: 227302 - protein, 109 aa, Zea Mays
MSSASNSAKGSSPSSSTSSQWTKPQNKLFERALAVYDTDTPDRWHNVARYMGGTTSVEEVRRRYQQLAVDVAQIESGEVPFHYWYAAAPPLHPGTNNSTYVPNLAQKME

SEQ ID NO: 227303 - protein, 868 aa, Zea Mays
MEMVVAAPALPAEVERALIRDITVAADAHAKEGDTFFLITTRWWQSWIDYLIQDLTGATSNGSHHHEFGSKTPRRPGAIDNTDLIDDVPLEVSNMEIEIHDNLVEGRDYILLPQQVWEKLHGWYGGGPTLPRKAINTGFSQTDLAIEVYPLRLQLILMSRGERTFIRISKKGTVGQLHKMACKVFDLAPDEVCIWDYYGRTKHSLMDSLDKTLDDANIQMDQNILVEVTTDASGSLDGLVKRNNFFESDAPKSGLPDENFAANNYASRSYSSSLTPSIYLRSPNGDLDNVHGSSGMITRGSPLGLTGLLNLGNTCYMNSAIQCLVHTPQFTKYFCEDYHREINRQNPLGNVGELALAFGELLRKLWAPGGRAPVSPRPFKMKLSRFASQFSGYNQHDSQELLAFLLDGLHEDLNRVKHRPYINSGDADGRSDEEVADEYWANHIARNNSIIVDVCQGQYKSTLVCPVCGKVSVTFDPFMYLSLPLQFASTRSVTAVVFSCDGSVPPTPFTVNVPKQVLQLSTISDDDHLAVYKLPKLEKRVNYIQFVHRHEDLDHGNNNSLTSWKPYGVPLLAQISRNEIVTGFDIHELVHKMLVPVLRNPDSLHLAVQSSVSTRTHSYHTDSSKCQLLLVDDSNTVIEKSNDAIRIPQSSLATVFFINWPKADLKKIDTHHLEYLPEVFMYAPPAKRTRGEALSLYACLDAFLREEPLVPEDMWYCPRCKEQRQASKKLDLWRLPEVLVIHLKRFSFSRSTKQKLETFVNFPIHDLDLTNYIANKKTSERQIYELYAVSNHYGNMASGHYTAHIKLVDENRWYNFDDSHVASIDEDEVKTAAAYVLFYRRVREQDIARGTSNGSQLYAKRSHGYSHR

SEQ ID NO: 227304 - protein, 424 aa, Zea Mays
MSASTPPREAEADAPSPSGAVTPRPRRSVRVQLRVRSLPSEASSSTLRSRRRSPKAPSTTSIVAKAEEWGKEKAAAGAPEEECVLPFLRKGAPRKVECLICSKSILPDERTQCSVNHCDVTLHKACSEETDGCCPRHICFYCKKRTSKHRVQRTMPVCTLCLLKENRMIGSEDPSRTMISWSTWPSTSEDAGPTDDIKEAFRRLPLPYIDQEFNIDPINKQDLKSESEPPPYKKSEGRPIKGGCINCDHGSTCGSSCSCRSSMTSCSLGCPCSVKCSNKPFRREKKIKIVKTRQCGWGAIALETIGKDDFVIEFVGEVIDDAMCEDRLQDMRQRRDQNFYMCKVDKDFVIDPTFKGNACRFFNHSCQPNCRLEKWQVNGKTRLGVFASQTIEVGMPLTYNYRFRTSFGPEKECFCGAPNCQGKL

SEQ ID NO: 227305 - protein, 50 aa, Zea Mays
MVDQALNEYFKFDRFLARGDVFGIQNSWKCVSSCCLACNKQDNKLNLGMQ

SEQ ID NO: 227306 - protein, 709 aa, Zea Mays
MELEADGNSKLLNFNGGASQTRSIVQLNGERSSRILFVGNIDSNVEDSELKFMFEQYGDMQTLNASCKHHGFVMVSYYDIRSAENAMRALQSKPLRCRKLDIRYSSPKDYPLDKDINLSMVIVNLEASITNDDLHQIFGVFGEIKEIHPTSDNDHYKSIEFFDVRAAEAAQYALNRSEISGNKNKLEPSCLGGTERLMQQMSRALEHEQFGACKLGSPNSPSTCFGLQSGHHALDEHIHSLGKMNVQNKGRMDCGFQESTAFHPHSLPDFNDRLRNGISYNCSIPPIGVKSNARAAEAMDVRHIYKGGCGHLSNQSSAHTEALGFSRTGSCPLYGHQLAWSNSNNLHQQPSSPMIWPSMGPFTNNMPSRQLMQVHGISRAPLRMLENNIPMNHQHVGSAPAVNPSIWDRRHGYAGEMMETPGFHPGSAGSMGFPGSTHLHQLETNGMFPHNGGTFMDPAMSPVHMSARSPQQRGHIFHRRSNVAPIPSSFDSAGERMRSRRNDSNVNQSDNKRLFELDIERIVRGEDSRTTLMIKNIPNKYTSKMLLAAIDESHRGTYDFIYLPIDFKNKCNVGYAFINMINPDNIVPFYKTFHGKRWEKFNSEKVASLAYARIQGKSALVAHFQNSSLMNEDKRCRPILFHSDGPNAGDQEPFPVGSNVRSRPGRSRILSWEQNHQDIVSDHTKGGTPSRAGGTPGYIATDTDHTAVD

SEQ ID NO: 227307 - protein, 564 aa, Zea Mays
MAENGNSSNDQVILPFRPLSLVFDHIQYFVDMPKVISCSLIKILPGSFINSYHILKTRIQISHQEMTKNGATKKKLQLLQDVSGAFRPGVLTALMGITGAGKTTLLDVLAGRKTGGYIEGTIKIAGYPKKQDTFSRISGYCEQSDIHSPNLTVYESLKFSAWLRLPSNVKPHQRDMFIKEVMNLIEITDLKNAMVGIPGATGLSAEQRKRLTIAVELVASPSIIFMDEPTTGLDARAAAIVMRTVRKTVDTGRTVVCTIHQPSIEIFESFDELLLMKRGGQLIYSGSAIPGVPKINKGQNPATWMLDISSHITEYEIGVDYAEIYCNSSLYSKDEQDVLNILGIVYGSALFLGFMNCSILQPVVAMERVVLYREKAAGMYSTMAYAIAQVSVELPYMLVQVMIFSSIVYPMIGFQVTASKFFWFFLYQVMSFMYYTLYGMMTVALTPNIEIAMGLSFLIFIFWNVFSGFIIVREMMPVWWRWVYWADPAAWTVYGLMFSQLADRTEQILVPGLGEQTVREFLEGYLGLQDRYFVLVTCLHLAIIGLFVFLFFLAIKHLNFQRSF

SEQ ID NO: 227308 - protein, 374 aa, Zea Mays
MEARPRLLLVVVAIFVSISAVAAAVINVKNYGAHGNGVNDDTKPLMAAWKAACGSAGAATMVVPPGTYYIGPVQFHGPCKASTLTFQLQGTLKAATDLKRFGNDWIEFGWVNGLTVAGGVIDGQGAASWPFNKCPIRKDCKVLPTSVLFVNNQNTVVRDVTSVNPKFFHMALLSVKNIRMSGLKISAPSNSPNTDGIHIERSSGISIMDTHISTGDDCISIGQGNDNVDVARVQCGPGHGMSVGSLGRYSGEGDVTRVHVRDMTFTGTMNGVRIKTWENSPSKSNAAHMVFENMVMRDVQNPIIIDQKYCPYYNCEHKGTATTPVAVLLRCGVPCRGLVLQDVDLRYKGQGGTSAKCENAKAKYLGYQFPKPCP

SEQ ID NO: 227309 - protein, 143 aa, Zea Mays
MDPSGRENEPPEIDPRAEDKELKYQLLKKYSGYLSSLRQEFSKKKKKGKLPKEARQKLLHWWELHYKWPYPSETEKIALAEATGLDQKQINNWFINQRKRHWKPSEDMPFVMMEGFHPQTAAALYLDGGAFMADGMTTYRLGS

SEQ ID NO: 227310 - protein, 296 aa, Zea Mays
MAATTPRATGEGAGVLLWVGDAHSRLGQGRLRWLGPHLTQRDCGGGCVWASHGYGVFSVIVEEGEDGAIGVERAYTATPKGATFVHFDFHRICGHIHFERLSQLYDQIEDYLKKHKYFLLTDKDEKIAQQTGTVRTNCVDCLDRTNVTQSMIGRKLLESQLQEIGVFVANDTVSDFPDFDANYKILWANHGDAISTQYSGTPALKGDFVRYGKRTTQGILNDLWNALARYYLNNFADGTKQDGLPLCFLLVVISIDSTTSSSTIGAMCHLLAGLTVVAPYMTIDVRSHLHDVLKLG

SEQ ID NO: 227311 - protein, 268 aa, Zea Mays
MQRDTSSSDVSASHVGRVRRRKHPTEATTDGNRANGQPLLVNDQNKYKSMLTRTYSTVWMIGGFAFIIYMGHLYIWAMVVVIQIYMARELFNLLRKSSEEKQLPGFRVLNWHFFFTAMLYTYGRFLSRQLVNTVTSDHLLYKVVSGLIKYQMFICYFLYIAGFVWFILTLKKKTYKYQFKQYAWTHMILLTVFAQSAFTVANIFEGIFWFLLPASLIVINDIFAYLFGFFLGRTPLIKLSPKKTWEGFIGASVTTIISAFLKTLSTFS

SEQ ID NO: 227312 - protein, 377 aa, Zea Mays
MQRDTSSSDVSASHVGRVRRRKHPTEATTDGNRANGQPLLVNDQNKYKSMLTRTYSTVWMIGGFAFIIYMGHLYIWAMVVVIQIYMARELFNLLRKSSEEKQLPGFRVLNWHFFFTAMLYTYGRFLSRQLVNTVTSDHLLYKVVSGLIKYQMFICYFLYIAGFVWFILTLKKKTYKYQFKQYAWTHMILLTVFAQSAFTVANIFEGIFWFLLPASLIVINDIFAYLFGFFLGRTPLIKLSPKKTWEGFIGASVTTIISAFLLANVMGHSQWLTCPRKDLLTGWLYCDPGPMFKPEHYSLGEWVPHWFPWKELAIMPVQWHALALGLFASIIAPFGGFFASGFKRAFKIKDFGDSIPGHGGITDRMDCQGKNPVKLKK

SEQ ID NO: 227313 - protein, 356 aa, Zea Mays
MDLSRPTSSDLSLGLHSHGHAHAHARRHAVAAPLRLFDDAEEPKPERVGAGEADAERDDEDGGDQHFSLLGHSLCVKRPRRAGNGGGGGETSSCSSTSAALRPAKRQATGEGSGADLETRRAAVRAWGNQSLAEADPDVHSLMEQELDRQVRGIELIASENFVCRAVLDALGSHLTNKYSEGAPGARYYGGNQHIDAIERLCHERALTAFGLDPACWGVNVQPYSCTSANLAVYTGLLQPKDRIMGLEPPSGGHVSHGYYTPSGKKVSGASIFFESMSYKVNPQTGYIDYDKLEERAMDFHPKILICGGSSYPREWDFARMRLIADKCGAVLLCDMAHISGLVAAKGSWMVSNTII

SEQ ID NO: 227314 - protein, 226 aa, Zea Mays
MNGRTQDDHYQDLKGLDPTPDSWKNGCQQSEGYGIQDSICDDGHTETAKTKKKMDESLEPSGENNNCEQVEISSKDGKKVPMKLEVSSGVQTTSSIMEQEVHSGFVGVEWHMRVAFACSVCGQRTTRAINPHAYTNETVFVQGVQKHEEGGIGIPHLKWFGVEGQYNVMLCMNRVCKFHFPSKNLVSFLVVELILQTDKCFLSSEDGQDEFEKRTKKTKKKRKRVL

SEQ ID NO: 227315 - protein, 176 aa, Zea Mays
MAFAPPHLLPLPPPPAAASTRAVSARNHGGRTAPELSGPTPRVVVVTSGKGGVGKTTTTANLAASLARLGLPAVAVDADAGLRNLDLLLGLENRVHLTAADVLAGDCRLDQALVRHRALHDLHLLCLSKPRSKLPLAFGSKTLTWVADALRRSTSPPAFILIDCPAGISTIQRYHY

SEQ ID NO: 227316 - protein, 173 aa, Zea Mays
MAFAPPHLLPLPPPPAAASTRAVSARNHGGRTAPELSGPTPRVVVVTSGKGGVGKTTTTANLAASLARLGLPAVAVDADAGLRNLDLLLGLENRVHLTAADVLAGDCRLDQALVRHRALHDLHLLCLSKPRSKLPLAFGSKTLTWVADALRRSTSPPAFILIDCPAGFRCLIV

SEQ ID NO: 227317 - protein, 199 aa, Zea Mays
MDQVPNGRHKVSFAKPRVVVLSDSDSDSEGFVEELTPVHSKSNGKASSASLKTGGKASALSKGEASKGKAYSSDKGGKGSSSHAVPTKSDAELKLELDIPPNSRMLMNCEAAELLQEIHEHMAILSEDPKIKIPESFDKAFQYSKDGNHFTTASSVKQAIEPLKKCGVSDGEICMIANIGPETVEEVYALVPSLKDKNL

SEQ ID NO: 227318 - protein, 479 aa, Zea Mays
MHYGHPDVFDRIFHITRGGISKASRSINISEDIYAGFNSTLRQGCITHHEYIQVGKGRDVGLNQIALFEGKVAGGNGEQVLSRDIYRLGQLFDFFRMLSFYVTTVGFYFCTMLTVLTVYIFLYGKMYLALSGVGESIQNRADILQNAALNAALNTQFLFQIGVFTAVPMILGFILESGVLTAFVQFITMQFQMCSVFFTFSLGTRTHYFGRAILHGGAKYRATGRGFVVRHIKFAENYRIYSRSHFVKGMEVALLLVIFLAYGFNNGGAVGYILLSISSWIMALSWLFAPYLFNPSGFEWQKIVEDFRDWTNWLFYRGGIGVKGEESWEAWWEEELQHIYSIRGRILETILSLRFFIFQFGVVYHMNASGGSTALLVYWISWAVLGGLFILLLVFGLNPKAMVHFQLFLRLVKSVALLMVLAALVPGNFVYETQCERCFCFHSSICANWVGNHFDCHGMETCREEIGFVENCSCPSSPL

SEQ ID NO: 227319 - protein, 297 aa, Zea Mays
MEKRQACLFEAMKKHVEGGKAARLPASSDSYCSQTSSGDGTSPKTSSVDGASSVSDIENTSVPTSLKDSNLDSSSAVVIESGRGGDEKISMWERLQAFDKWIWTSFYSILTAVKSGKKSFKESLLRCGSCHDLYWRDEKHCRICHSTFEVGFDLEEKYAVHVATCREPELSHEVPNHKFLPSQLQALKAAIHAIEASMPEAAFTGSWMKSAHKLWVKRLRRTSSLPELLQVLVDFVGAMDVDWLYKSSSARLRTNLDDIIVDFQTMPQTTSAVALWVVQLDALIAPYLDNAMATGEC

SEQ ID NO: 227320 - protein, 93 aa, Zea Mays
MNWRSSTSIPDASSPSEAETSCRRSCSILIPRGSTISYTSSRTGAAAVDDSPAAELAAATNAPLLLHDIFIEDKLCHGTKSNRSVHHSGFSSI

SEQ ID NO: 227321 - protein, 62 aa, Zea Mays
MTSFPVVFFILISSILFFLIRRAFERKLWHHFLLFQVAFISQSQGHLHCISELVKGTQHCTY

SEQ ID NO: 227322 - protein, 352 aa, Zea Mays
MEAAADQQQQCQDFLIRSKGQRLGPAAFPYSPTGSLPGSPSAASKCLSFLLQQQQQQHDRAAAAASLMLGGSDEAHKFMARPRLDRADFASLMIYYYYNPTVGVHTGGAVHVLPPTTRPAHGRIPPAAAPSTTASSPSRINSVAVRTIHGPQFASQFAQSMAGDALLDDLQLQEQLAFLNEGGGYPAHQLQGFDGVECRSPDPGDADGMFAFGLGWHNGGQRTAGAHARMLQHSNSANELLLRRKLEEEQQAAELQHAIELQSRRLMGLQLLDLKARAAATAAAASALPTPVANAFASSHPLSTMAVESPLESGEQLKQRCWTARAWSIHNTIRASVGGSINILLVFIMIVF

SEQ ID NO: 227323 - protein, 356 aa, Zea Mays
MDHVLAGLMGDHLALIVDRLLTESTLEAAIGGGKQMVDLRQETVDVEYCHRGLGSGSATKVMECRICQEEDWDTCMEAPYACCGNLKLNFSCTEDLCCSQTTDKPFRTGHRRRLELAFWFKVIAKGKSSLLNSISDWPYEGAYSFVFCFHFWVKQLAKTEESGSHIMQQRKIVKWFGAKYNYHRTETYRTSLLKNTLMAFYIHPHQGIINHSAHLTESGLYLAAVLLRHIILEKNDNKPVTNSRDTQEGLQMLTIFKSHEAETTIVEDFDFYEHREKALQENRRQQHAASTDTQKLVDIKAQDVVADISDAFAKAVQLKNTENSGQPQKLRVLQLKRDPLPQPRLKEVLDPRAGER

SEQ ID NO: 227324 - protein, 172 aa, Zea Mays
MQKKYFEKQFELAEAVKLPIFLHMCAAGEDFYEIMTQNLHRFPGGVTHSFTDSTEDQDRLLSFEKMFIGVNGSSLKTNRNLEVLRGIPVERLMMETYSPYCDIINTHAGSQYVKSVWPSKKKEKYEPDSTVKGRNEPCLVRFPGGVTHSFTDSAEDRDRLLSFEKMFIEASK

SEQ ID NO: 227325 - protein, 452 aa, Zea Mays
MGADTLLRSGGEPGSIERRRRGEYLGFLGTRAPAHRHRARGHCSLPFSSVAATAEASTTRDQLAAAPAGADGLHALAEQVVQLVLADGSGASSPRVAFADGVFVDSSLKLKPAFEEVAVGKYRADTQSVDFQKKVDLIPFPPSSRTLVSCYRSSYSYDSGHINQNLSRKCEALVVSGLAEYGDEIDGIAPADIMKIQPILQEDLKLDFSKSRTNKTGNAEITKRRRMVVIDEVLSQDETPFLYSLVFGEGVVNDTTSVVLFNAIQNFDPGNISGAKLLNFISSFLYLFGSSTILGVASGLLSAYTIKKLYFGRHSTYREVSIMMLMAYLSYMLAELLDLSGILTVFFCGVVMSHYTWHNVTESSRVTTKHAFATLSFISETFLFLYVGMDALDIEKWKIVGQTYSPVKSIALSSTILALVLVSRAAFVFPLSFLSNLTKKTPNGKISFRQQC

SEQ ID NO: 227326 - protein, 926 aa, Zea Mays
MEEQPVAKILAGSAGARRLAFPLALGPCPWPSEMPGPAVEAAARGGGCCGKTAGKWEKTYLDVLGICCTAEVALVERLLAPINGVRAVTVVVPSRTVIVDHDTAAVSQFHIVKVLNKAGLEASVRAYGSSAGAPGRWPSPFIVACGVLLAASLFAPLLPPLRWLAVAAACVGSQPMLLRAFAAAGKLTLDINILMLIAVAGAVALGSYTEAGAIVFLFTVAEWLETLACTKASAGMLSLMSSVPKTVVLAETGQVVGMGDVAVGTVVAVRAGDVVPVDGVVVGGQSEVDESSLTGESFPVPKQAQSEVWAGTINLDGYISVRTTALAENSTVAKMERLVEEAQNSRSRTQRLIDSCAKHYTPAVVVLAAGVVLVPVLLGAPDLEHWFRLSLVLLVSACPCALVLSTPVATFCALLRAARMGLLVKGGNVLESLGEVRVAAFDKTGTITRGEFSIKDFLVVRDKVQMSQLLYWVSSIESKSSHPMAAALVEYAQSKSIQPKPEDVTETCIYHGEGIYGAINGKHIYIGNERIMARSSCRQQAGHRETDGLKGVSVGLVICDGDLVGKFSLSDTCRTGAAEAILQLRSMGIKSVMLTGDSEAAAKHAQEQLGGVLEELHSGLLPEDKVRLIRGLQARHGATLMVGDGMNDAPALAAADVGVSMGLSGSAAAIETSHATLMSGDVLRVPKAVRLGRRTRRTIAVNVASSVGAKAAVLALAVAWRPVLWVAVLADVGTCLLVVLHSMLLLRDAARARRRCGGASKACCATACKAPKTACCATASKACGATTVKPVATRPQPAGAGKKADRPGGDKHGNGKDDCHRCCHKQSKLPEDAVVIAIPVRAVEHRKDAAAHEKAEGNAAGGCCGGAPASAACCAEAHGGEDEVCIVISARSPCCSTARSRSASPKDAMCCGSGGKDGGAISALVC

SEQ ID NO: 227327 - protein, 617 aa, Zea Mays
MMSCDAAGYISVRTTALAENSTVAKMERLVEEAQNSRSRTQRLIDSCAKHYTPAVVVLAAGVVLVPVLLGAPDLEHWFRLSLVLLVSACPCALVLSTPVATFCALLRAARMGLLVKGGNVLESLGEVRVAAFDKTGTITRGEFSIKDFLVVRDKVQMSQLLYWVSSIESKSSHPMAAALVEYAQSKSIQPKPEDVTETCIYHGEGIYGAINGKHIYIGNERIMARSSCRQQAGHRETDGLKGVSVGLVICDGDLVGKFSLSDTCRTGAAEAILQLRSMGIKSVMLTGDSEAAAKHAQEQLGGVLEELHSGLLPEDKVRLIRGLQARHGATLMVGDGMNDAPALAAADVGVSMGLSGSAAAIETSHATLMSGDVLRVPKAVRLGRRTRRTIAVNVASSVGAKAAVLALAVAWRPVLWVAVLADVGTCLLVVLHSMLLLRDAARARRRCGGASKACCATACKAPKTACCATASKACGATTVKPVATRPQPAGAGKKADRPGGDKHGNGKDDCHRCCHKQSKLPEDAVVIAIPVRAVEHRKDAAAHEKAEGNAAGGCCGGAPASAACCAEAHGGEDEVCIVISARSPCCSTARSRSASPKDAMCCGSGGKDGGAISALVC

SEQ ID NO: 227328 - protein, 432 aa, Zea Mays
MEKIANMKKEIDAIRVKDISQGGLTQGQQTQIARNEQRMSQIMEELDNLEETLNDSIRESIGARSGKAKRGSYKASLEEEDDVLSDDDEFYDRTKKKSTQKSSEQQSVETADSLLEKKDFITNDIESKTKLLEEEKHKLSQSDTPDLRDDLDAYMSGLSSQLVHDKIARIQKELSDLQDELDRVVYLLKIADPTGEAARKRDLKPREAKPPTSNDNPRLESKKQNKIGKATAEEKPKDSSSEVGTDKPAKLQTDISKNQEDGSKPAFAMPKPQWLGDKRIIKPEENLINEEKSDAEEPDNFVDYKDRKIILSSGSEKKLEEAAPGLILRKRKSADESVASEANSSSVESEASVADAVALLLKHKRGLQTSEEMENETEPYSSKTEGKKSKQKRVLGPARPDFLEARQDSETWVPPEGQTGDGRTALNDRLGY

SEQ ID NO: 227329 - protein, 255 aa, Zea Mays
MKIEQEKDLQKLRDARIQQDMLDREASILRAKTQAALAEGISWGMTDDAIEESAEDDADEITWQTYKGQLTDRQEKTRSKIVKRMEKIANMKKEIDAIRVKDISQGGLTQGQQTQIARNEQRMSQIMEELDNLEETLNDSIRESIGARSGKAKRGSYKASLEEEDDVLSDDDEFYDRTKKKSTQKSSEQQSVETADSLLEKKDFITNDIESKTKLLEEEKHKLSQSDTPDLRDDLDAYMSGLSSQLDCPNSEGAL

SEQ ID NO: 227330 - protein, 91 aa, Zea Mays
MSRGPFARVTSSPCSSPRGRPGGCAEALAFLVGSWPLVRRGLAPGRQTARRPSTGDGTRKRQKKEMKNRMNCFLVSKSCSRFDDSKTDGLP

SEQ ID NO: 227331 - protein, 410 aa, Zea Mays
MLSSSASRRDAARSGAELPRPHAVAGMARSGELPKGAPSATAPDAVRCEGWMVRHGRRKIGRSFFHTRYFVLDNGVLAYYKKKPRDHMIPLKSIIIDGNCRVEDRGLKTHHGQMIYLLCIYNKKEKENQITMGGYDIEDALAWKRKIELLIDQQQDTTTAKNHKAFASLDFDIDLGGPFSFSDHDSGPEDEEEPRPTLLRRTTIGNGPPDSVLDWTKEADSGLSNQNATSQAYSRKNWRLLRCQNGLRIFEELVEVEYLARSYSRAMRAVGVVEASCEAIFGLVMSMDASRYEWDCSFQYGSLVEEVDGHTAILYHRLQLNWFSMLVWPRDLCYVRYWRRNDDGSYVVLFRSTENQNCGPQPGFVRASIESGGFKISPLKSLNGRPRTQVQHLMQIDVRGWGVNYLPSFQ

SEQ ID NO: 227332 - protein, 573 aa, Zea Mays
MEQYEVLEQIGKGSFGSALLVRHKAERKRYVLKKIRLARQTDRCRRSAHQEMELIAKVRNPYIVEYKDAWVEKGCYVCIVIGYCEGGDMSEAIKKANSNHFSEEKLCVWLVQLLTALDYLHANHILHRDVKCSNIFLTKDQNIRLGDFGLAKVLTSDDLACSVVGTPSYMCPELLADIPYGSKSDIWSLGCCIYEMAAFKPPFKAFDMQALINKINKSAVPPLPTMYSGAFRGLVKSMLRKSPDHRPRAAELLKHPHLQPYVFELQLKSTPRNLFSAKLPTRYVTNKAAVSDAEDNCPPKYSKSHSFKLDRHGRPGSTTRKDCPELSEQMEGLSVQVTKNVNDELIHEKYPKVTTSPAPTPRRASSTPRRRLEASKTFHARTAHKEQSQRSRSSANQASQARRESLPMRMIKTPDKRQATDILTRLKSPDVSVNSPRIDRIAEFPLASFETPLHRITKLTSPSIIDQYITKDKCTFQVLRSDSENYTDSPDVDLLGSDNSPRSSSNLRQRRFDTRSYQQRAEALEGLLEFSAQLLQQERFEELGILLKPFGPGKASPRETAIWLSRSLKETGL

SEQ ID NO: 227333 - protein, 336 aa, Zea Mays
MELIAKVRNPYIVEYKDAWVEKGCYVCIVIGYCEGGDMSEAIKKANSNHFSEEKLCVWLVQLLTALDYLHANHILHRDVKCSNIFLTKDQNIRLGDFGLAKVLTSDDLACSVVGTPSYMCPELLADIPYGSKSDIWSLGCCIYEMAAFKPPFKAFDMQALINKINKSAVPPLPTMYSGAFRGLVKSMLRKSPDHRPRAAELLKHPHLQPYVFELQLKSTPRNLFSAKLPTRYVTNKAAVSDAEDNCPPKYSKSHSFKLDRHGRPGSTTRKDCPELSEQMEGLSVQVTKNVNDELIHEKYPKVTTSPAPTPRRASSTPRRRLEASKTFHARTAHKEV

SEQ ID NO: 227334 - protein, 333 aa, Zea Mays
MGACNSCEATAVAAAPGPATAEARVVLADGALRRFPGGTRASQAVKAAAAGAASWFLCSADGLELGGAVVPVRPEEALQPGQLYFVLPAAMRRRPLQAEEMAALAIRASAALAGDHDGPLVFPEAAAAAGAGARCGKGPARFTPFGLGGRRAHAAEAPTALAALRYATLRTAFLRFSGSPLRRKLLEMAAKSGYTRRLPLTGETAPPPPSAVLYVANCGPAVGVTDADVRSTFGAFGEVAGVQAADDSGARIIVRFHEPAAAEAAMAALHGRPCDLLAGRVLHIRYSVPVKPKARPGGSVPVAHAASELGIPGIYMVQEFVTAAEEQVTFSCG

SEQ ID NO: 227335 - protein, 337 aa, Zea Mays
MSLVIIRLQIRPQHSSRRVTTKKEKKRNKIIEKYGHRPEPVATTPVYLSISTREKGRRPGPTTRRNRFFRGEPNQTKPNQPPPLSACPGSSSRPCTLSRRSPSPPPPLPAAPSIKPNRSQPTPHFLPWGTPCTQPPPQPLRLPPPPPPPRGNGKWRPPRPPSPPRPRWSGWASSPRPPTPTTRPRRCPRRSRGSSPCAAPCSTTSGAGAAPTPSSRASPATGTAGPAPSSGWARTPPRPPRWRPTSRSATGSRATRPRSAAPSPRAGAATSRSSSRCCRWPRRCPSRRTRTGSSPRRCTRCARPRTATPTTSPRWPSPSPSSTRSAASPPRRSSRKF

SEQ ID NO: 227336 - protein, 414 aa, Zea Mays
MYIKKVVIEGFKSYKEEISTEPFSPKVNVVVGANGSGKSNFFHAIRFVLSDMFQNLRSEDRGALLHEGAGHSVVSAFVEIVFDNSDNRIPVDKEEVRLRRTIASKKDEYYLDGKHVSKTEVMNLLESAGFSRSNPYYVVQQGKIASLTLMKDSERLDLLKEIGGTRVYEDRRKESLKIMTETANKRKQIDQVVHYLEERLRELDEEKEELKKYQQLDKQRRSLEYTILDHELNDARNELASMDDNRRKISESMSLADNEVVDVREMIKSFDKEIKVSTKGINDTKAQKEGVEKRRTEALKVVAKIELDLRDIKDRIVNEKRAKDEAARDLQSVRRESEKSKSELAEISKVHQAKLKEEEDISKREGRPNSQTKLLEISGFKRKLKISSLYFYQIKSRKVYFKKKSRSLKMKSMI

SEQ ID NO: 227337 - protein, 195 aa, Zea Mays
MAERVSIALDVAEALDYLHNHGQVPIIHCDLKPSNVLLDHDMVARVGDFGLSRFVQGANSNSFQPIANTTGIKGTIGYIPPEYGMGGGVSVEGDVYSYGTLLLEMFTAKRPTDPLFQGGQSIRSYVAAAYPERVTAVADLSLLQHEERNLDEESLEESLVSVFRVALRCTEESPRARMLTRDAIRELAGVRDAYG

SEQ ID NO: 227338 - protein, 557 aa, Zea Mays
MASVGDDAPLLGGGGKAAVWRERCPGCRQQRRVQASDGIPYADFLYVWIACLCASLPVQSLFPYVYFMIRDLKVAKEEQDIGFYAGFVGATYFLGRTISAVPWGMFADKYGRKPCIVISILSVIVFNTLFGLSTTYWMAIVTRGLLGLLCGILGPIKAYASEVCRKEHQALGISLVTSSRAIALVIGPALGGFLAQPAQKYPNLFSEESIFGRFPYFLPCFIISLLAAGSCIACIWLPETLHFHDDDKVEVFEELEAQVGGSESTTNLLKNWQLMSAMILYCIFSLHDTAYMEIFSLWAVSSTKFRGLSLTSQDVGTVLSFSGFGVLVYQLAIYPSLAKYFGPIKTFRPAAILSIILLATYPFMANLHGLELKILINMASVLKNMFAATITTTCNILQNTAVTQEQRGVANGISVTLMSMFKAVAPAAAGILFSWAQKHISGLFLPASRLQCKNLSSQQSPLNVTATCASFAEKRLVLVHATAEGSEAGAEQPEEPKPATKIEEMPLESKQKMIMEQRARMKLAKKLRQRRKRLLRKRKLRKKGRWPPSKMKKLKNV

SEQ ID NO: 227339 - protein, 206 aa, Zea Mays
MSAMILYCIFSLHDTAYMEIFSLWAVSSTKFRGLSLTSQDVGTVLSFSGFGVLVYQLAIYPSLAKYFGPIKTFRPAAILSIILLATYPFMANLHGLELKILINMASVLKNMFAATITTTCNILQNTAVTQEQRGVANGISVTLMSMFKAVAPAAAGILFSWAQKHISGLFLPGDQILFLLLNMVSVIGLVLTFKPFFSLPNSMRHS

SEQ ID NO: 227340 - protein, 1717 aa, Zea Mays
METAAATARPGAARKRRWNQSQPCQGEGPSDLKFARLRFDGDGGAKGAWEHLDLVLSLQSKELSLERKIELAVEFLTTLPNNSSCSIQLLRLVSFIGNWLQSILNFPENSKKILHIFDPALDSRCWAILRVCVEKKPSISISLNLLKSLSRVASHGLGRVDSNTSCPDNESIELFEQVFDCMSLLFSSNTRAFFNAGVDLWASCAIEVVNLAQKVSAKKDNFCPVLQKLANCLLGQFACFLRFYANPKNIFHAFVDKVLGPLLELLVLLNSQAHSSEHKQTGTMLKIVEDVFSNGLFHPQHLSGYFGLRSLNKSSAAKDIKGSYHRHLFQRFKGIKTENKAVLLAGFGYLFQLFVRRARNQRTTVAPSRTTLGTLHKSNDGSEEPQHRESLFEVFIMFMEPIVLECKSYSQKDFSKLGVTRLVEVHCMLKSINVMLITLIEEKIYVPTEDTLEGSHFNFLQDIYSVLILISEKMYKFWMSAVHLEDVNIKKIVPLMFAEIISAVGNFLEIEYKVLGDDLVKLWLMIFALSAINTSSKDIEPCFLLASKISSLSAQVICTFSELRQVSRSIFSLCDAVRAFRVEGPDGVHGSFSVASLSSQECLGSLTTLLSSETLMGAIRTSIKSMPQGQSSRCIEELTSDLTETLNWMADCSFEDDVSKLREPSIARKSIFCQKAELLGRHLSEVYASILDSITVTVSNSTLVGKSVERLVNAVRRNFSHLVRNKSKNINGFISSIMGKNVSKKLHANRQKIPSFSWIFCLFCRLYISCRSLYQQSIGLMPPDVAIDATKLVGNPFIVCSGKEWTNPTNILGKGYFALIDENSNSLLDVIESLSESLSTNCASFAPLVYIFHVMVLQRLNDLNRQIKAFQFLLEDDAWQIDNKDIGNTRLLKESCSLEAAKLMSFVMNYVKLLSSGETGPFGSYDVSSSWDLSLCSLDEGSFPIATWQLLCENIDVWSSHVSKKDLKNFFSNLIRFSFTQKRSSLDKENNGTQSSGREMTLHSVSIGVLCDTIIYEKKVILKNLASSFCHALKKSFSFVTNSDGDNVFLDTSPDLMETISNLENEKLIGTGSGATHAHCLDKHWICEDFLNFFSAVPGFHANSKAFIRLINYILHLERLLLLKLLGLRCESCNPMKLLRLFICCRRALINLILKFGKECPEARQYLSFSNKNGNSYSLVWFLRSVQEIVGSSHKIFDECTDEVNRLMFSLLDKTSELFSTLASLNSSVYLFDLKKQIESSLDGSPIKKETSEHNDQAFDIVEVSALECVRSMAELLQKTATGIPVTIKDSKCVIKIEDCRNTVCWKRLSCSMSCIGGFLQGLNSALESTFNDHPIASPEDRKMLLQYCSRFSSYVAKFGTFVDICVHVLFMDNKDSASIDLVSVHLPQELDCANGFLNIEAIMDELTKCGSHGVDLSKIQYMENVLLENLLKGECPLISFTLREIYSISAAIIKFHGYLSFSSDVSRQTCSPVEQLSLGTMLGIAFITLQKVADMSSWPHMFCLVWIDGVLRYLEVLGSAFTLSELNISIELYTQIINALLRAVGKCILLQQKNATLPTHEIGSSTKTLQLQNASGYAFPKDFIDTQNRLNSLKSRLRLVLGKFVSIASNTHLNAALQVIERALVGVNHCSHSIYQIYTGNPDGGTVSSDVAAGIDCLYMILDFVPGNKRVFKRTVPGLVGALFNIILHLQSPHIFYSQNLPPQVSACSCDTLQRV

SEQ ID NO: 227341 - protein, 1444 aa, Zea Mays
METAAATARPGAARKRRWNQSQPCQGEGPSDLKFARLRFDGDGGAKGAWEHLDLVLSLQSKELSLERKIELAVEFLTTLPNNSSCSIQLLRLVSFIGNWLQSILNFPENSKKILHIFDPALDSRCWAILRVCVEKKPSISISLNLLKSLSRVASHGLGRVDSNTSCPDNESIELFEQVFDCMSLLFSSNTRAFFNAGVDLWASCAIEVVNLAQKVSAKKDNFCPVLQKLANCLLGQFACFLRFYANPKNIFHAFVDKVLGPLLELLVLLNSQAHSSEHKQTGTMLKIVEDVFSNGLFHPQHLSGYFGLRSLNKSSAAKDIKGSYHRHLFQRFKGIKTENKAVLLAGFGYLFQLFVRRARNQRTTVAPSRTTLGTLHKSNDGSEEPQHRESLFEVFIMFMEPIVLECKSYSQKDFSKLGVTRLVEVHCMLKSINVMLITLIEEKIYVPTEDTLEGSHFNFLQDIYSVLILISEKMYKFWMSAVHLEDVNIKKIVPLMFAEIISAVGNFLEIEYKVLGDDLVKLWLMIFALSAINTSSKDIEPCFLLASKISSLSAQVICTFSELRQVSRSIFSLCDAVRAFRVEGPDGVHGSFSVASLSSQECLGSLTTLLSSETLMGAIRTSIKSMPQGQSSRCIEELTSDLTETLNWMADCSFEDDRLNDLNRQIKAFQFLLEDDAWQIDNKDIGNTRLLKESCSLEAAKLMSFVMNYRSSLDKENNGTQSSGREMTLHSVSIGVLCDTIIYEKKVILKNLASSFCHALKKSFSFVTNSDGDNVFLDTSPDLMETISNLENEKLIGTGSGATHAHCLDKHWICEDFLNFFSAVPGFHANSKAFIRLINYILHLERLLLLKLLGLRCESCNPMKLLRLFICCRRALINLILKFGKECPEARQYLSFSNKNGNSYSLVWFLRSVQEIVGSSHKIFDECTDEVNRLMFSLLDKTSELFSTLASLNSSVYLFDLKKQIESSLDGSPIKKETSEHNDQAFDIVEVSALECVRSMAELLQKTATGIPVTIKDSKCVIKIEDCRNTVCWKRLSCSMSCIGGFLQGLNSALESTFNDHPIASPEDRKMLLQYCSRFSSYVAKFGTFVDICVHVLFMDNKDSASIDLVSVHLPQELDCANGFLNIEAIMDELTKCGSHGVDLSKIQYMENVLLENLLKGECPLISFTLREIYSISAAIIKFHGYLSFSSDVSRQTCSPVEQLSLGTMLGIAFITLQKVADMSSWPHMFCLVWIDGVLRYLEVLGSAFTLSELNISIELYTQIINALLRAVGKCILLQQKNATLPTHEIGSSTKTLQLQNASGYAFPKDFIDTQNRLNSLKSRLRLVLGKFVSIASNTHLNAALQVIERALVGVNHCSHSIYQIYTGNPDGGTVSSDVAAGIDCLYMILDFVPGNKRVFKRTVPGLVGALFNIILHLQSPHIFYSQNLPPQVSACSCDTLQRV

SEQ ID NO: 227342 - protein, 1806 aa, Zea Mays
METAAATARPGAARKRRWNQSQPCQGEGPSDLKFARLRFDGDGGAKGAWEHLDLVLSLQSKELSLERKIELAVEFLTTLPNNSSCSIQLLRLVSFIGNWLQSILNFPENSKKILHIFDPALDSRCWAILRVCVEKKPSISISLNLLKSLSRVASHGLGRVDSNTSCPDNESIELFEQVFDCMSLLFSSNTRAFFNAGVDLWASCAIEVVNLAQKVSAKKDNFCPVLQKLANCLLGQFACFLRFYANPKNIFHAFVDKVLGPLLELLVLLNSQAHSSEHKQTGTMLKIVEDVFSNGLFHPQHLSGYFGLRSLNKSSAAKDIKGSYHRHLFQRFKGIKTENKAVLLAGFGYLFQLFVRRARNQRTTVAPSRTTLGTLHKSNDGSEEPQHRESLFEVFIMFMEPIVLECKSYSQKDFSKLGVTRLVEVHCMLKSINVMLITLIEEKIYVPTEDTLEGSHFNFLQDIYSVLILISEKMYKFWMSAVHLEDVNIKKIVPLMFAEIISAVGNFLEIEYKVLGDDLVKLWLMIFALSAINTSSKDIEPCFLLASKISSLSAQVICTFSELRQVSRSIFSLCDAVRAFRVEGPDGVHGSFSVASLSSQECLGSLTTLLSSETLMGAIRTSIKSMPQGQSSRCIEELTSDLTETLNWMADCSFEDDVSKLREPSIARKSIFCQKAELLGRHLSEVYASILDSITVTVSNSTLVGKSVERLVNAVRRNFSHLVRNKSKNINGFISSIMGKNVSKKLHANRQKIPSFSWIFCLFCRLYISCRSLYQQSIGLMPPDVAIDATKLVGNPFIVCSGKEWTNPTNILGKGYFALIDENSNSLLDVIESLSESLSTNCASFAPLVYIFHVMVLQRLNDLNRQIKAFQFLLEDDAWQIDNKDIGNTRLLKESCSLEAAKLMSFVMNYVKLLSSGETGPFGSYDVSSSWDLSLCSLDEGSFPIATWQLLCENIDVWSSHVSKKDLKNFFSNLIRFSFTQKRSSLDKENNGTQSSGREMTLHSVSIGVLCDTIIYEKKVILKNLASSFCHALKKSFSFVTNSDGDNVFLDTSPDLMETISNLENEKLIGTGSGATHAHCLDKHWICEDFLNFFSAVPGFHANSKAFIRLINYILHLERLLLLKLLGLRCESCNPMKLLRLFICCRRALINLILKFGKECPEARQYLSFSNKNGNSYSLVWFLRSVQEIVGSSHKIFDECTDEVNRLMFSLLDKTSELFSTLASLNSSVYLFDLKKQIESSLDGSPIKKETSEHNDQAFDIVEVSALECVRSMAELLQKTATGIPVTIKDSKCVIKIEDCRNTVCWKRLSCSMSCIGGFLQGLNSALESTFNDHPIASPEDRKMLLQYCSRFSSYVAKFGTFVDICVHVLFMDNKDSASIDLVSVHLPQELDCANGFLNIEAIMDELTKCGSHGVDLSKIQYMENVLLENLLKGECPLISFTLREIYSISAAIIKFHGYLSFSSDVSRQTCSPVEQLSLGTMLGIAFITLQKVADMSSWPHMFCLVWIDGVLRYLEVLGSAFTLSELNISIELYTQIINALLRAVGKCILLQQKNATLPTHEIGSSTKTLQLQNASGYAFPKDFIDTQNRLNSLKSRLRLVLGKFVSIASNTHLNAALQVIERALVGVNHCSHSIYQIYTGNPDGGTVSSDVAAGIDCLYMILDFVPGNKRVFKRTVPGLVGALFNIILHLQSPHIFYSQNLPPQGSVFHPDAGATVLMCVEVITSFVGRHSFQIDASHVSQCLLVPVTLFKEFKHLLAKYCNQSVQHHGDHAEYILDRQFSVDIYAACCKLLCTTLRHQQRFEDD

SEQ ID NO: 227343 - protein, 586 aa, Zea Mays
MQWTEKYRPKVPNDIVGNQSMVKQLHDWLKSWDALFLHSGQKGKGKKQTDSAAKKAVLLSGPPGIGKTTTAKVVSQMLGLQAIEVNASDSRGKADSKIEKGVGGSTSNSIKELINNATLNYSDNRLKHPKAVLVMDEVDGMSAGDRGGVADLIASIKISKIPIICICNDRYSQKLKNLVNYCLMLNFRKPTKQQMGKRLMEIAKKEGIQAQENAMEELAERVHGDIRMALNHLQYMSLSQSVVKYDDIKERLNSSSKDEDISPFTAVDKLFGFNGGRLRMDERMDFGMSDPDLVPLIIQENYINYRPNTIGKDESGVKRMNALARAAESIADGDLVNVQIRRYRQWQLSQAACFASSIVPAALMHGNREILEAGERNFNRFGGWLGKYSTTNKNRRLLEDVHSHILASQQANLDRDALRLDYLTLILRELTDPLKKMSKDEAVQKVVEFMDTYSLSQEDFDTIVEVSKFKGHPSPMDGIQPAVKSALTKAYKQGSSSRVVRAADLINIPGMKKPLKKRVAAILEPVEESLPEENGLASAEDDEDGSSDAENNDELVPADSTPKLDLQSDKKKGSHTCWAYGAYPSL

SEQ ID NO: 227344 - protein, 586 aa, Zea Mays; identical to SEQ ID NO: 227343

SEQ ID NO: 227345 - protein, 1033 aa, Zea Mays
MEAHGDQRWLVDCLTATLDTARDVRAFAEESLRQASLLPGYGAALTKVTINKEISFGLRQLAAVLLKQFIKQHWQEDEENFVPPVVSASEKVVIRQLLLTSLDDSNGKIRTAISMAVAAIGQQDWPEDWPELLPVLLKLIGDQSNGNEVRGALRCLALLSDDLDDMCVPKLVPELFPSLYRIISSPHLYENSLRAKAFAIVHSCISMLGSMSGVYKRDTASLMTSVLDPLIEQFSIVLNYPVQSQNPDDWSMQMEVLKCLLQLVQNFPRLPEAKISGKICAAILPALWQTFVSSFKTYHLSYIQGAETLDSISYDSDGSEKSLESFEIQLFELWTTIVGNSRLAKVIGGNIKELAYYTIALQQITEEQVQNWSRDANQYVADEDDLTYSCRVSGSLLLEELVTAYEDYGIDSIVEASQMRFHESRELKEAGSADWWRLHEASLFALGSLSEQLCEAQDSGLTKYNVRDLLEQMLIDIMGTGVHQYPFLHARAFSSVAKFSSLISKGVSEQYLCNAAHAIASDVPPPVKVGACRALAQLLPESNQNLIQPNIMGILSSLVDLLRQASDETLHLVLETLQSAIKSGGEQSTLIEPVISPIILDVWAQHIADPFISIDAVEVLEAIKNAPGCLQPLVSRILPTIGSILVKPKVQPDGLVAGSLDLLTMVLKNAPVAVVKAVFDTCFVSTVQIVLESDDHGEMQNATECLAAFISGGRQELLVWGGEQGQTLKMLLDAASRLLDPALESSVSLFVGSFVLQLILQIPLHLSPHIPDLIAAIMRRMQTSSIAGLKSSLIVIIARLVHMSAPNVDGFINLLLSIPAQGYDNSLVYIMSEWSQLQGEIQGAYQIKVTTTALALLISTRHPELSKVEVQGHLIKTSAGITTRSKARVTPDQWTKIPLPVKIFSLLADTLTEIQEQIGAGDDDDSEEDNDWEEVQNGDASISDDIIHSASVPSMTNPSVEHLNAMAKVFDEDDDDSYDDDLTKNDPLNEVKLADFLTNIFANLWENNRPIFEYLCQGLSDSQRSAVEKVLRR

SEQ ID NO: 227346 - protein, 413 aa, Zea Mays
MDGYCLFSCSQDNSARCWISHENHLEEIFMHSNFPELRESADLSELSDRCYGLTLAPGEQMIAVVRSLDLNLLNQMYQVRTQKAVVEFIWIGGQFVGIPLDRSIDICSSQSTDLSSSNLMWWGSNILWSLKKYENVEKRLVIWDVVAVLQELKKSAPAFLETLVHSWVSVLLSGDPQCVSIDAPSRSMHDMMPYVSTRKLHLLNIMCRKVMVSIHTHHGPGAENGNEETTDFWSTLLVRSETELRERLVGFTFAAVLKRTAYLFNGTSTENCWFPVGVAQMDSWVTMNYDGQVHDQLQSIRSKIKDLGSSCPYCSSPVHFESPDVAICGERHTLPRCRASMILCSVVQPLWHCVCCGGTVNKLLPESFFTMQASTMHDEGSLDLSAASVPLCPFCGILLQRSMPAFLLSTSPA

SEQ ID NO: 227347 - protein, 879 aa, Zea Mays
MAPQYQAATLIASPSYPSAIAWSSDNLVAVASGHIVTILNPSALDGPRGLVGLCRSDPFPIGLVNREDLLEPCLLSTSLARETEPCARSISWSQQGFAPNSGCLLAVCTMDGHVKLYRSPIWELCDEWVEVADISQLLFNYYKLINFGEDNGSHLTSLNTNTGETEVLGSAYELQESLYFRCPGQRKLKRSRVDGFIYDVNEVDLDASKDADFSIEPCSKSKKKYLKKTVKPRHEVVAVNERNNTGNIKGSLSSNGENKSLPLITAKQYACRAAHLSSLVVSWSPVVSSSDKTSCLLRHWCIIAVGSKSGNLSFWKLPKPEYYTIDAGVVTSDPMLIGVLQAHKSCVSVIAWQVLSAGSSKSSLLLATGCSDGSVKIWLGNIEGLNQCASGEVPFALVAVVATDLSSPVSSISLAIPAQSQHEVSLAIGRVSGSLEIWIWNASSNKIEIFSAWHAHDQVVTGLQWAMDGYCLFSCSQDNSARCWISHENHLEEIFMHSNFPELRESADLSELSDRCYGLTLAPGEQMIAVVRSLDLNLLNQMYQVRTQKAVVEFIWIGGQFVGIPLDRSIDICSSQSTDLSSSNLMWWGSNILWSLKKYENVEKRLVIWDVVAVLQELKKSAPAFLETLVHSWVSVLLSGDPQCVSIDAPSRSMHDMMPYVSTRKLHLLNIMCRKVMVSIHTHHGPGAENGNEETTDFWSTLLVRSETELRERLVGFTFAAVLKRTAYLFNGTSTENCWFPVGVAQMDSWVTMNYDGQVHDQLQSIRSKIKDLGSSCPYCSSPVHFESPDVAICGERHTLPRCRASMILCSVVQPLWHCVCCGGTVNKLLPESFFTMQASTMHDEGSLDLSAASVPLCPFCGILLQRSMPAFLLSTSPA

SEQ ID NO: 227348 - protein, 501 aa, Zea Mays
MAPQYQAATLIASPSYPSAIAWSSDNLVAVASGHIVTILNPSALDGPRGLVGLCRSDPFPIGLVNREDLLEPCLLSTSLARETEPCARSISWSQQGFAPNSGCLLAVCTMDGHVKLYRSPIWELCDEWVEVADISQLLFNYYKLINFGEDNGSHLTSLKNTNTGETEVLGSAYELQESLYFRCPGQRKLKRSRVDGFIYDVNEVDLDASKDADFSIEPCSKSKKKYLKKTVKPRHEVVAVNERNNTGNIKGSLSSNGENKSLPLITAKQYACRAAHLSSLVVSWSPVVSSSDKTSCLLRHWCIIAVGSKSGNLSFWKLPKPEYYTIDAGVVTSDPMLIGVLQAHKSCVSVIAWQVLSAGSSKSSLLLATGCSDGSVKIWLGNIEGLNQCASGEVPFALVAVVATDLSSPVSSISLAIPAQSQHEVSLAIGRVSGSLEIWIWNASSNKIEIFSAWHAHDQVVYNGLWMAIVYSAAVRTILHVVGSLTKTTLKKFLCIQIFQS

SEQ ID NO: 227349 - protein, 644 aa, Zea Mays
MNEKEIRHLCSYLQDLKKASAEEMRRSVYANYAAFIRTSKEISDLEGELLSIRNLLNTQAALIHGLSEGVQIDSLTSGPEGSAEDDISNVEDQEPSEIQKWSADFPDMLDVLLAERRVDEALDALDEAERVAVDAKRKQTLTAAEVLALKRSISDNRQRLADQLAEAACQSSTRGIELRAAASALKRLGDGPRAHSLLLSAHNQRLQCNMQTIHPSSTSYGGAYTAALAQQVFSVIAQALSDSVDVFGDESCYASELVTWATKQVMSFALLVKRHVLSSCAAAGGLRAAAECVQISLGHCSLLEARGLSVSSVLLKQFKPSLEQALDANLRRIEESTAALAAADNWILTYPPTGIRPLTRLSAANLALQPKLSSSGHRFNSMVQDFFEDVAPLLSLQLGGSTMDGITQIFNSYVNLLINALPGSMDDEANLDGLGNKIVRMAETEEQQLALLANASLLAEELLPRAAMKLSSINQSMDDLCKRGTDKQSRVPEQREWKRKLHRMVDRLRDSFCRQHALELIFTDEGDTHLSAEMYISMDNTVEEPEWVPSPIFQELYAKLNRMASIAAEMFVGRERFATLLMMRLTETVILWLSEDQAFWEEIEQGAKPLGPLGLQQVVFSLDMYIKSFWTSLIEQWLHFLLLE

SEQ ID NO: 227350 - protein, 263 aa, Zea Mays
MALHAVSPAAVSSPLRALSRSLPQRSGCGCLPKQSVTICSSTNFARKLQDGPVDFAARRLVLGHSDKRRVVTDIEIEAEKSLIEDQAKEKMEKAIETVQTNFNTVRTGRASPAMLDRIEVEYYGTPVNLKSIAQISTPDATSLLIQPYDKSSLKLIEKTIVAANLGVTPSNDGEVIRVTVPPLTSDRRKELAKTVAKLAEDGKVAIRNIRRDAIKAYDKLQKEKKLSEDNVKDLSADLQKVTDEYMKNIDSIQKQKEQELMKI

SEQ ID NO: 227351 - protein, 58 aa, Zea Mays
MLVMVFVQLLHYVLLPGVIVVWPPPLLLLGSVISTRRSGLALRLLGRPRLVPKRQLWP

SEQ ID NO: 227352 - protein, 302 aa, Zea Mays
MCTFSNHESMVYCEMCGVFRETFVKSAKDGLLKDTAVAVSSEPRTSAASKNDSAKAPVKTRAVNSDGDSMRKHASMSYDKANSTQLPSAGSSLGAEKKKKTPVLSEEVPVERIALLASDGFQSKGNQNSGASSSSQNDNVIQKLSSDVGQLNVNKNNVNVTKSCLPDEYKPEKWMLADLESRALSQLNLAIVGHVDSGKSTLSGRLLHLLGRISKKYMHKNEKESKEKLAWMAKEEKVLARLKSMLSLLEALVLNSLLSQSTRWMLLIMQKKGLISSSYNLVVSCGHATSRTQLLPGFLLVL

SEQ ID NO: 227353 - protein, 311 aa, Zea Mays
MVRLTGGPNCTGDKRLQVIITGSPDGTERIYNKPRARGSQAQEEREGSPSQSQSRRVITPYDTEDTEPEAKSVRSARVAASRQPSSNCMAAVPASAPAAAEAAELVPTLSSLEPVYGAGAQLDESRLRFARLGDRFHAVYGARPALFARSPGRVNLIGEHIDYEGYSVLPMAIRQDMIVAIRRANGAQVRVANVDDKYPLCVYPADPDKEIDVKNHKWGHYFMCGYKGVYEYCRSKGIDLGKPVALDVVVDGTVPQGSGLSSSAAFVCSATIAIMGILDKNFPKKEVAQFTCLSERHIGTQSGGMDQVVHL

SEQ ID NO: 227354 - protein, 277 aa, Zea Mays
MAPRSVLHDGPGTDSFSSPSLSLFATLVWAPTVVMGACAAFGRIYDICSCPHARYRLAQSRPNKVHGAWLPPWLATHYARYMEVVSGHWNYHGKPVVQNVLHKASEKSAHAKKWAEPHIETAKMKWIPVKEKLVVLKKNAEPYVQKVSTRSVEFYESSRDAVTPHVVKVKEFAHPYYQEAKKFSKPYIDQIAEITKPHVEKVRTTLKPYTKRAVHAYGSFLASATTYHRQAQATIMDYLHQHGVPKSLATKELVWFLASALLALPVFVIYRLVVETF

SEQ ID NO: 227355 - protein, 87 aa, Zea Mays
MCRGCDVLFGLLYLHALFDLENGNQELKSDLKDLYINNAIQMDVTGSRKAVVIHVPYRLRKAFRKIHVRLVRELEKKFSGKNNTFFL

SEQ ID NO: 227356 - protein, 626 aa, Zea Mays
MAENDTVQLQRAIFAQYIMMKRLFMELEVEREASATAASAAMSMIRKLQKEKDAERMEAWQYKRIAEEKINHTNRALDILKEVVELKQLEISYLRYQLQVCKQKLLDAGIDDCDVADETIDSDKSLFGRNNMENLCHKIKRNSSLPTLQLNKQCTDMDIKKNGGVPSARSRLTDDGCEQISIDVMALEPKESFATDLNFRGKHGEEAHSPRSGSESQTLDDPPCCSSFSVVSHQADICSDGAVQTREDKECTVNHDQLKDSCVHESETSDEPPCSSSLSVVSHQADICSDGEVPTREHNECAVNHDHLKDSCVHDSETLDEPPCSSSFSVESHQADICSDAAVQTREDNDCTVNHDQLKDSCVHDDSETLDEPPCSSSFSVVSHQADICSDGEVPTREDNECAVNHDHLKDSCVRDSQTLDEPPCSSSFSAGADICSDGAVQARGDMECTVVNHVRLKDSCAGTEIGELVAHPLSEVDPLQTPKRSNKATDSSCTGSEITTVEEPQLSPRGVTKARGPRNLSRFAETRKVGSMNNVDRHVRRSSGTYSPRAAGVERTMSKLKRVQSEKMVELGDPRTGREQIIMLKEVYEQLRMIESHMRPSGSQESPRSATSLDSVMEAALSFSL

SEQ ID NO: 227357 - protein, 130 aa, Zea Mays
MKGGYRRVLQRPIDFEWDLMTYTDDNTPLVPTDLDVLSETQLSETNEPLSDGTCSCPSSDSRLQVLLDTSGPTIEASSVETKSIGISDLSPEKLAVKLEFTLPASSYATMAIRELTKTSTSVACQKTLNG

SEQ ID NO: 227358 - protein, 950 aa, Zea Mays
MPFQVMDPRHHLSQFTNTTVAASSFSEEQLRLPTERLVGFWKQESLHHIGSKSVASSPIEKPQPIGTKTMGRVDPQPYKPRGQKSAFSLEHKTFGQERHVNMPPSLWRADQDPYVQSDSSLFPDGRSTNPYEAYNENGLFSSSLSEIFDRKLGLRSNDVLLHQPLEKVEPTHVDDEPFELTEEIEAQIIGNILPDDDDLLSGVDVGYTAHASNGDDVDDDIFYTGGGMELETVENKKSTEPNSGANDGLGSLNGTMNGQHPYGEHPSRTLFVQNINSNVEDSELKVLFEHYGEISNLYTACKHRGFVMISYYDIRSSWNAMRALQNKPLRHRKLDIHYSIPKDNPSGKDINQGMLVVFNVDPSVTNNDIHKIFSDYGEIKEIRDAPQKGHHKVIEFYDVRAAEGAVRALNRSDLAGKKINLGTVGLSGVRRLTQHMSKESGQEEFGVCKLGSLSTNSPPLPSLAMTSSGRENGSIHGLHSGLLTSMSPFREASFPGLSSTIPQSLSSPIGIASATTHSNQAPLGELSHSLSRMNGHMNYGFQGLGALHPHSLPEVHDGANNGTPYNLNTMVPIGVNSNSRTAEAVDCRHLHKVGSSNLNGHSFDRVGEGAMGFSRSGSGPVHGHQLMWNNSNNLQRHPNSPVLWQNPGSFVNNVPSRSPAQMHGVPRAPSHMIENVLPMHHHHVGSAPAINPSLWDRRHGYAGELTEASSFHLGSVGSLGFPGSPQLHGLELNNIFSHTGGNRMDPTVSSAQISAPSPQQRGPMFHGRNPMVPLPSFDSPGERIRSMRNDSGANQSDNKRQYELDVDRIMRGVDSRTTLMIKNIPNKYTSKMLLAAIDESHKGTYDFIYLPIDFKNKCNVGYAFINMTNAQHIIPFYQTFNGKKWEKFNSEKVASLAYARIQGKTALIAHFQNSSLMNEDKRCRPILFHSDGPNAGDQVEVQKIYLYKKT

SEQ ID NO: 227359 - protein, 826 aa, Zea Mays
MPFQVMDPRHHLSQFTNTTVAASSFSEEQLRLPTERLVGFWKQESLHHIGSKSVASSPIEKPQPIGTKTMGRVDPQPYKPRGQKSAFSLEHKTFGQERHVNMPPSLWRADQDPYVQSDSSLFPDGRSTNPYEAYNENGLFSSSLSEIFDRKLGLRSNDVLLHQPLEKVEPTHVDDEPFELTEEIEAQIIGNILPDDDDLLSGVDVGYTAHASNGDDVDDDIFYTGGGMELETVENKKSTEPNSGANDGLGSLNGTMNGQHPYGEHPSRTLFVQNINSNVEDSELKVLFEHYGEISNLYTACKHRGFVMISYYDIRSSWNAMRALQNKPLRHRKLDIHYSIPKDNPSGKDINQGMLVVFNVDPSVTNNDIHKIFSDYGEIKEIRDAPQKGHHKVIEFYDVRAAEGAVRALNRSDLAGKKINLGTVGLSGVRRLTQHMSKESGQEEFGVCKLGSLSTNSPPLPSLGSSYMVAMTSSGRENGSIHGLHSGLLTSMSPFREASFPGLSSTIPQSLSSPIGIASATTHSNQAPLGELSHSLSRMNGHMNYGFQGLGALHPHSLPEVHDGANNGTPYNLNTMVPIGVNSNSRTAEAVDCRHLHKVGSSNLNGHSFDRVGEGAMGFSRSGSGPVHGHQLMWNNSNNLQRHPNSPVLWQNPGSFVNNVPSRSPAQMHGVPRAPSHMIENVLPMHHHHVGSAPAINPSLWDRRHGYAGELTEASSFHLGSVGSLGFPGSPQLHGLELNNIFSHTGGNRMDPTVSSAQISAPSPQQRGPMFHGRNPMVPLPSFDSPGIPPRCSWLLLMKVIRALMTLFTCQLILRINVMLAMLSST

SEQ ID NO: 227360 - protein, 984 aa, Zea Mays
MPFQVMDPRHHLSQFTNTTVAASSFSEEQLRLPTERLVGFWKQESLHHIGSKSVASSPIEKPQPIGTKTMGRVDPQPYKPRGQKSAFSLEHKTFGQERHVNMPPSLWRADQDPYVQSDSSLFPDGRSTNPYEAYNENGLFSSSLSEIFDRKLGLRSNDVLLHQPLEKVEPTHVDDEPFELTEEIEAQIIGNILPDDDDLLSGVDVGYTAHASNGDDVDDDIFYTGGGMELETVENKKSTEPNSGANDGLGSLNGTMNGQHPYGEHPSRTLFVQNINSNVEDSELKVLFEHYGEISNLYTACKHRGFVMISYYDIRSSWNAMRALQNKPLRHRKLDIHYSIPKDNPSGKDINQGMLVVFNVDPSVTNNDIHKIFSDYGEIKEIRDAPQKGHHKVIEFYDVRAAEGAVRALNRSDLAGKKINLGTVGLSGVRRLTQHMSKESGQEEFGVCKLGSLSTNSPPLPSLGSSYMVAMTSSGRENGSIHGLHSGLLTSMSPFREASFPGLSSTIPQSLSSPIGIASATTHSNQAPLGELSHSLSRMNGHMNYGFQGLGALHPHSLPEVHDGANNGTPYNLNTMVPIGVNSNSRTAEAVDCRHLHKVGSSNLNGHSFDRVGEGAMGFSRSGSGPVHGHQLMWNNSNNLQRHPNSPVLWQNPGSFVNNVPSRSPAQMHGVPRAPSHMIENVLPMHHHHVGSAPAINPSLWDRRHGYAGELTEASSFHLGSVGSLGFPGSPQLHGLELNNIFSHTGGNRMDPTVSSAQISAPSPQQRGPMFHGRNPMVPLPSFDSPGERIRSMRNDSGANQSDNKRQYELDVDRIMRGVDSRTTLMIKNIPNKYTSKMLLAAIDESHKGTYDFIYLPIDFKNKCNVGYAFINMTNAQHIIPFYQTFNGKKWEKFNSEKVASLAYARIQGKTALIAHFQNSSLMNEDKRCRPILFHSDGPNAGDQSYYNKFTNYNIEKGVPNATVGSTAALGLPFTNYNIEMSTN

SEQ ID NO: 227361 - protein, 220 aa, Zea Mays
MARQQVKKIARNMPQYQACLDVIEEGVLFGGHSGVLKEYKVFKELVPSPTARALVHIFLAQRLSTKVPGVTDVHLKPRQIRKVGIIGGGLMGSGIATALLVSNISVVLKEVNPQVLQRGQKTIAANLEDLVKRGSLAKDRINKVMSLLKGTLDYSDFKDVDMAIEAVIEDIPLKQSTFSDIEKFCPPHCILATNTSTISLNVIGKRTNSQDRIVGAHFFR

SEQ ID NO: 227362 - protein, 338 aa, Zea Mays
MAVEETAESCGSHAATAASGGGAAGPATSSSSAAAAAQARKQQQQQRHKLEVYTEVLRRLHDAGLPDARAPGFDDELWNHFNRLPARYAMDVNVERAEDVLTHKRLLEQAKDPAHRPAFAVRSVQVSPILDGNQTDSDSNTAGEEVASRLLNRQQSIYPPPAFGSSTNLEALALEASKSHDHDSTSDNGRSLYRPMHEITFSTIDKPKLLSELTSLLGELGLNIQEAHAFSTNDGYSLDVFVVVGWHDEETEDLVEAVQKEIGRIEETQAWSSSHSWSTPVEKMQIAENSAADRVEIPTDGASEWEIDVKLLKFGNKVASGSYVTGVHIAVKMLLLKC

SEQ ID NO: 227363 - protein, 241 aa, Zea Mays
MASCDLLDVDPLELQFPFVLDKQIPCPLRLANRTDRTVAFKVKTTNPRKYCVRPNNGIVPPRSLCTVVVTMQAQTVVPPDLQCKDKFMVQSVVISDSLSAKDITSQMFAKEGGNVLQEVKLKVAYVMPPEPPSEIAEEHDGLDRVLVPMQRIVDNGKSTSELSSGSVSLRSAEEFGSPVGRIVKSEEFLKAAGPAMETKTYAGPGEQSHQLSAIITKLTEEKNSALEQNRKLQVELEILNF

SEQ ID NO: 227364 - protein, 852 aa, Zea Mays
MPLPKIHYNMTGGLIFLLLFYFAYISFLQVLLSQSHRFRALVLLGRFLDMGPWAVDLALSVGIFPYVLKLLPTNTIELRQILVFIWTKILSLDKSCQVDLVKDGGHTYFIRFLDSLDAFPEQRAMAAFVIAVIVDGHRMGQEACMNAGLIDVCLRHLQPENLHAQTEPLLLQWLCLCLGKLWEDFPEAQLLGLQTNAPETVICLLSEPRPEVRAAAVFALGNLTTLSNCPDDDSDDDEKVKAEINVVRSLLQISSDGSPLVRSEVAIALTHFALGHNKNLKSVAAEYWKPQSKSLLKSLPSLANINNPSNVYSPNNILQGSIGPVLRVGSDSGAAGRDGHISTSSPIAASSIMHGSPQSDDSSQHSDSGILLRENASNGGLSYTRSRPVDNVIYSQFISTMCSVSKDPDPRIATIGWRALTLIGVEQVAMKSTRFNSGGLHRGETSASTFGMAHSSSWRDMNSGPSNAELKKLPESTIYNWSCGHFSRPLLTASDDNEETNARREERERIALDFITKCQRSSCKITSQIASWDTRFELGTKAALLLPFSPIVVAADENEKISVWNYDDAQPVNSFHNHKLSDRGLSKLLLINELDECLLLAASSDGNVRIWKNFACKGGQKLVTAFSSVQGHRAAGRSIVIDWQQQSCYLYASGDMSSILVWDLDKEQLLNTIPSSADSAISALSASQVRSGYFAAGFADGSVRIYDVCSPDSRPVYVARPHAPRTEKVVGIGFQPGFDPYEIVSASQAGDIQFLDVRMAAEPYLTIEAHRGSLTALAVHRHAPVVASSAKQMIKVFSLEGEQLRIIRYLPSFMGQRTGSVNCLSFHPYKSLLAAGAGHNALVSIYAEENYK

SEQ ID NO: 227365 - protein, 694 aa, Zea Mays
MAVGDALRRLCEEIGWSYAVFWKAIGAADPVHLVREDGYCGHTSCPVGSEPSESLPLPSDAGCSVPAADTICWLVNNDMASQVHVVGQGIVGRAAFSGNHQWIVHGTANGHGLSSEVAAEVNNQFRVGIKTIAIIPVLPRGVLQLGSTGLVMENTNFVMFAKKLCSQLNNRSSMAASASVKNTSSQHGQSRPDTATVSTSTPPNALLSASLLKVAQQNGHPVREHSVYAERDLRFIQQASICESQFGSNLQSGVMNSCLTSPSFASVKKQSLLMNSIGQLQFSNNVHSSADLAREIILKSLGRQDSSVCENTNMNMHRGRYVVSNDINGSRNFDFLPIGAKESRANLSIPASSQILDHMPGTLQQKQSLVPFRVTQSSEFSKKVENPESGSFQIPSVTTSDSGGQVSNSFNMVQENRLSMSNNVRQVQKIDRFSDPSANVSTQRMKNRDECEPGMPIERASSFLVEPGADNDLFDMFGSEFHQSSHNVGADLVTWSGTESQNSDRDVPESSICFNSSPLFSSLDNELHYSGILSLTDTDQLLDAVISNVNPSGKQCPDNSASCKTALMDVPSTSHLCSIDLKRCESPSVPSLLIKHELAQFAKQPCLVDKSEDGCLSQNNGMHKSQIRLWIESGQNMKCESASASNSKGLDVPSKANRKRSRPGESPKPRPKDRQLIQDRIKELRELVPNGAKH

SEQ ID NO: 227366 - protein, 99 aa, Zea Mays
MTLAHSKQEEEAKKLMDSTDKIKKRLAAKEVEVQEAKSTLDAKVMTICNIVYESMPFSDDEANNKIVRAFGEKRVEDNLKNHVDLCRMLDIVALEKDIL

SEQ ID NO: 227367 - protein, 415 aa, Zea Mays
MRLFKSTNGGDTCWPLDDNEEGESVSSDDLILHLDSFQEPIMWSDLLNAVQSILPAKAWNSLSPDLYAAFWGLTLYDLHFPKDRYDTEIKKLHENLKQLEDNSDNSSIAISRRKKDKERIQDLLDRLNSESQKHQQHVASVVQRLAREKDKWLSSSPDAMKINMEFLQRCIFPRCVFSMQDAVYCATFVQTLHSLGTPFFNTVNHIDVLVCKTLQPMICCCTEFEAGRLGRFFHDTLKMAYYWKSDESVYERECANKPGFAVYFRYPNSQRVSYSQFVRVHWKWSSRITKALNQCMESKEYMEIRNALIVLTKISSVFPVIRKSGVNLEKRVAKLKGDEREDLKVLATGVAAALAARKSSWLSEEEFGGGHIDLKPATARSVLGNQSADLSMAKDQNARAKSVENRHESGCTCNG

SEQ ID NO: 227368 - protein, 323 aa, Zea Mays
MGLTQLPSELIRLISAFPYTGGGGHTYLSEPLWWAGMTTMLLGEVANFIAYIFAPAVLVTPLGALSIIVSSVLAHFVLKERLEKLGVLGCVSCIVGSVVVVMHAPEEHMPNSVKEIWNLATQPGFLAYVVTALLLVGALVLFFEPRYGQTNILIYLGICSSMGSLTVVSIKAIGVAIKLTLDGVNQAAYPYTWLFLMVAIVCGVSQINYLNKALDTFNLAIVSPIYYVMFTTLTIVASGIMFKDWAGQSLSSIASELCGLITILSGTILLHTAEEGANNSAALLPWPLDKGSISWCINLSSDNLLKNVEEDYFTALQSSPAPV

SEQ ID NO: 227369 - protein, 705 aa, Zea Mays
MSTRDGGGGRRGGNAAAGRGGDGQGRGRGGGGRGGAGGRGGGGQWRAQGGAELGGGRGGAVGAARGGRGGVERGGHQSFHGARPVGGDRGGRGHYHHGVPAQVQPQWQVAAPPSTSRPTPAEVEELRGEVERKAAVAVPDAEAHEGPSSGTAHEPSAAPARVEAEQGTSLVVEADQAAQGRLPPSSSKALVFPARPGYGTLGRRCRVRANHFFVQVADKEIYHYDVVISPESQSRKRNRWILNELVKLHKNYLNGRLPVYDGRKGLFTAGPLPFKTKEFVLELTNPERANQGAKEYSVTIKDAAKLDLYSLRQFLAGRQRELPQDTVQALDIAMRECPTEKYVSISRSFFSQSFGHGGDIGSGVECWRGYYQSLRATQMGLSLNIDISATAFYKAQPILEFALEYLNIRDTSRRLSDQDRLKLKKVLKGVRVVATHRRDIAIHYKITGITSLPLNSLTFNQDGASVSVVQYFKHQYNYSLKHIHWPCLQSGNDSRPTYLPMEVCSILGGQRYSRKLNEYQVTSILKKACERPPQREGSILEVVNRNDYGNDHCAKEFGIKVTNELALVDARVLPAPTLKYHDSGREKVCSPSVGQWNMNNKRLIDGVSIQYWACVTFASRLHPNDVRMFCNNLVGACNDMGMQINGRPCVDVGQARPDNLEAALRNTHRQSAQMLAQQGVTRQLDLLIVVLPDANASVFYALTCL

SEQ ID NO: 227370 - protein, 1014 aa, Zea Mays
MSTRDGGGGRRGGNAAAGRGGDGQGRGRGGGGRGGAGGRGGGGQWRAQGGAELGGGRGGAVGAARGGRGGVERGGHQSFHGARPVGGDRGGRGHYHHGVPAQVQPQWQVAAPPSTSRPTPAEVEELRGEVERKAAVAVPDAEAHEGPSSGTAHEPSAAPARVEAEQGTSLVVEADQAAQGRLPPSSSKALVFPARPGYGTLGRRCRVRANHFFVQVADKEIYHYDVVISPESQSRKRNRWILNELVKLHKNYLNGRLPVYDGRKGLFTAGPLPFKTKEFVLELTNPERANQGAKEYSVTIKDAAKLDLYSLRQFLAGRQRELPQDTVQALDIAMRECPTEKYVSISRSFFSQSFGHGGDIGSGVECWRGYYQSLRATQMGLSLNIDISATAFYKAQPILEFALEYLNIRDTSRRLSDQDRLKLKKVLKGVRVVATHRRDIAIHYKITGITSLPLNSLTFNQDGASVSVVQYFKHQYNYSLKHIHWPCLQSGNDSRPTYLPMEVCSILGGQRYSRKLNEYQVTSILKKACERPPQREGSILEVVNRNDYGNDHCAKEFGIKVTNELALVDARVLPAPTLKYHDSGREKVCSPSVGQWNMNNKQINGRPCVDVGQARPDNLEAALRNTHRQSAQMLAQQGVTRQLDLLIVVLPDANASVFYGRIKRLCETELGLVTQCCQPKNVFKGGRQYLQNLALKINVKVGGRNTVLEDALNRRIHLLTDLPTIIFGADVTHPAPGEDASPSIAAVVASMDWPQVAKYRCLVSSQGHREEIITDLFTQVKDPQKGLINGGMIRHAEHLRELLVSFYKANGSRKPSRIIFYRDGVSEGQFSQVLLYEVDAIRKACASLEEGYLPPITFIVVQKRHHTRLFPEDHHAHGQMDRSGNILPGTVVDTKICHPSEFDFYLCSHSGIQGTSRPAHYHVLFDENKFTADALQTLTYKLCYTYARCTRSVSIVPPAYYAHLAAFRARHYMDDDLSDQGSSSVASSRMKDGAVPVKQLPKVMESVKQFMFYC

SEQ ID NO: 227371 - protein, 1094 aa, Zea Mays
MSVPPAGKRQVSLRGSSAKEITRDALLQKVSEERQLRSHLRRAAAAAFSIQRIWRRYHVIRMVSEQLHEDWELLMNQPNIDLTTQWISKKMLRPFLFFITQPSSWYIGQWSKTVESILTCFKIILNSINSMDARKNFCSFAVGIPEERSIWLYQAKKLISLCSSILARYDHSCCKDGSIVDMTAIAMRLAVSLTDCKTWKSLNSENTSAADASVQSLIEFIGTCQSGMYNCVRQYIKSLGPHVTSAKKSSATATDDDFLITASAVTLALRPFDSKKAKGGVDLNGASKKYFTLILTIPDLCKRMPPLLLPALKHFSVLQPSLNILLISKDKIFEEIIKLEQSEVSASIIPCSGWALGNIVNLATNHDDLSNSGCFIQELDFCLYVDVINCISENLLESFEKSKGTSQNVGNITFHADTSVAEEEDTNDDCRMRTLFMDLLKPIYQQWHLRKLLMLAKEDFPCRRATDYDPNLKNIHFRILKLSDVICFYYHMLRIFSSLNPSIGAMPILNMLAFSPGFLVDLWEALEMPIFGPPIQNSQETGHEKQLATSSSGVQVSSMRQRRNAKDTANRWSNVLQKITGKSNDSEEGTLSDSILFSHESNDDALTSWDIEAMRHASEGIGKDLMCIMYLFCAIYGHLLLVLDDIEFYEKQVPFTLEQQRKIASALNTFVYNSFIQNSGSYSNPLVDVAVRCLNLLYERDSRHKFCPISLWLAPARNGRIPIAAAARSHEAAFGIFPGIPHRSSVLTTLPHVYPFEERVQMFREFIESDKASRRVTGEVSGPGPGSIEIVIRRGHIIDDGYRQLNCLRSKLKSCIHVSFVSECGLPEAGLDYGGLSKEFLTDLSKSAFSPEYGLFSQTSASDTSLIPSNSAKLLDNGIDMIEFLGRVVGKALYEGILLDYSFSPVFVQKLLGRYNFLDELSTLDPELYRNLMQLKHYDGDVEDLFLDFTVTEELGGKRIVHELRPGGKNISVTNENKLHYVHAMADFKLNRQILPFANAFYRGLSDLISPYWLSLFNANEFNQLLSGGLQDFDVDDLRNNTKYTGGYTESSRTVKLFWEVYVSVQFCSFCINGFLLFPVLHYIFWGACNLVRS

SEQ ID NO: 227372 - protein, 703 aa, Zea Mays
MVLQRNTSHLYLQYQICANACHLFCYLLLNIFLCCNRVSIFYWWRQISKDKIFEEIIKLEQSEVSASIIPCSGWALGNIVNLATNHDDLSNSGCFIQELDFCLYVDVINCISENLLESFEKSKGTSQNVGNITFHADTSVAEEEDTNDDCRMRTLFMDLLKPIYQQWHLRKLLMLAKEDFPCRRATDYDPNLKNIHFRILKLSDVICFYYHMLRIFSSLNPSIGAMPILNMLAFSPGFLVDLWEALEMPIFGPPIQNSQETGHEKQLATSSSGVQVSSMRQRRNAKDTANRWSNVLQKITGKSNDSEEGTLSDSILFSHESNDDALTSWDIEAMRHASEGIGKDLMCIMYLFCAIYGHLLLVLDDIEFYEKQVPFTLEQQRKIASALNTFVYNSFIQNSGSYSNPLVDVAVRCLNLLYERDSRHKFCPISLWLAPARNGRIPIAAAARSHEAAFGIFPGIPHRSSVLTTLPHVYPFEERVQMFREFIESDKASRRVTGEVSGPGPGSIEIVIRRGHIIDDGYRQLNCLRSKLKSCIHVSFVSECGLPEAGLDYGGLSKEFLTDLSKSAFSPDNSAKLLDNGIDMIEFLGRVVGKALYEGILLDYSFSPVFVQKLLGRYNFLDELSTLDPELYRNLMQLKHYDGDVEDLFLDFTVTEELGGKRIVHELRPGGKNISVTNENKLHYVHAMADFKLNRQVRDTVFS

SEQ ID NO: 227373 - protein, 389 aa, Zea Mays
MFVYDEKADQLTDIMKGLGQPGASENDGTPVFQNDQVECSPQSILQGGHVQSTSLHHQDDEQSVYHIHRMNVEDHDLMVVRGIDITSQSEKNSDVPDQSRNGISCVDKGIYCCANNPDKQSDVLMDIKLCKGGLVVYNPDCKNTQLEDLDGVSYKGPSVHACDQDQDLESIGHAVVNHNCHNSPNISSEMSHPTTNAVIDQETENVMEPSCSSSQLPKSSGEQMHVEDFLYLNDQAAKFEKVSGQLAGPLGPPENMMYNDSGDLQIKQTYLSSGQHFSSVYLNNGILSHQQPQLATPAFALDNPASFIEPFSNLQSNRQPETEKDIGAVFYPFRHATNIKQSASLHCLVNKGLAQSASFPRLLQERHQLIDQSDSDLYAQPHEDYCTDV

SEQ ID NO: 227374 - protein, 211 aa, Zea Mays
MDPLRSAQELFARVALLHGSTVLGAGALHARTSPFLLLLLGNVEGDKFNDFSNQDTFIWHEHIASLFPHVYFASSGYPVDLTDPEYDHKSIFGRTHFVVAFLPNSKAGKKKNLLGDSEEPKEQAPHKVVIFILCHQVLAFRDINAQAPTHILIIPKVKDGLTGLSKERITLNHKNTSQWPKHIIKRGLSIQVEGTRAAIATQLQQNTLVYF

SEQ ID NO: 227375 - protein, 574 aa, Zea Mays
MSWLRSAVHRAVEASGGHSSLLTRTVRTSLDTVVHHAGQAVAGGARLITGSRSYKSAKVAAKRLEEEALSCKGDERVQLLRRWLVALKETQRATTAVREPQFGDNPDQTAPLLDLYIDYDSGAEPMNFFHVFLYSQALECVVLSLIREAPTEEEVPLVSEVFGMCLSGGKDVHNALLSSVKDLARLFSSYSDEVLAKRDELLQFAQGAISGLKINADIARLDNEITQLQQQINSMDALHATSIVNQNKKAQTATEGFRKAVSEVRLCSRMEELLLKKKSIHPGDSLETHFEKVDKLKVLSESLANSSAKAEKRIMENRLQKEESLIFRVTKTNEVSGIEKELVAEISGLEEQRNQLEAELKKVNTKLKVATVKLKKTREERDQFDEASNQIVLHLKTKEDELSRSIASCKVEASTVSAWINFLKDTWKLQSLFEELREKQANEELDRCGLCFAKLMKYHVSASMEELSTSIDRIKTFVDNLKIFGNRSVSAEDGANGPSKQSNPRRYLEEEYLQTEKKVVAAFSLVDSIRAIYSSNQDYYKTSLCRRDDTEVKNLFTSIDNLRIEFESVPRPVL

SEQ ID NO: 227376 - protein, 1062 aa, Zea Mays
MAWFFLELIVKSMGLEQSRLFYHNLPLGEDVPPLQLKEGVFRCIMQLFDCLLTEVHERCKKGLSLAKRLNSTLAFFCYDLLSIIEPRQVFELVSLYMDKFAGVCQAVLHDCKLTFLQIICDHDLFVEMPGRDPSDRNYLSSVLIQEIFLTLDHDDLSQRAKAARILVVLICKHEFDARYQKSEDKLYIAQLYFSLIGQILDEMPVFYNLNAIEKREVLVVILQIVRNLDDATLIKAWQQSIARTRLFFKLLEECITHFEHNKTGGSMLLGASSRSPDVERPAPPKYSERLSPSVNAYLSEASRHEIRPQGTPENGYMWNRVSPQLSSPNQPYSLREALAQAQSSRIGSTARALRESLHPVLRQKLELWEENLSTAVSLEVLRITEKFSAAAGTRSITTDYAKLDCVTSIVMGLLSRSQPLAFWKAFLPVVYNIFNLHGATLMARENDRFLKQIAFHLLRLAVFRNDSIRKRAVVGLQILVRNAFNYFKNTTRLRVMLTITLSELLSDVQVTQMKSDGSLEESGEARRLRKSLEEMADVRSKDLLKDCGLPVTALEAAPDGSSDNMWSWAEVKHLSKCLVQALDAGLEHALLDSVVTVDRYAAAEGFYKLAMAYAPVPDLHIMWLQHLCDAHQEMQSWAEAAQCAVAAAGVIMQALVGRNDAVWSKEHVTSLHKICPIVNTDVSAEASAAEVEGYGASKLTVDSAVKYLQLANKLFTQAELYHFCASIQELIIPVYKSRRAYGQLAKCHTSLTNIYESILEQEASPIPFIDATYYRVGFYGERFGKLNKKEYVFREPRDVRLGDIMEKLSHIYEVKMDGSHTLHIIPDSRQVNADELQPGVCYLQITAVDPVMEDEDLGSRRERIFSLSTGTVRARVFDRFLFDTPFTKNGKTQGGLEDQWKRRTVLQTEGSFPALVNRLPVTKSESLEFSPVENAIGMIETRTAALRNELEEPRSSEGDQLPRLQSLQRILQGSVAVQVNSGVLSVCTAFLSGEPATRLRSQELQQLIAALLEFMAVCKRAIRVHFRLIGEEDQEFHTQLVNGFQSLTAELSHYIPAILSEL

SEQ ID NO: 227377 - protein, 458 aa, Zea Mays
MEAKEGVMATDFFWSYTDELHASRHREILANRGLPYDGPVIPPAPQPTPSPVRKTHKNLKYVLIGAIGGGLLLIAIVAAIVFCFVCSGSTGRRNDQRESGASPSAPLGVSATGTTAATGGTSGFGEDRLIKHGHSGDLYHGVLQDGTVVVVKRITSRVPRKDAYLAELYLFAKGVHETLVPLLGHCLDKEEEKVLVYRFVRNGDLSTALHRKSREENEGLQSLDWIKRLKIATGVAEALCYLHHECSPPMVHKDVQASSILLDDKFDVRLGSLSEIFLHDSSLLATISQLSRRAISLAITSCALAAFARDFKQRTHEHHLVFSRITERNSFRDKLSTLIPNRAAEALGSSYCCSPASGRPIGCRFAKDMEDASGSSSSPAVLRNKYWVLRHGRSVPNERGLIVSSLENGTKPEFGLAPQGVEQARAAGEKFRKAVLGLRERYFGPSYELLSHDKTYGQ

SEQ ID NO: 227378 - protein, 58 aa, Zea Mays
MKKNRVLCSTQLAFLHSSRLQGSEAVMGSVSTLLTLLGAPCMRTLMSHVVVMSASPCK

SEQ ID NO: 227379 - protein, 98 aa, Zea Mays
MSNSASGMAVCDECKLKFQELKAKRSFRFIVFKINENVQQVVVDRLGGPGESYDAFTACFPANECRYAVFDFDFVTDENCQKSKIFFISCLACHCLFT

SEQ ID NO: 227380 - protein, 153 aa, Zea Mays
MKKVRKQIVDHIYPWILECQEKGHAKVPSLGSKWMFRTAYQLGSDSVNKGQYPISTTHTAPGICTMLPVKYNFRQALPEIAQKITRLENEIPCLILLARCGNLNYCIQYCSYVNLSSSSLILDLHIFFYILILLNITNWGLIYLNWRRKSFMR

SEQ ID NO: 227381 - protein, 68 aa, Zea Mays
MQRREVGKYFFVNLKVCFLLPTRTAYQLGSDSVNKGQYPISTTHTAPGICTMLPVKYNFRQVYAQRGT

SEQ ID NO: 227382 - protein, 231 aa, Zea Mays
MMGCLFACFRASGGDGEVKGTGGQLAHPSQPPATTTTTSHQVQDGAGRRARPPSRNALSAVFQREDEGSRTAQVASSWADESGERKEMDQELVHQAIIQRSCGALLQTTNNIQGALIKYADSVHQKETHSGCLPVVSDDLHFMEAPKVEKCETPSRSHQSFTVPDATRMKSNTKLWILKNVGSQKKNPFTLKKQRNQSAQRITMWSPWKFQYLMNAPFSRALRVLYHLLTR

SEQ ID NO: 227383 - protein, 831 aa, Zea Mays
MNWLKFFQSLPSERRSKRLKKQNLKMQKAESKEDETMEAEPDPEIDVVPGPGGEPKVGMVFLNEDKAYEFYANYAETAGFSVRKGWLDKTAKNVTKSRAYVCSKEGFRPRSASIESKKPSLEARTGCQAHMTIKITASTKYVVTEFVADHNHDLETPLVDIQILKSEKLLAKVQQPPDPPKVVLIPNEYKNYTRTKRTKNMQLGDTQAICEYLQRMKGENPSFFYAIQVDEDDMFTNVFWADAKSIMDYNYFGDVVCVDTRYCTSDYGRPLLLFTGVNHHNQLIIFGSALIYDDSAQSFRWLFETFKSAMSGKQPKTVLTDQSAALSDAVSSWPGTIHRFSLLHLYLNATKISRDTLQGLETFASDFSRWLYEYEEDNFYSSWEILSEKYNIKDNEWFCKLYEDRERWALPYGRDTFCADIATTLRRDNTNTILTDLIKPEIDLQNFFNNYDKFLEEKRLAEQQADYLGAQITQRVAPLHLLWQAANLYTPTLFEMFRMEYEQISKCVVYSCGEIGPISEYQVTVKDRPQGQFVRFDSTECMVVCSCKKFEFMGLLCCHVLKILDLRNIKELPRHYILKRWRKDAQSESPENYGFAAIDEDPKFSLSKRYNALYRNLYKIAAKASESVEAYAFLENQYEQLVEQVEVLLQAKLHDKSSLSTVLKGNQPNMLNSEVNSSEHRRATGKKIKNVEVRRQQQSLDPNKKKKGRQVLLEPEIEIPLRVEPPTVSNDIQNHLRTTNQFLAPSHMMQAPYVAQQFGLGSLQGFPGMSPFGQIQEPTPLQQPHLQPPSFHSGPQITQQSSAWPPDHGSRPVHHSSLGFPVTYSILLFGC

SEQ ID NO: 227384 - protein, 868 aa, Zea Mays
MSKLKHLENLILKNNKLVGVIPSTLSQLPNLKILDLAQNKLSGEIPNLIYWNEVLQYLGLRSNSLEGSLSPDMCQLTGLWYFDVKNNSLTGAIPETIGNCTSFQVLDLSNNHLTGEIPFNIGFLQVATLSLQGNKFSGPIPSVIGLMQALAVLDLSFNELSGPIPSILGNLTYTEKLYLQGNRLTGLIPPELGNMSTLHYLELNDNLLTGFIPPDLGKLTELFELNLANNNLIGPIPENLSSCANLISFNAYGNKLNGTIPRSFHKLESLTYLNLSSNHLSGALPIEVARMRNLDTLDLSCNMITGSIPSAIGKLEHLLRLNLSKNNVAGHIPAEFGNLRSIMEIDLSYNHLSGLIPQEVGMLQNLILLKLESNNITGDVSSLIYCLSLNILNVSYNHLYGTVPTDNNFSRFSPDSFLGNPGLCGYWLHSASCTQLSNAEQMKRSSSAKASMFAAIGVGAVLLVIMLVILVVICWPHNSPVLKDVSVNKPDNLASASNNIHPKLVILHMNMALYVYDDIMRMTENLSEKYIIGYGASSTVYRCDLKNCKPIAIKKLYAHYPQSLKEFETELETVGSIKHRNLVSLQGYSLSPSGNLLFYDYMENGSLWDILHAASSKKKKLDWEARLKIALGAAQGLAYLHHECSPRIIHRDVKSKNILLDKDYEAHLADFGIAKSLCVSKTHTSTYVMGTIGYIDPEYARTSRINEKSDVYSYGIVLLELLTGKKPVDDECNLHHLILSKAAENTVMETVDQDITDTCKDLGEVKKVFQLALLCSKRQPSDRPTMHEVARVLDSLVCPAGPPPKQAQAQAQAQASEKPSTTAPSYVSEYVGLRGGGGGSALSCTNSSSASDAELFMKFGEVISRSTE

SEQ ID NO: 227385 - protein, 157 aa, Zea Mays
MSPMFNVMAWAQPRVASPHGANHTGKVDGKKQKSQEKAVPAASKSSPASKKSKDDDDSDEDETDDSNEDETDDSDEGEGLSPEEGDDDDSSDEDDTSDDEEEDTSTPKKHEAGKKRAAESSVLKTPLSDKKAKVATPSAQKTGVPLNGLTKLSSKIV

SEQ ID NO: 227386 - protein, 269 aa, Zea Mays
MDYTFSSEQRVRLGWGAEAASSGHNRYKGETNAAEVVPPASSHPPATPRSAPLPRVTSDAAPSAGALTSDAARGYERRRRLVRYSRVHSNGESPERRGTQASWWQLYGTETSALQKMATRILSLTSSSSGCERNWSGFEGIHTKKRNRLTTTRLNKLVYIQFNNRLMNNREKIKSKKITDVLLSSDTTEAQGFLQEGGDDCAQVVFRDEEDEMEGTGIPWSVIGEAVGAEEQLEPCRSARVRELYEGEEFESEEEEYEDEDLCYSEDEI

SEQ ID NO: 227387 - protein, 136 aa, Zea Mays
MLILRNENEDKEIERFSDRKRKTQSKREGLASYLKLAPSNFPSELVQGSRRGQATNKKLRWDKESDEQAFEAFEKLEQKHKDGSKVEKEGDDEDEQEEEVQEEEENSDDDYNQNIEFDDDDDDWNQEDEAQEDFYD

SEQ ID NO: 227388 - protein, 663 aa, Zea Mays
MDQTVSALHKRIETLSLQASALRDALQRSEENTDSAVAAPRLVRPPHLRDRGLHPSRPGSATLRVPVRRGGRGDPYSDSAVSQVRAQAITMANENIDRTIETAEAILAQFEIIRRTEAVIVRGPRADLKSFLEAMALLKGVIHFFSSNKKFKSCEGVLNQVNNLLTKSKLKIEEEFRQLMSTYSKASEPTHLFDCFPNPLLASEGNSRAVGEQLSKSFESATYRTPTLIPPRILPLLHDIAHQLVQDGNQQLCYRIYRDARSSALELSLQKLGIEKLTKRSMQPWLASGTWNQIMHVTVKVLLAGERKICNQIFDGITFNKDQCFAEVTGSSVMTLLSFGDVIAKSKRSHENLFVLLEMYGLMHGLRSEVEVTFQGKFCSGMREAALSLTKSLAQAVQETLVDFEVAVEKNNSKTTVQNGNLHPFTIEVINYVKGLFDYQSTLKILFQQSESDSETESELATVIMKVMQAFQNNLNGKAKQYKDPALYHIFLMNNLHYMVTSVSKSESKDILGGDWIQRHRKIVQQNANQYKRVAWAKIFQTLSIQVSGGNSSSSPCDVSKTGVSRTMIKERSVQWFKSFNIQFEELHSKQSQWTIPDQELRDELRLAVAEILLPAYMSSLAVLGILFNVRRTLTSTSNTHKKNWINCWVSSSKDTKLVNRSS

SEQ ID NO: 227389 - protein, 171 aa, Zea Mays
MGGNSTPFFALAIELITSLFCQPCAYLEANMFFDVVETAVHDLRDSLQEDSLASSSPFRRLTDDLFDGGLLGQGLSAHDAPDVEGGEAPLHTLLQQHGGDAQRARALARHLPPVEPQHSHVLLRVQGPHVLHRLVAEGLPALRPVEPLESAVLELHARSLQDEEKWEQKMK

SEQ ID NO: 227390 - protein, 2525 aa, Zea Mays
MGERDALPPLPLALGPPHLIPPAPTRDPRAIAFLPDLVGFHWVAYAAGSFLVVSHLPSPCRDDNNNDSCSPFFRQVIDLRAPVSAVAWCRRGSGEVAAATDNSIHIFQPAPASSPGSFGWLLRWSITETFAIVAVSWTGCGNGIVAVGAGVSMWARLESSWQLAWRSTPQVPQALVSTTCSMQGPVATVAALAPAEGSVPVLVFLNDARRGLEQAELVHPQPVCMIQWRSCSLYPHDLSEIRREILMTCCFDGTVRLWSKDEVSRSKKQRGLLISFSVIAVIEVNNTLNGVLGVDIIVRWSMESGSVVSRDEQGRFKLFSGDLRESQVGKCEWLVSLGPGPCISFWAIHCLDDVFPPRYPRITLWKQSKLQGWGDSYVKSGPLKSMEQSIFVEAVISRRLCSGPPATCFLLHLLVDDSFAWSTVSTKLLADSGNHALSDSAKNILCCLTKPVKQDGHKGSIRQVSVHPYSCEIELAVSMDSNRMIFFWSLSTFSTLIPTMHAPMYPLWKLLCKFDLRNISEDFEYSCLCWAPSVTRDNRFLVLGWESGVDCFVVRIQKEEVLSCQKIFTIPFLAESNTEGPPDSIHTIPLASKCSRCFVNNSFLVVCIWKKTFKGFSWKVVLHSENQYVNGRCLCGFAPSSLSTTNQGAHACFSNEMFSAVVYEGSSVFPSGLEGEYTTCISVMPLNNTVLPIQQHDPYRTVPGYHIATGCSDGTVKLWKMTCAEDSLQTKKERHIWELVGMFGAHQGPIDIVSLSGCGRVITVGRNLKKNSTSIHIWEATKIRGDGNFLLGDTLMLQDHIVGLDGLSLGDGRFLLAVYLANELRIYSHKHPSFQNVLHTKNSKEEHLWSCIVLSHSHHDIVGFLWGPKATVVLVHENHLSLFSSWLVTGDNEYMTQIHSCPVVHEMLPCTNNFNEATFGKLKLPENFNSGNIDSNNVLLTDQHSHYSHGLWSLLHIAHRLSGPLASYHPRALIQYLYSAIVKVVLTASTIYHAIALELPKWVIKVTDKWRKPFGKFKRVPVDGVGGWGGGLGEWKRADAALHHLVRSMKVSETSKGVSNYSTCHSIPELPLSEYFAATVSNNISTKGFMWGENRSNTTFNLLSPSTSFLYEDGNLGINTTTSASEKPDIVELLDKSFSKYGISDSEKNQILAISDLMAGITDQSHSSPYKNLDEAGRRFWVAVQFEQFHALRRSADSSSNEGCRVDSASIAWAFQSDCQDDLLNSVLPAEPTWPEMRKLGIGLWYTNVSQLRTRMEKLARLQYLKSKDPKDCALLYIALNRIKVLVGLFKISRDEKDKRLYEFLSRNFQEERHKAAALKNAYVLMGRHQWELAIAFFLLGDDTSSAVNVCAKNLQDEQLAIVICRLIEGSGGPLERNLISNVLLPDAVERGDNWLSSLLEWMLGNYCQSVNRIFGCHPKLLIDQNVLADPELGHYCAILSAKSSFRNSVGEAVSAKLSKLSFAVAACALNKCGLPLEALECLSTNSSIDGKDSIIAHGDGDHKIFYGILSPVSASKNWLSSSVISGIESNLKLTMASKYLSSLLRKHSLCSQLNAPLSEEKVLNEYNNHQIEKLTCDITTVISIFDKRFSLKFADIAEKILIFCSHDGLLFLAYVLLWGTRSPDVATDNYILECHPLCPIDYLLLFSFKESCKFFSRYVVLSSMCSVLNMEDTNSTAWALKERHKYIVISLSNYLNVSRLLLKHDKSGNYILDDRSAMLAVMDLFEYIIEFSFSWLYYDIKSLLIMINPVLATSVNGDSFQVLLDQLMHAICHKNHDISSSTGGMPHAALSKTQLKKSVNSNLLADEKWHLIGASVWVRLISVLEHRLREFFEKEGLEHEAGVSGSEFRGLITSVAAKFVMDSIHFVSSSLVPLHASFLRKNLPMNSSSSLLFWLESKLPQQLPVSDSYDHLSRISQLSNSENMEALFNILWEISVNPVDVCNAFVSEGVNCFSLSNTNVTRSWKDIRCPVVECDKIITERSGEEHEHRLGSKRLGQGFAEKASYNGEVLYETKRRELIIQKEFQSPREILRRSGELLEYCILTFSVAQAVCLNSVNEKQAAIATNRKGLVFFNWSDKQHNKSFSEYVWSGSDWPLDGWAGCQSTPTPTSISPGVDLGRKKGSQLGSVGATTGLSSLAKPGRDLTGGGAFGIPGYAGIGASGFGWGEPEEFEDFIDPPATLENIHSRALSRHPSLPLFLVGSSNTHVYLWEFGKASAMATYGVLPAANIPPPYALASISSVQFDCYGQRDVAYVSASRSVIASAGYSSNGSNVVIWDTLSPPATSQTSIMCHEVVMEFNSELLNRKGPVLAYSSLTRVVAERFLGGEFESYPGGFCHISTISSGGARSISVFDSDRGYGSISPLVVTGGKNGDIALHDCRFLSTGKSKHHRVTTEHGVEASSMHDIKSSTFGGTDSGMVWHIPKAHLGSVTKVTTIPNTSLFLTGSKDGDVKLWDAKNSQLVFHWTKMHERHTFFQPTSRGFGGVVRAAVTDLQVLPNGFVSCGGDGSVKLVQIKDDLAAAYQR

SEQ ID NO: 227391 - protein, 1065 aa, Zea Mays
MGFDNECILSIQSLPGEYFCPVCRTLVYPNEALQTQCTHLYCKSCLAYVVATTQACPYDGYLVTEADSKPLVESNKTLAETIGKVAVYCLYNKSGCQWHGELSACVTHGTACAYGNSPVVCNRCGTQIVHRQVQEHAQVCHGLQSQTQQADGSQVQLATATTQPVIQDSSLASAGSAAAAATTLTKPSSTTATAVTDSAAATGGAAGATTAAVPSSASSISASQTPTAEQWYQQQQQLQYSQYYQQQHPGSNPYMQQHQQYDQYQQAYQQYMQPPMQVPSQNVVQGSAQPASYVQPQVQSSQVMMQAQSQPQVHPLTSQPQLQQHPVQPRPQSHPHISHVQAPSGQSQLHQPIQSAQVPQVQPSQVPLQPSGLQVQSAAHPSAPTQVGNQQFATQAMAYQVQPHVQAQPPQQQHIVAHQQHPHMQALPLQQNIQPKMQLNSQVQLQPPHVQQQAYPQSQVYPQQTHHMHSQNTTYAQQQTQGALMQPVHVSHQQTHVSHHPAPMRPPSSGHQPALQHPQAQGIQHTSQHEKHIGFHAQWPTMYSNIPSQAPPQGLSVHSSVSSQSVQSYQQGMSSSQQMHSQPGQPYTQQHVTGNTGQHVQTSAGRPMAHLAPTQQFQQQHPAMLRTESPAAGHSIGQGPLDLEKHTSKSGKLDNATIAAVGENKNSGPESVVMRPTKSQLGDENMNSEHNGFVGVRKDAVQTGIVSHNLDGSIRRDGNTDQAGNSHGPLVQGGKDHKASDASTDHEKGRLFQQASLQNAGAPGSYVPPGVVPHPSGPDKMLPQHMTNHGHMHGFSENIRPPLQQPYGVFHSGTITRPFGENQIQMPMPQPGGIRPGDGMIRPCLVGPLPGHHGAVLPSFDLERLGQPRPLGMLNSNDFGGEGFNASGGAAPPFANHRSAGLHEDFPRKQNATASHPDFLSHGAEFDHHRAIGMPNFRNPGPFAQGTSGGPGGPPKHQLGSGDMHPGDPHLVAEYAQHGFPKTAAHFGLGGFLRNGNSGWCRICMFNCGSAENLDLHVQTREHQQCAMDIVLKMKQDVAKRNYGGPKSFNNKKVSGKGHFRGNRR

SEQ ID NO: 227392 - protein, 105 aa, Zea Mays
MGILLVYDVTDESSFNNIRNWIRNIEQHASDNVNKILVGNKADMDESKRSAKTNLNVEQVFFSIARDIKQRLSETDSKPEDRTIKIKAEGEADAAEAQKSACCGS

SEQ ID NO: 227393 - protein, 520 aa, Zea Mays
MAGDITCGSLLQKLQLIWDEVGESDEDRDKVLYQLDQECLDVYKRKVDQATNSRDLLIQALDDSKIELARLLSGLGEKAIARTPEKTTGTIKQQLAAIAPTLEQLTKQKNERRREFVNVQSQIDQICGEIAGTIEVGEQVTTPQVNEDDLTLERLEDFRSQLQELEKEKLQELAGQLYDLWDLMDAPKEERRMFDHVTCNRSASVDEVTAPGSLALDLIEQAEVEVQRLDQLKYSKMKEIAFKKQNELEDIYAGAHIVIDTAAAHEKILALIEAGNIEPSELIADMDAQIAKAKEEALSRKDILDKVERWMSACEEESWLEDYNRDDNRYNSSRGAHLNLKRAEKARILVNKIPALVETLVAKTRAWEENRGLSFMYDGVPLLAMLDEYVMLRQEREEEKKRTREQKRYVEQQLNTDHEGPFGSRVSPNRPASSKKAIGPKLNGSVSNGTPPNRRLSISGQQNGGGHGVRSGGKDSKKDTAKTASPGNSAAATAPVGLTATAKEDAASQISVTDLVPSTP

SEQ ID NO: 227394 - protein, 436 aa, Zea Mays
MGRFVFVLLILMCCSSSRFTGAYDPIDPNGNITIVWDFQSLDVAGMTPYTVMVSIHNYQMYRHIERPGWRLSWSWAGKEVIWSTTGAETTEQGDCSRVGSGGSRPHCCQKRPVMVDLPPGTPYNMQVANCCRGGVLSSLVQSDLTSAAAFQMVVGEFALARDSGGKEPEKPWQFDMGVPGYTCSNATTVAPTRIKVDKNRYVQALLTWQVTCSYSQYRASAAPSCCVSMTTFYSETIVDCPRCSCGCQGSPPSPQCVSVDQQQPWLPAVGDDEPSSAPIVWCSEHMCPIRVHWHVKTNYRKYWRVKVTVSNYNLARNYSDWNLVLQHPNLRSLTQLFSFNYRPLVEYGAYNDTGMFWGLRYYNEMLLQDGNVQSEMILEKESDFTYSGGWAFPRRVYFNGQECVMPPADQYPVLPNGASALRGHFCFLLLLFFVVV

SEQ ID NO: 227395 - protein, 1641 aa, Zea Mays
MRQQGTADHSERHVHMIRSSTVIYLRNKIFHNYNSWCRYLHLESNIRIQRDAPTQQPELLYIGLYLLIWGEASNVRFMPECLCYIFHHMARDLHDIISDTSQGSFEPPFQGEGSDDAFLQLVIQPIYSVMQKEAARSKRGKVSHSLWRNYDDLNEYFWSKKCFKKLGWPMDPTADFFAEPTRAKNETEQHGHVIRRRRASKTNFVEVRTFLHMFRSFDRMWAFFILGFQAMVIIAWSPSGSLSSIFEPNVFKNVLTIFITAAFLNFLQATLELILNWKAWKSLECSQRIRYILKFAVAVAWLIILPTTYSSSIQNPTGLVKFLSNWIQNLQNESIYNYAVALYMLPNIFSALFFMFLPIRRALERSNSRIIRFLLWWTQPKLYVARGMYEDTCSLLKYTTFWILLLICKLAFSYYVEIAPLVEPTRIIMSLERPPYEWHEFFPNLRHNLGVVVTVWAPIVMVYFMDTQIWYAIFSTICGGVYGAFSRLGEIRTLGMLRSRFEAIPRAFGKKLVPDHGSHLKGDEEDKNPPFDKFADIWNAFINSLREEDLLNNREKDLLVVPSSGGQTSVFQWPPFLLASKIPIALDMAKSVKKKDDELMKRIKQDPYTEYAVIECYDTLLDILYSIIVVQSDKKVVDRIRESIKDSIHRKSLVKEFRLDELPQLSAKFDKLLNLLKEYDENDPVNRNTHIANLLQDIMEIITQDIMKNGKGILKDEGQKQQLFAKLNLDSLKHVAWREKCIRLQLLLTTKESAIYVPTNLEARRRITFFANSLFMRMPRAPPVRSMMSFSVLTPYFKEEVLFSPEDLHRKNEDGISILFYLRKIYPDEFRNFLQRIDFEVKDEEELKDKMDEICNWASYRGQTLTRTVRGMMYYRKALEIQCLQDMTDPAKVDRDRSIGSYQELQYDIEMAQAIADIKFTYVVSCQVYGMQKKSKDLNEKRRYQNILNLMIMNPSLRVAFIEEIEGLTRNGATEKTYCSVLVKGGEKYDEEIYRIKLPGNPTDIGEGKPENQNHAIIFTRGEALQAIDMNQDNYIEEAFKMRNVLEEFESRKYGKSKPTILGLREHIFTGSVSSLAWFMSNQETSFVTIGQRVLANPLKVRFHYGHPDIFDRLFHITRGGISKASKTINLSEDIFSGFNSTMRGGNVTHHEYMQVGKGRDVGMNQISSFEAKVANGNGEQTLSRDIYRLGRRFDFYRMLSFYFTTVGFYFSSMVTVLTVYVFLYGRLYLVMSGLEKSIMLDPRNQQNVKALENALASQSIFQLGLLLVLPMVMEVGLEKGFRTALGEFVIMQLQLASVFFTFQLGTKTHYYGRTILHGGAKYRPTGRGFVVYHAKFAENYRMYSRSHFVKGLELLILLVVYLVYGSSYRSSNIYLFVTCSIWFLVASWLFAPFIFNPSCFEWQKTVEDWTDWRKWMDNRGGIGMSVEQSWEAWWVTEQDHLRKTSIRAFVLEIILSLRFLIYQYGIVYHLNIADHHKSIMVYGVSWVVMLLVLVVLKMVSIGRQKFGTDLQLMFRILKGLLFLGFVSVMAVLFVVLHLTISDVFASILGYLPTGWCLLLIGQACSPLIRRTLLWDSIMELGRSYENIMGLVLFLPIGFLSWFPFVSEFQTRLLFNQAFSRGLQISRILAGQKDVSEFEFK

SEQ ID NO: 227396 - protein, 387 aa, Zea Mays
MNTYMIEDMDSAYDSDASEEGDDDGDDLSVRQGTPYTHIHEIVFSTIDKPKLLSQLSALLSDIGLNIREAHVFSTHDGYSLDVFVVDGWPVQDADGLHKALEASILRNEGSWSGSSHSSAAERTLPFQVKGGEWEIDKRLLKMGGMVASGSCGDLYHGTYLGEDVAVKVIRAEHLNKNVWNEFTQEVYILREVQHKNVVRFIGACTKPPQFCIITVDVCRGMCYLHERGIIHRDLKTANLLMDKDHVVKVADFGVARFQDQGGVMTAETGTYRWMAPEVINHQPYDNKADVFSFAIVIWELITSKIPYESMTPLQAAVGVRQGLRPGLPKKTHPKVLDLMQRCWEADPSARPAFPDILAELEDLLAQVQGTPGKTAHAPSNNSNTKD

SEQ ID NO: 227397 - protein, 330 aa, Zea Mays
MDAIALSTDNFAAWNKLGEGGFGAVYKGQLEGGQAVAVKRLSKYSTQGLGEFKNEVMLIAKLQHVNLVRLLGCCVHGEERMLVYEYMENKSLDNFIFGTDKNRSAQLHWSKRFDIILGIARGLLYLHQDSRYKVIHRDLKAGNILLDKDMNPKISDFGVARIFGDDTDSHTRKVVGTYGYMSPEYAMDGVFSVKSDVFSFGVLVLEIVSGRKNRGMYSSGEQTSLLSQAWRLWREGNALALLDEAVVRAGTHRSSEVLRCVQVALLCVQERPDDRPHMAAVFLALGNPSAVLPQPRHPGYCTDRGSASTDGEWSSTCTVNDVTVTIVEGR

SEQ ID NO: 227398 - protein, 1060 aa, Zea Mays
MGNIFLKENDFHIDKYTLHTGKNWRFDTSRSSQFHPSLDPAILEADAHRALLLLLDILRTAYAHRGSFLVGTINSLAAVVKIRPIYYDRVLPVLLDFDPGLETAKGAHSASLRYAVRAAFLGFLRSPHQAMIESKDILVRRLRVLSPGEAMEQNIRQAEKMSRNIERASRASKDESTSWEMPYGDINRKKPAVRSSDTFTTSDGIAKRARFDMSATSNLPVLGLSDYSDMQADNDASVGHSSDPAILNNEVSPVEKMIEMIGALLAEGERGAESLGILVSTVEADVMADIVIETMKHLPEASFHLATNNGVQQLNFKYSSGLVTQNLPANSDSTLFTAQSTPTADGVSISPSDAFVMTSVHDAKRDPRRDPRRLDPRRIVSSSAVNSIQVKMETNSVHQTDNLSNTLYSNSRKAENYSDYQGDLHKNEGEQQSASQPNQTIAKDKLELLDVVTEPEPTFEVEAPVDVRIHSSDVDEDIVKPMSSVVNSLDESDSMDLEVDPFLPAPKAPTPDDTNDDLPIITSQLELSEKGKISINKLAIGRILDDYKKNSFNARFSLLAHLIAQSAADDNIMDLIQRHIIFHSHDQEGYELAMHVLYQLQSISVANSPESSTSTSKHYEKFFISLARSLIDSLPASDKSFSKLLCDAPYLPESLFRLLEDLCMSEDNSQQLKDGDGDRVTQGLGTVWSLILGRPPLRHVCLDIALKCAAHSQDEVRGKAVRLVAKRLYDLTYATEKIEQFAIESLVGVANEHTVDTDINSKSLKESTAEIEVGSQGTSVSGSQIPDTEFSENGPFKTSSVSTKQSAVSVSEAKRRTSLFFALCTKRSSLLQHLFNAYGRSPKVVKQCIHWHMPNLIRNLGPSCPELLNIIHNPPEGSEHLITLTLQTLTEDSNPSADLVAAVKQLYNTKLKDASILIPLLPSFPKEEVLPIFPRLVDLPLERFQDVLARILQGTAHTGPALTPAEVLIAIHDINPEKDKVALKKVTDACTACFEQRTVFTQQVLEKSLNQLVDRIPIPLLFMRTVIQALDAFPALVDFVMGILSRLIDKQGTENSTQQQ

SEQ ID NO: 227399 - protein, 490 aa, Zea Mays
MAHPSLPARGTGSPGKSSTPPRSSLHPRNGAQSARFLPRLRATALVMAYRRKQAIQRSATFVEDHRQTSSGGSASPAVASPRATRFADDSRRPDRSSCLAAQAMATSSDARGDGDLTLPSFSERLPTAAAASQCAAEPSSPVQDPVTHLYTSTTSLNDEGPKYDLELSKKDHRKHGFWGLVAQKAKVMLDENGTPRPQAKTSESLWSYDRVQGSLGGRLDIRGKIKDVLQQEGLLVVADSTTPGTSGGVVVAARKLQIRRKACSMANLTPATPDMESPRIIKASRDVANAMAAKLKLLQRELKALKADLSFSKEWCAQLEEENRLLRDGNHDADEDLQLETLLAEKARLAHENTAYARENRFLREVVEYHQLNMQDVVGLDDDDIDADADYDVELEAEQYQDRRRSLPFHQLVLEEEEHQAADPGTEPQSPSRCTESPRMLSTNSGGSPDHESSQRMLNTNSGVGIAIESPRNRMLSTNSGESTQSFDQE

SEQ ID NO: 227400 - protein, 62 aa, Zea Mays
MSKCTSLTGLGSSFTSAVQLTLVVKVSRILVPFRLKIEVVLALGLYIQVFDEYFGTEIVYCY

SEQ ID NO: 227401 - protein, 52 aa, Zea Mays
MVLIFMSPTKLSMKIHLMINLMGRNLASSPANIIYSTWTVLVASFSAGHLVN

SEQ ID NO: 227402 - protein, 272 aa, Zea Mays
MRRWESKQAAAGASWRQEEGVVVGETGGGRIGRGSESRGHACLTARPVRSAAAAADMGDSGGSVVSVDVERISFGGKEHHIQTNHGSVSVAIYGEHDKPALITYPDIALNHMSCFQGLLFCPEAASLLLHNFCIYHISPPGHELGAAPILPSTPVASPDDLADQIADILDFFGLDSVMCLGVTAGAYILTLFATKYRERVLGLILVSPLCKAPSWSEWFYNKVMSNLLYYYGMCNVVKDILLQRYFGKGVRGGSAEPESDIVQACRSINGSV

SEQ ID NO: 227403 - protein, 830 aa, Zea Mays
MMRHSGLLNYQMRIEQKKKGSGGVRFSYCNIKHPFLSPLQSSMLSHIALYAASFELMRKEQHKAVLGKKSGPDILKENPSDDIFSKLQTSTAKANAKTKNEKLDGSVVSSYQEDTTKPSSVLLAPAARPLVPPGFANAFADKKLQSQSSNITHEPKLEDDQSATGFTSESKEKGVSGNDATMGPKHTLPPGSVTSSAELASSVLKGSEDWDADVMDKYSIGKEGKSKNIDPVRKDDSVAILEQFFGNVLSKSGSNLPTYVEPLKTDDDMITSVPESSKFAHWFLDEDLKPAEDLSSKSLLSMIVKNENPGLENLNHTPLSDAAAQNLSPRAPIDKLDSASELISFTSSTPANGVLEQCIHSDVPEAVPIMTCEDLEQTMLAQVSNSSSTQINATKEQLTVMDEPVAMQKVTVDNHASQHLLSLLQKGTDNKGAPSLGFQRESTDEPLSVDTNLMANGGISGSDPVNSVENVPTSGKDLTLEALFGAAFMNELHSKDAPVSIRGATTGGPTEFAEMGKTLLSSSHEGYYPVEQTVHFNNTKDAAVRREPGIEHSAVPGLSQGSASFDKKGMEIHLPEEDNLFTMSDSLLGQNSDILASVGSSRVEGLLPEKALDNLSYRFQSLVPGDAEHIQVYGPDALGSHPRDSQNMYHLLQGRPPMIAPHPMMDHIVNRKQPAPFDMAQSIHHDSHRSFPSNVNHMQHNLHGPGVPHLDPAGHIMRQHMSMPGRFPPEGLPRGVPPSQPVHHMAGYRPEMGNVNNFHMHPRQPNYGEFGLMMPGPEVRGNHPEAFERLIQMEMSARSKQQQVHHPAMAAGRVPSGMYGHELDAKLRYR

SEQ ID NO: 227404 - protein, 944 aa, Zea Mays
MKTRIVYSREFLLSLGELEHCKKLPPDFDAALLSELQELSAGVLERNKGYYNTSQGRPDGSVGYTYSSRGGNTGGRWDTRSSGSSDRDGEPDRESQTQAGRGANQYRRNWQNTEHDGLLGRGGFPRPSGYTGQLSSKDHGNAPQLNRTSERYQPPRPYKAAPFSRKDIDSINDETFGSSELSNEDRAEEERKRRASFELMRKEQHKAVLGKKSGPDILKENPSDDIFSKLQTSTAKANAKTKNEKLDGSVVSSYQEDTTKPSSVLLAPAARPLVPPGFANAFADKKLQSQSSNITHEPKLEDDQSATGFTSESKEKGVSGNDATMGPKHTLPPGSVTSSAELASSVLKGSEDWDADVMDKYSIGKEGKSKNIDPVRKDDSVAILEQFFGNVLSKSGSNLPTYVENQPLKTDDDMITSVPESSKFAHWFLDEDLKPAEDLSSKSLLSMIVKNENPELISFTSSTPANGVLEQCIHSDVPEAVPIMTCEDLEQTMLAQVSNSSSTQINATKEQLTVMDEPVAMQKVTVDNHASQHLLSLLQKGTDNKGAPSLGFQRESTDEPLSVDTNLMANGGISGSDPVNSVENVPTSGKDLTLEALFGAAFMNELHSKDAPVSIRGATTGGPTEFAEMGKTLLSSSHEGYYPVEQTVHFNNTKDAAVRREPGIEHSAVPGLSQGSASFDKKGMEIHLPEEDNLFTMSDSLLGQNSDILASVGSSRVEGLLPEKALDNLSYRFQSLVPGDAEHIQVYGPDALGSHPRDSQNMYHLLQGRPPMIAPHPMMDHIVNRKQPAPFDMAQSIHHDSHRSFPSNVNHMQHNLHGPGVPHLDPAGHIMRQHMSMPGRFPPEGLPRGVPPSQPVHHMAGYRPEMGNVNNFHMHPRQPNYGEFGLMMPGPEVRGNHPEAFERLIQMEMSARSKQQQVHHPAMAAGRVPSGMYGHELDAKLRYR

SEQ ID NO: 227405 - protein, 944 aa, Zea Mays; identical to SEQ ID NO: 227404

SEQ ID NO: 227406 - protein, 938 aa, Zea Mays
MKTRIVYSREFLLSLGELEHCKKLPPDFDAALLSELQELSAGVLERNKGYYNTSQGRPDGSVGYTYSSRGGNTGGRWDTRSSGSSDRDGEPDPGRGANQYRRNWQNTEHDGLLGRGGFPRPSGYTGQLSSKDHGNAPQLNRTSERYQPPRPYKAAPFSRKDIDSINDETFGSSELSNEDRAEEERKRRASFELMRKEQHKAVLGKKSGPDILKENPSDDIFSKLQTSTAKANAKTKNEKLDGSVVSSYQEDTTKPSSVLLAPAARPLVPPGFANAFADKKLQSQSSNITHEPKLEDDQSATGFTSESKEKGVSGNDATMGPKHTLPPGSVTSSAELASSVLKGSEDWDADVMDKYSIGKEGKSKNIDPVRKDDSVAILEQFFGNVLSKSGSNLPTYVENQPLKTDDDMITSVPESSKFAHWFLDEDLKPAEDLSSKSLLSMIVKNENPELISFTSSTPANGVLEQCIHSDVPEAVPIMTCEDLEQTMLAQVSNSSSTQINATKEQLTVMDEPVAMQKVTVDNHASQHLLSLLQKGTDNKGAPSLGFQRESTDEPLSVDTNLMANGGISGSDPVNSVENVPTSGKDLTLEALFGAAFMNELHSKDAPVSIRGATTGGPTEFAEMGKTLLSSSHEGYYPVEQTVHFNNTKDAAVRREPGIEHSAVPGLSQGSASFDKKGMEIHLPEEDNLFTMSDSLLGQNSDILASVGSSRVEGLLPEKALDNLSYRFQSLVPGDAEHIQVYGPDALGSHPRDSQNMYHLLQGRPPMIAPHPMMDHIVNRKQPAPFDMAQSIHHDSHRSFPSNVNHMQHNLHGPGVPHLDPAGHIMRQHMSMPGRFPPEGLPRGVPPSQPVHHMAGYRPEMGNVNNFHMHPRQPNYGEFGLMMPGPEVRGNHPEAFERLIQMEMSARSKQQQVHHPAMAAGRVPSGMYGHELDAKLRYR

SEQ ID NO: 227407 - protein, 663 aa, Zea Mays
MSYTFPTQPIVAPAKKKDARKDAADAAERHCSPLPSREHGRAAVAVDGDRGSQYALKWAADNILSRARPFFLVHVRRKPTFLQGPGGKQFAISHVQDDIPADLHAQMDLQAKDLMIPFQCFCSRRGGNYPGRNRRVEGDRRFRRHQQGRQVSAGLSIQERLYKDEDEAELSLFRIERKQQQQQDGDTDTLPWNYHAEGLSEQREMGRTPESSHRNRPEAAAAAEAEAEAEACSQSAIGPKHKPSSLDTLPHQRGEEFADYDSQDIIHPILRRWPPICSPRDDSRGGSSSATPEEARKLDLKLRALPRPIETKRMLECLPTRLECRIFTADDIANATNHFADELKIGEGGYGPVYKATLDDTLVAVKILYSNVTQGLKQFRQEVELLNNIRHPNMVRLVGACPVYGCLVYEYMPNGSLEDRLFCRGGTAPLPWRLRFRVAVEIASGLLYLHKMRPEAFVHRDLKPGNILLDAAFAAKIGDVGLARIIPRAVDVDGAATQYRETAAAGTFCYIDPEYQKTGLLCTKSDVYALGVILLQMVTAREPMGLAYAVSDALEEGTFPDLLDGNVAGWPVPEAQAFAELALKCCEMRRRDRPDLETVVMPELVRLHRVVSPSEYPSSSSSLPHSMDQAHHRSASNKDLRLDNDLVDILSEGRLKGGASFAM

SEQ ID NO: 227408 - protein, 799 aa, Zea Mays
MSYTFPTQPIVAPAKKKDARKDAADAAERHCSPLPSREHGRAAVAVDGDRGSQYALKWAADNILSRARPFFLVHVRRKPTFLQGPGGKQFAISHVQDDIPADLHAQMDLQAKDLMIPFQCFCSRRGLQCREIILDGTDVSKAIVDFVATNKVDKLVLGSASRNAFTRTIWKLDVPTSVTKSAPSFCSVYVIAKGKISSFRPATYANETSGSRGDPEPDHPPGNSLPVGEPAHNKPENGHGGISRPIPVRASTPTHGGSSDEPPTEDGGSFMSSDQTASSSCPSGGSLNDVDQHGYSPLSPTDEDEAELSLFRIERKQQQQQDGDTDTLPWNYHAEGLSREMGRTPESSHRNRPEAAAAAEAEAEAEACSQSAIGPKHKPSSLDTLPHQRGEEFADYDSQDIIHPILRRWPPICSPRDDSRGGSSSATPEEARKLDLKLRALPRPIETKRMLECLPTRLECRIFTADDIANATNHFADELKIGEGGYGPVYKATLDDTLVAVKILYSNVTQGLKQFRQEVELLNNIRHPNMVRLVGACPVYGCLVYEYMPNGSLEDRLFCRGGTAPLPWRLRFRVAVEIASGLLYLHKMRPEAFVHRDLKPGNILLDAAFAAKIGDVGLARIIPRAVDVDGAATQYRETAAAGTFCYIDPEYQKTGLLCTKSDVYALGVILLQMVTAREPMGLAYAVSDALEEGTFPDLLDGNVAGWPVPEAQAFAELALKCCEMRRRDRPDLETVVMPELVRLHRVVSPSEYPSSSSSLPHSMDQAHHRSASNKDLRLDNDLVDILSEGRLKGGASFAM

SEQ ID NO: 227409 - protein, 801 aa, Zea Mays
MSYTFPTQPIVAPAKKKDARKDAADAAERHCSPLPSREHGRAAVAVDGDRGSQYALKWAADNILSRARPFFLVHVRRKPTFLQGPGGKQFAISHVQDDIPADLHAQMDLQAKDLMIPFQCFCSRRGLQCREIILDGTDVSKAIVDFVATNKVDKLVLGSASRNAFTRTIWKLDVPTSVTKSAPSFCSVYVIAKGKISSFRPATYANETSGSRGDPEPDHPPGNSLPVGEPAHNKPENGHGGISRPIPVRASTPTHGGSSDEPPTEDGGSFMSSDQTASSSCPSGGSLNDVDQHGYSPLSPTDEDEAELSLFRIERKQQQQQDGDTDTLPWNYHAEGLSEQREMGRTPESSHRNRPEAAAAAEAEAEAEACSQSAIGPKHKPSSLDTLPHQRGEEFADYDSQDIIHPILRRWPPICSPRDDSRGGSSSATPEEARKLDLKLRALPRPIETKRMLECLPTRLECRIFTADDIANATNHFADELKIGEGGYGPVYKATLDDTLVAVKILYSNVTQGLKQFRQEVELLNNIRHPNMVRLVGACPVYGCLVYEYMPNGSLEDRLFCRGGTAPLPWRLRFRVAVEIASGLLYLHKMRPEAFVHRDLKPGNILLDAAFAAKIGDVGLARIIPRAVDVDGAATQYRETAAAGTFCYIDPEYQKTGLLCTKSDVYALGVILLQMVTAREPMGLAYAVSDALEEGTFPDLLDGNVAGWPVPEAQAFAELALKCCEMRRRDRPDLETVVMPELVRLHRVVSPSEYPSSSSSLPHSMDQAHHRSASNKDLRLDNDLVDILSEGRLKGGASFAM

SEQ ID NO: 227410 - protein, 397 aa, Zea Mays
MDSSSATAATVAPVVTSAPPLEDCLRLLRGERDEQKLAGLLVAANVCRAGDADAVANVYRAVGPRFLRRLLNTGLGKVEGGKEEEREAYMRLAVTVLAGLARVPEVAADEGVVSTVPLVAEVVAKSTDPAITEECFELLSLIAIASEDGAYEFCEPGVIDMIFLQILSLTDGSKCVELAINLLQLLVHKLKVDTMSSEKLQGMTRMVTCLARIFAVLHTAVKFDALHMLTFLLSQKESPLHDFLRSIPASIWESHIRVGITAILQNRVVSSEKLHALLLAECMMSILGEDWLSEDFEVQDNQNVLSVDKFVLLVLESARVEVAVLLNELAYLKYESSKISQTDEAISQKQRNLAILFSLIERIIKMISNASSGEVIWQKHHMPARRRLGIYWNLSFL

SEQ ID NO: 227411 - protein, 2520 aa, Zea Mays
MELRNICNHPYLSQLHVEEIEGYLPKHYLPSILRLCGKLEMLDRLLPKLKATGHRVLLFSTMTRLLDVMEDYLVWKKYKYLRLDGHTSGHERGALIDKFNDPNSQAFIFLLSIRAGGVGVNLQAADTVIIFDTDWNPQVDLQAQARAHRIGQKKEVLVLRLETVRTVEEQVRASAEHKLGVANQSITAGFFDNNTSAEDRREYLESLLRESKKEEAAPVLDDDALNDILARSEAEIDIFESIDKQRREEEMAAWQKVVQDGSTSGLDPGVLPSRLVTDDDLKPFCHAMKLYEPSNVKTVNVNVRKKGELGGLDTQHYGRGKRAREVRSYEDQWTEEEFEKLCQADSPESSQPGGMSKDLDILNKGIKTEILVESSKEPEQTKMEASPTVGDSPPAKRRRGRPKRSDVFVSPTAGLTDAVKQDTGTTQDGSSATPASTIHSDAPATAINSAVSDVNIHSIPPADTKKQEFSTDTKVSSSVSVLEGSVPNEIGTPLQSVHNVAVSAPPHQSARGRKCQAGETPRRRGRKPKSLSSSGVDDVSLNPTFSTVSGVADTSYVPSYSQVSSQGTAVALAGIQKDFVTVKLDTLLPDSGKGAPPVNEGDKGATVTTPVAKDICAGTVTTSDNTVTLTPNTLKENIGLVQVASAPSMLVASEELMKIAHVAVADKPVEKQTASRRRRKKTSSSEDTGVSTRQRSAMKRSYYNTSVAVDDIGSAVIPNEKSGITKERDVSSIQSTSNELPNINSPLYEKSGYDSQPSTPIAVPINEDTLPSGFDTCTNSMITLATSANSAEDDKPVDLHLNAPVSVDSQNQEQHMTGKDHLAVCSRIFATQLQTDTANPAIDHKPGTAQFEPSASLPQNSGKDATALPSEVDSAAPNRASSRRRKGSTREPRTRSNSASAASERRARLTGLKQAEDIKKLEMSATPTTTVCISSVEQQGAASLSAKITNASVSEGQKNPGNYMPSAISIPVGSHVLGLGATSIEETTATMITQAPAVSKSERRKLPGGSQQGIQFESSASKTKMVSAVEPAPANVECMQGTEVNSSEQTIVSATEPAPANDEHMQEQPTNIVSSVESEPSNDEEHTKHEVFLATTGDNMLASSAGTEILRDTVEHAACQPEAVCTDGTARQSELSQLDRKAFHDASYKYTHGSTKDDGILPSEGTSVDVTGSKQDDVNIVGTQTDDVSRGSSHFPVILQSTESDRPPGQVKNLESRMEQVKTEEALVNSSGGNQTHSLGDEPSHNTSLARNSPSEHSNERCSDQVIGENFKSKENIVEVHSGINTDGPDEALNALHTQSKEASMTDIGVPTDGDRCEGKGTSVEVCADMNTDGPVATQDASSTKSDKESCMMECGVSTDGCPTVCKTHNDLQGHVSCEETFVRTGGDDTTHITNANYGSNNESEATIASPVETTQKLMEGSTVIVSENSDLNKQCHTLHTRNDPPANTLLIVESNKVTCDAEIVCASRLESSGIEAETVGIQESALTDFEGTKGTGDLGDRTNSQLHDDVHGTSCSTIALVSEKEPSEDLTTGSHSEASNLLAAVEQTQETTVENQEIIDAVVFMDACKAEPVGDFTIAKGAEQTVEMVHYVDKQSAVLDYVETQTKRTSVCGSTLNESPQAAGLEEDCSVLKHGDPTSSELLTVAPNPIGETSVIQVEPEARNSDGYCTTEAGSALSETVMGLEPNKETAVPMQENIGEANDNFNNCEAHNNSEIHAFEVSMETQSSEVKEVSSIQSGAANLSTQTTALPDVTGQTSMASTGELVSTNEHIHMQGTEINSEQQTKMVSPAESAPANDEHVQDIVILSSEQQTKMVLAAEIDALCVQETAIIDLGGARGTVDLNDIRTQVPALPGRDVLDVEAHILEQKKTSSPGDEIKGSEQAKIESIAEIETVGVKENVIADHKETGNNSGVSIHAPLLVESGQKASPGVELRGIEVDAHVLEQAKMVSALEPDSTPEVCADKLEPSGADDVGMIVVQEAASVDDHNRAQGGEAHCSEQIKMASIAQAVSSMALVGYSSSEDSMVDAAARVTDADFVDSKAAGVYRQETMPTQTTSTLPENMDSPATAATMVESKFAASSEHVAGPEPIDETSVMQVELATSTGDGCAADGHNLVSSETVVEVKLAQEIVVPSPGGSIEANNTSTISEVYKDTQSRASGEACNDGQSHGDENMKLGEAYTELQLAPSSGEEAMTCMCSELPSQEVEAPSSDPLENNEETKNEAAAQGSVNEDSAPRAENAKIDEADTEQELLPSGEATVDESSELLSQDEKVARKDAKMEESAAAAAAQRQLTTEVAHASENAKLGEDGTELQLPPPSMVDISREQLSQEVEVASSGPSGTDETAEMKRLNTEHSPGDETSKLVGTDLGLQLSPSGDAMVDISNKPPSCQDVKEAPSSDILGNDENSDTEKTPAALHGRLNTELAPSGRNTEFSEADTGKQETPVSAEAMVESSSEPRSHEAKEAPTPDLSGDDEKAKSARAAVVAELFGDATEGGSDQPLPSPREQGKEAEADGGF

SEQ ID NO: 227412 - protein, 1259 aa, Zea Mays
MVHLSGVPVRPNPLRYPLAVSTSSRFSFGAPEQRTIKRATAAQARHRRPPVQPNRARRIEGASRPPSVLLDDDNEHEELMGRKGRKGKGAAAGGSAGMKEATLVRVSKALEDFRASNAEVYTFEPDISKQERAAIHEMCRKMGMISKSSGNGERRRLSVYKRKQKRGPELEQGPSYLGFSEEARHVLQDLFMHYPPGDADLSGDVDQSSSDKAANIKWRTDNAFCRPAMSKLDITKKVEMLASKINGSEQLRKVMEDRTKLPISSFKDVITSTLENHQVPQYILDHMWGKGESCKIICTQPRRISAISVAERISAERGEAVGDTVGYKIRLESKGGKNSSVLFCTNGVLLRLLIGRGTNASKARNQKRSLDDAVLGITHIIVDEIHERDRFSDFMLTILRDLLPLYPHLRMVLMSATIDAERFSQYFNGCSVIQVPGFTYPVKTFYLEDVLSILQSAGDNHLTSHKTEGSVLTHDFKSSMDDSINLALVNDEFDPLLELISAEQNTEVYNYQHSETGITPLMVFAMKGQLGDVCMLLSFGVDCSAQDHDGKSALDWAQQENQQEVCEVIKKHMECSSEKSTEDNELLNKYLASINPEHIDTLLIERLLRKICVDSNEGAILVFLPGWEDISQTRERLFASPFFQDSSRFLVLSLHSMIPSSEQKKVFKRPPVGVRKIILSTNIAETAVTIDDVVFVIDSGRMKEKSYDPYNNVSTLHASWVSKASARQREGRAGRCQPGTCYHLYSRFRASSLPDYQIPEIKRMPIEELCLQVKLLDSNCRIADFLKKTLDPPIPETVRNAIAVLQDLGALTQDEQLTELGEKLGSLPVHPSTTKMLLFAILMNCLDPALTLACAADYRDPFVLPVAPDERKRAAAAKVELASLYGGFSDQLAVVAAFDFWRHAKDRGQDSQFCAKYFVSSNIMNMLSSMRKQLQNELSQRGFVPADASACSLNSKDPGIMRAVLMAGAYPMVGKMLPPRKNARKSVLETASGAKVRLHPHSCNFNLSFSKSSGNPLLIYDEITRGDGGMYIKNSSVVGSYPLLLIAAEMVVAPPDDDSDEDEEDSSEDEAEESTLVQHKEEIMSSPDSIVSVVVDRWLRFDATALDVAQIYCLRERLASAILFKVKHPQDVLPPALGASMYAITCILSFDGLPSMVPPNDLSANRGSGQDLAEASKFSQGRRAGYIPPSGFLMSLLADRTHNAPSFQNSSNHPGGGSAHTRPSRAPVGRFDRSRRPFRNSGPGTSAPRSFKRQRDAPR

SEQ ID NO: 227413 - protein, 771 aa, Zea Mays
MVHLSGVPVRPNPLRYPLAVSTSSRFSFGAPEQRTIKRATAAQARHRRPPVQPNRARRIEGASRPPSVLLDDDNEHEELMGRKGRKGKGAAAGGSAGMKEATLVRVSKALEDFRASNAEVYTFEPDISKQERAAIHEMCRKMGMISKSSGNGERRRLSVYKRKQKRGPELEQGPSYLGFSEEARHVLQDLFMHYPPGDADLSGDVDQSSSDKAANIKWRTDNAFCRPAMSKLDITKKVEMLASKINGSEQLRKVMEDRTKLPISSFKDVITSTLENHQVVLISGQTGCGKTTQVPQYILDHMWGKGESCKIICTQPRRISAISVAERISAERGEAVGDTVGYKIRLESKGGKNSSVLFCTNGVLLRLLIGRGTNASKARNQKRSLDDAVLGITHIIVDEIHERDRFSDFMLTILRDLLPLYPHLRMVLMSATIDAERFSQYFNGCSVIQVPGFTYPVKTFYLEDVLSILQSAGDNHLTSHKTEGSVLTHDFKSSMDDSINLALVNDEFDPLLELISAEQNTEVYNYQHSETGITPLMVFAMKGQLGDVCMLLSFGVDCSAQDHDGKSALDWAQQENQQEVCEVIKKHMECSSEKSTEDNELLNKYLASINPEHIDTLLIERLLRKICVDSNEGAILVFLPGWEDISQTRERLFASPFFQDSSRFLVLSLHSMIPSSEQKKVFKRPPVGVRKIILSTNIAETAVTIDDVVFVIDSGRMKEKSYDPYNNVSTLHASWVSKASARQREGRAGRCQPGTCYHLYSRSNCLIQTAE

SEQ ID NO: 227414 - protein, 134 aa, Zea Mays
MCLTEFYIAEVLLALEYLHTLGIIYRDLKPENVLVREDGHIMLSDFDLSLRCAVSPTLIRSSNPDAELQKRSGRAAKATVLSQPVLSRPASLNRRVQPQPPASAHACSPPSPRPRETGNQNQKLPPRSALGLSS

SEQ ID NO: 227415 - protein, 734 aa, Zea Mays
MAPPASTDETARHKKARKSKIDIEEKKHKKTNKARAAAEDAPIPDAAERKKRKHKDGREEKRDGQKSKKERKSEGKGEEAEAAVGRDEKMRRAMEDERFAAARTDPRFRPMRRKESKVALDSRFSSMMTDPRFASSAAPVDKRGRRRKKRENPMLHYYLNQEDLEDDGKGKEKGKKEKPVLVQEEEEDEEELEEQEEEESSSSDDDEDEDLDDDDEEAVDLYMVMTSCLPKGGRVLSVSIYPSEFGLKCMEIESTQGPAALVNANVDKKDSDEDEDDTDDDEESTDDDVDEEEEEVDSDKENNKLRAYELNRLRYYYAVVVCDSSATANHLYMTLDGTEFLKTANVFDLQFIPDSREFKHPARDAATEAPPSYKEPDFETRALQHSRVKLTWDDDEPERKKVLRRKFNDDQLDELNMYLASDDSASDNEGVDDSEDESLPNGGSKRKLTKEERLALLLQGDKSDEEQTDDQDMEITFNTELEDLSKRILERKNNEEKTIWEKHQEKMKEKRKGRKRGLKDEDDDNHYISDDEPENDDDFFADEQSDEEPKPSKSKKHKAKAKGEAKRKGNDGTTDEHLEQEATKDELELLVAGDQDTANGAKGYNLKRKKGKKGKEESADDKLPDIDLSKDERFSAMFTSHLFALDPTDPQYKRSAAFMRKQAGKPGVHGGKSSREPPLEGSSLGGTVPPDDAVTNNDGQKPDGSATEKLQILSAVKSLKRNLGAFKNSKTGDR

SEQ ID NO: 227416 - protein, 278 aa, Zea Mays
MLKFELMYAPTLENGSELQASSVTSSAAVHEFRIPHRALLGLHSYCPVHFDAFHSVLVDLTLHIVYLKAGATKPSLKVPDQGLGPTSYHIVKALLTSRKLLLEELKKISGAIGKTVEELDVADLNLGRYESFNPSKSGLPNSSKVFPATGKGVGQLTGVLHDFLEKNNDMVNGTDDSMLVNKTKILEYLHDAWAIDRKAEWSIWTVHSKIEIPHRYLRSMNDESSHRHSLLRVSGSRKFHDDPAQNSASRAELHRKSIAQMKINTQSVQDMHIYADPS

SEQ ID NO: 227417 - protein, 592 aa, Zea Mays
MVSFNIFNIEEEGPAASAVMLKFELMYAPTLENGSELQASSVTSSAAVHEFRIPHRALLGLHSYCPVHFDAFHSVLVDLTLHIVYLKAGATKPSLKVPDQGLGPTSYHIVKALLTSRKLLLEELKKISGAIGKTVEELDVADLNLGRYESFNPSKSGLPNSSKVFPATGKGVGQLTGVLHDFLEKNNDMVNGTDDSMLVNKTKILEYLHDAWAIDRKAEWSIWTVHSKIEIPHRYLRSMNDESSHRHSLLRVSGSRKFHDDPAQNSASRAELHRKSIAQMKNNMSWLFHSIVPARIWLRMLLNKRILLCYLNYKESLWYPKVVLGHHLDLRLVRNQWLLLDPGADCLMSEANEDKTSGDFKEMGSRLAGEVIAFLKKKMDKLSRYGGCKELKLSFVGHSIGNIIIRSALAEPALQPYLKNLYTYMSISGPHLGYWYSSNSLFNSGLWLLKKLKNAQCIHQLTFSDDQDPHNTYFYKLCKLKTLENFKNIILLSSPQDGYVPYHSARMELCPAASSDTSKKGQVFTEMLNNCLDQIRAPSSDTRTFMRCDVNFDQSNHGRSLNTMIGRAAHIEFLETDIYAKFIMWSFPDLFR

SEQ ID NO: 227418 - protein, 644 aa, Zea Mays
MFQSSVLQSRHEDLYGAAPSGFRTVVRLVPVATLHLPLRVPVQVLEKRLNDQFVMRRALEKALGYKPCAIHASSENCIPKPTEELIKEIAVLELEVICLEQHLLTLYRKAFEQQFSPASSACDMESNKQPARSFSGILSEAPELSFSTPRKHHQLNQSSRMVLARKSTPTASTSETSNEKINIGRSHSSLLHRSVRVSPSANNLARALKPCHTSPLSFVEEGKCMDPGVVSLADILGTRVADHVPQTPNKISEDMIKCITAVYMRLRDVPAVQHAFFPSPCSSFSSASGLSSKYTADIWSPRCRKESFVEEWQDNGLGNGESRELALPYDSVVEVSALCKGDQRSADVKDMLRKYMSLVQLLESVDLSGMKHEEKLAFWINVHNAMMMHAHIEYGIPQSNSKRILLTKVSYIISGQRVNAELIEYQILCCRAHSSGQWLRLLLYPKWKSRDKDELQGFAVDRPEPLVHFALSSGAAVQPQERVPAAGGGEGGVRPRQRGRPRAGAAQDHPPQGPGAVREGRRAGRAGGGGRGRVPPARGPPGRRAPEPAAGRPGARRGVEAPQPGVPVPAGQGAGRRVPRVQPAAGAGQCAAAGWSVIRHQIAVGPWPCRAEHELRCAAAAHCVRALGALYVQRVREMDGETDI

SEQ ID NO: 227419 - protein, 367 aa, Zea Mays
MSWFGHHHHNQPAPPASGPNQVFKIFCRANENYCLAVRDGAVVLAPVNPKDDHQHWYKDMRFSTRVKDEEGMPAFALVNKATGLAIKHSLGQSHPHSLGMQVKLAPFSPDQEDASVLWTESKDVGKGFRCIRMVNNTRLNFDAFHGDKDHGGVHDGTAVVLWEWCKGENQSWKILPWGPEANSSAAHAGGPHAVRVFCKAGGEDYSLTVRNGTACLAPTNPRDEYQHWVKDMRHSTRVRDEEGYPAFALVNKVTGEALKHSTGQGHPVKLVPYNPDYQDESVLWTESRDVGNGFRCVRMVNNIYLNFDAFHGDKAHGGVHDGTEIVLWKWCEGDNQRWKILPWCKNERKKLLAGTLIIILLAAAIPK

SEQ ID NO: 227420 - protein, 193 aa, Zea Mays
MSWFGHHHHNQPAPPASGPNQVFKIFCRANENYCLAVRDGAVVLAPVNPKDDHQHWYKDMRFSTRVKDEEGMPAFALVNKDMRHSTRVRDEEGYPAFALVNKVTGEALKHSTGQGHPVKLVPYNPDYQDESVLWTESRDVGNGFRCVRMVNNIYLNFDAFHGDKAHGGVHDGTEIVLWKWCEGDNQRWKILPW

SEQ ID NO: 227421 - protein, 740 aa, Zea Mays
MNKLLMEENERLQKQVSQLVHENAYMKQQLQNPSLATDASCESNATTPANLRDASNPSGLLAIAEETLTEFLSKATGTAIDWVQMPGMKPGPDSFGIVTISHGGRGVAARACGLVNLEPTKIVEILKDRPSWFRDCRSLEVYTMLPAGNGGTIELVYMQMYAPTTLVPARDFWTLRYTTTMEDGSLVVCERSLSGSGDGQSAATTQQFVRAEMLPSGYLVRQCEGGGSIVRIVDHLDLDAWSVPEVLRPLYESSRVVAQKMTTTALRHLRQIAQETSGEVVYALGRQPAVLRTFSQRLSRGFNDAISGFNDDGWSVMCGDGMEDVIIACNSKKIRSSSNPATGFGAPGPGGIICAKASMLLQSVPPAVLVRFLREHRSEWADYNFDAYSASALKTSPCSLPGLRPMRFSGSQIIMPLAHTVENEEILEVVRLEGQTLTHDEGLLSRDIHLLQLCTGMDEKSMGSCFQLVFAPIDELFPDDAPLVSSGFRVIPLDIKTDGPPSGRTLDLASSLEVGATTQQVAGNGSQDVCNLRSVLTIAFQFPYETHLQDTVAAMARQYVRSIVSAVQRVSMAISPSHSGLNTAGQKLISGSPEAATLVRWICQSYRYHLGVDLVSHSDQAGESLLRMFWDHQDAVLCCSFKEKPVFTFGNQMGVDMLETTLVALQDLTLDKIFDEPGRKALHAEVPKLMEQGYAYLPAGVCLSGMGRHVSYEQAVAWKVLGEDGNVHCLAFCFVNWSFI

SEQ ID NO: 227422 - protein, 124 aa, Zea Mays
MVEELVVDDTPETSRGIIGLCSDPSTGLFYAYDESSIFQVSTSDEGCDMWQVYLDMNHYAAALSHCRNPFQRDQVYLVQADAAFAAKEYYIAASFYAKINYILSFEEISLKFISIDYDDLNLGY

SEQ ID NO: 227423 - protein, 1600 aa, Zea Mays
MHKLLFVLEMLDPFIDPSTSAMEDTVIFDGISAIYLEKQSSVYDIALNIIHTAVKRAAVLPSLELEWRRGAIAPSVILSILDPHMPLPPDIDLCKSSVHEIDKVPLAVLDNHAPQPCNPENIAGRDASETTIRPENFEQCSFLFAPEELNQSELTSLYTLKGKGHDVITQTSLNHDIPEGRSKEKLSSDPFLLDNVVAADYFDSQADYQQLENYQDCELRAQEFHRIALNLCMQQEPTLEGHNAGIDALLLAAECYVNPFFLLGFQSNLEPLDKIERIHSELMQGNASSVSKNLHLKDFNKKTIYNLENKRDRSVIDLLLQAARFDFEYHGKIPEGELYPNIAEDGKRSVEISPEALQFADAVTLVRKNQAMLCHFIMKQFQRKGHLGSEILLQSLLFLLHSATDLFCPPENVVDIILKSAESLNDQLTCLYSFFSAGNKKLDRIKIHGLRRRWMLLQKLVLASSGSDSTRELARNKRDGFHFRSLVPPSTWIQKISDFSMFSSPLPRFFGWMAVSCYAKEYLNEKLFLASDFSQLTSLLSIYMDELCLMDGVAIPKVRSAKGEQFSCTDLFLKKETTLSDQPSMTEQFKILLPELHFFFPSMGKLFNAFGESILEAVGLQLKCLPNSAIPDVLCWFSELCLWPYLEHIKEHLVVANGVSYIRGSIAANAKSVVFYLLESIVTEHLEAVIPEMPRIVHILVSLCRASYTDVAFLKSVLCLIKPLISYFLRKGTNETKVLGHIKEGSNFELLCFEELFEIVRCGKDSVDTTEDNIQAPLVIFILGSMFLDFSFERRIEMLGSLLVWIDCISSDPPSLLCNYLQGFQTLLDGFEAVLIQNIELLGVGILSATNSSIESSDSLGIDGTMLLEKKAQDNEEQTLMKSVTYCENDGNHKGLRNLHPNSIIEFCGTLEKFILHLTSYIEDSWKWHHQLASRISLSMAKCLLFAKFLKSIAQEDTISSSSEQDVAVKISCELAQKHWQSALEGLGDTILINQETQFWQVASAMLDYIMGIPNVLAWGNVLNTTCSAVKHFCSHAPRLSWRLQTDKWLSLLVSGGIEGFKNSEICLIDLFCTMLNHSEPEQRFVAVQQLGRIINSTSSTEADLKYPNYDQNFLISVSTVTSLLVTHTWDRVAALALHDSSMLLRNHAMALLTEYVPFVDRKHLQSFLSSSNGILTGLGQLSGVIEEGYFTRMSLLLFSKACLYSNPEDIALIPECVWQKLENMQTSTGGFGYMEKDLCLALCQLKSESDATTVAKVLSGCNSQPVSPDFKSIRESILQVMSSLSSIEAYFEFFAARSAQEHEELEEAEIELELIEKEKSVPNFVEHTNDTMVLAMPSYDRDGSEVNKRLQQIRENIRSLERSRLKEEITARRQKKLLLRHAREKYLEETRSRETELMQELDRERALEMEREVERQRQLDIERAKSRELQFNIDLEKEKQTQRELQRELEQVELGRSSRREFSANPNRERYRERDGGGRAQQEAGSLRSSSSRGQEGGSAQAPAPAGPGPTVMLAGSRTFSGANLPTILQPRERAADEDSAWAEDASSNGDPELDGVRPHGPRGSRSSSSRQVAERRERDGTAAGTGRREGKWERKQHP

SEQ ID NO: 227424 - protein, 248 aa, Zea Mays
MEKDLCLALCQLKSESDATTVAKVLSGCNSQPVSPDFKSIRESILQVMSSLSSIEAYFEFFAARSAQEHEELEEAEIELELIEKEKSVPNFVEHTNDTMVLAMPSYDRDGSEVNKRLQQIRENIRSLERSRLKEEITARRQKKLLLRHAREKYLEETRSRETELMQELDRERALEMEREVERQRQLDIERAKSRELQFNIDLEKEKQTQRELQRELEQVELGRSSRPAPGRGTAKGMVEAEHSRRRGA

SEQ ID NO: 227425 - protein, 501 aa, Zea Mays
MEFVPRRGSSSRASPRAASRRTPRAGTSSSSSPPSASATPTASSTATSSPRISSLTSAATSRSPTSALSAANKFTEATLPADAEKKPQDGKTLPKYGAMIMEALLELNEPNGSDIAAIFGFIEVSDFGLSAVADKFHPDALLHTFCGTPSYVAPKVSSRSLKKAIGFKTHSRRPASSSGPTKRGGLLLGRYELGRLLAHGTFAKVYHARHDDDTGETIAIKVLDKEKALCNGLVLHIKREIAILRRVRRPNIIRLFEVMATRSKIYFAMEFVRGGELFACVAKGRLKEDTARRYGAMIMEALLELNEPNGSDIAAIFGFIEVSDFGLSAVADKFHPDALLHTFCGTPSYVAPKVSSRSLKKAIGFKTHAAGVKHWPPGAARQRPTGAPCRWAEAASDNSRAQHADIVNQGKLVSDEIIINLLSRRLEEGEEKGRKWLMPRISSPSSATTELAWSRLGSLATTPRGPSSPASWGARATLVSWSGWGRRTPTSVTRRSPRGVS

SEQ ID NO: 227426 - protein, 314 aa, Zea Mays
MVKDSAYYDVLEISTDASMAEIKKAYYLKAKLVHPDKNPSNPDAARKFQELGEAYQVLSDPLKKESYDKYGKEGLPQDNMIDPTAVFGMLFGSDYFEDYVGQLALASVASVEIEEESNTPEARTRIQEKIKDVQTEREQILTQSLRDRLQPYVDGKQDEFGDWASAEAQRLSQAAFGEAMLHTIGYIYVRQAARELGKSKLYMGVPFIAEWVRDKGHHVKSQVNAAAGAISLIQLQEGIKKIEEGDKEEQLIKSIEEKKDAMLNSLWKINVVDIESTLSRVCQAVLRENDIPRDVLKLRARGLKKLGTIFQDAA

SEQ ID NO: 227427 - protein, 339 aa, Zea Mays
MFWRMTGLSAASPVDTILDKENFTLEELLDEDEIIQECKALNSRLINFLRDKAQVEQLLRYVVEEVPDDAERKRSFKFPFIASEIFTCEIDVILRTLVEDEELMDLLFSFVKPDHPHSTLLSGYFSKVVICLVLRKTAPLMSYVQGHPEIVVQLVDLIGITSIMEVLIRLIGADETIYSNYGDTLQWLENTNVLEMIADKFNSSDSPEVHANAAEILCAVTRCAPPSLAAKICSPSFVRRLFHHALEESRPKSVLLHSLSVCISLLDPKRLASASYQAFKSNLSHGALVMASPETVDGMLESLGNLLNLLDTSAAESVLPTTYGCLRPPLGKHRLKKRS

SEQ ID NO: 227428 - protein, 794 aa, Zea Mays
MVNKYGPKKWSAIAQALPGRIGKQCRERWHNHLNPAINKEAWTQEEEITLIHAHRMYGNKWAELTKFLPGRTDNAIKNHWNSSVKKKVDSYISSGLLSQVPCLSLIECPAQCDSLSAMDQQNNGGTDCNDQNTSVVLSSDLQVNVDANKKEAHDSHSSLCQGVCYPSTETVGSVLPDDLEMDMDEGSGNSIFADDQTLCSTSNQEQSMVPFVVAQEMPVSVLSSVSSAEQKRHLISDAKSLKSELWKDVCLQTLITGDTDDPDASSRLNNPDSSKMDTNFLKEAYPLHTPNPSSVIETVYEPMALVTISPPFICSDGLSFAPENRSKPGEMSDCEAEMVTCSNNFFGNAEQSAKLASSDDRPEAFTMTESTTNCGGEQLTDAKEPVASTAKERLSKDIETMPDKKKGEGALFYEPPRFPGLDVPFISCDLVTSADLQEFSPLGIRQWMRSTMNVPTPLRLWGSPTHDESPDALKTAAESFPCTSSIMKKRQRSLLSPTPDERIEKKSGIAKGVTDISYMITATCSMNATNDEDIVTESAVCAKQPSLKHLDKKLEFSDINKENSDGASEQAKDAQNTQLVDEQHSSPNVVNPNTDLQDNIQPVQILVEQSSNNLISSDHGAKPSCKEVISSKSKPTKLLVEKSSPCINVDYEYVNLLADTPGIKRGLESPSAWKSPWYIDMHMHFQGFVSPADRTYDALGLVNRLSKHSAAAAVEACEMLASGNTTSDKENKDNTDGKELVTRKSQIKIMAEARVLDFDESPAPARTADKKLGSCHRRSVSSPILPSPNLRSFR

SEQ ID NO: 227429 - protein, 744 aa, Zea Mays
MQPDGGGAIRVLNVAEKPSVAKAVAEILSRRSAQSRAGRSQYNRIFEFNYAINGRACHMLVTSVTGHLMELEFDDRFRRWHSCDPAELFHAPVRKSVPQDKQAIKQTLEEEARRCQWLVLWLDCDREGENIAYEVIDVCTRANSHLNIWRARFSALIDREIHESVQHLGRPNKLFADAVDARQEIDLRIGASFTRFQTMLLKDAFVIDVTGDERSLVLSYGPCQFPTLGFIVERFWEIQAHEPEEFWTINCTHTSDEGTASFGWIRGHLFDYSCAISIYEMCVSEPMATVQNVRNQEKLKYPPYPLSTVELQKRASRYFRMSSEHTMKVAEELYQAGFISYPRTETDNFSPNTDLHAIVREQVNHPVWGAYAQRLLNPEARLWRNPSNGGHDDKAHPPIHPTKFSEGERNWSPDHTRLYEFVVRHFLACCSQPAVGAETTVEIDIAGEQFNASGRVILAKNYLDVYRFDSWGGTLLPTYNIGQQFVPTTLTLDSGVTRPPPLLAEADLLSCMDKAGIGTDATMHDHIKKLLDRCYATKDENTRFSPTNLGEALVMGYDEMGYELWKPYLRSMMEADMKSVSVGTKSKSEVLESCLQQMKACFLDARVKKAKLLDAMGTFFARPINETQNPVEVVRPCGACNGSEMLLKRRASGEFMVGCRSYPQCRNVVWLPGSLSEAAVTNQVCPICAPGPVYKIQFKFRRRDIPPNFDVDHLGCVGGCDDILKDLMEISRFGSRSQAATPGF

SEQ ID NO: 227430 - protein, 107 aa, Zea Mays
MTRASSSVVPGSSSSPPASTGSSSPPGGSSSWRCSSGHPNSSPPASTSRSARASDPTRHRSPHQGFHNKCCEKTYETSISSSELSCLGDRYFATDSQGDNNTESYKT

SEQ ID NO: 227431 - protein, 1082 aa, Zea Mays
MARTSGPPGPPEPGRHDAPMLLRVHVIEARGLPAIYLNGSSDPYVRLQLGRRRPRETTVVKRSLSPVWDEEFGFLVGDVAEDLVVCVLNEDRFLGAEFLGRVRVPLTAIMETDDLSLGTRWYQLQPRSGVKFRKKRRGEICLRVYLSVRATLCDDAHQAPPQLIDDISCSSHRSIETNESPLSATVNSLDMSACASMDRTSLKSSDGFNQSMTEVRGPRSTGPLSCVSIEQSILLEPEEDDGSAIVDTSSVVEVMSRYFRKTADATHSVASDPVSLDQFRSTQMNSECRENEEGCTLPEVSLDELLKNMESKDQACELPGNLPGGVLMDQSYIIAPAELNSLLFSGTSDFWPEVSELQGTSGFNIEPWKHDNNENCLKRTITYTKAASKLVKSVKATEEQKYLKATGSSFAVLSSVSTPDVPCGNCFKVEILYRIISGSQLPLEQTTQITVSWRLNFVQSTMLKGMIENGAKQGLAEGYSHFSEVLSRKVKVAELADANTKDKILASLQTQKESNWKLVARFLGSFAFICSLSTALYITTHLHLAKPNVVLGGLEYFGIDLPDSIGEIVFCIILIIQGHNIMKVGRRFLQAWKQRGSDHGVKAHGDGWLLTIALIEGSGVVSAVFTCNGKRKTSSVKYQTSEPKWNEIFEFDAMDDPPARLDVVVHDSDIPNNETPIGQTEVNFVKNNLSDLGDMWVPLDGRFPQGHQPKLHLRIFLNNSRGTEVVMNYLEKMGKEVGKKMHLRSSQTNSAFRKLFSLPPEEFLIDDFTCHLKRKMPLQGRLFLSPRITGFYSNIFGRKTKFFFLWEDIENIQVVPPKLATVGSPSLMIILCKDRGLEARHGAKALDPQGRLKFHFQTFVSFNDAHRIIMAIWKLRSSGLEQKGEVIDKEPELKENPYEEGSLLANEDVKMSEVYSAVLSVDVSALMEMFSGGPLEHKVMERAGCVDYLATEWELLNRNVYQRHINFRFDKSLSRYGGEATTTQQKYNLPNQNDWIVEEVMTLQGVQHEDYSSIQLKYHMTSTPLRPNSCRIKVLLGIAWLKGTKHQKKAAKNVMMNSANRLREIFSEVEKEVTSRKVPASG

SEQ ID NO: 227432 - protein, 1051 aa, Zea Mays
MARTSGPPGPPEPGRHDAPMLLRVHVIEARGLPAIYLNGSSDPYVRLQLGRRRPRETTVVKRSLSPVWDEEFGFLVGDVAEDLVVCVLNEDRFLGAEFLGRVRVPLTAIMETDDLSLGTRWYQLQPRSGVKFRKKRRGEICLRVYLSVRATLCDDAHQAPPQLIDDISCSSHRSIETNESPLSATVNSLDMSACASMDRTSLKSSDGFNQSMTEVRGPRSTGPLSCVSIEQSILLEPEEDDGSAIVDTSSVVEVMSRYFRKTADATHSVASDPVSLDQFRSTQMNSECRENEEGCTLPEVSLDELLKNMESKDQACELPGNLPGGVLMDQSYIIAPAELNSLLFSGTSDFWPEVSELQGTSGFNIEPWKHDNNENCLKRTITYTKAASKLVKSVKATEEQKYLKATGSSFAVLSSVSTPDVPCGNCFKVEILYRIISGSQLPLEQTTQITVSWRLNFVQSTMLKGMIENGAKQGLAEGYSHFSEVLSRKVKVAELADANTKDKILASLQTQKESNWKLVARFLGSFAFICSLSTALYITTHLHLAKPNVVLGGLEYFGIDLPDSIGEIVFCIILIIQGHNIMKVGRRFLQAWKQRGSDHGVKAHGDGWLLTIALIEGSGVVSAGTPGVPDPYVVFTCNGKRKTSSVKYQTSEPKWNEIFEFDAMDDPPARLDVVVHDSDIPNNETPIGQTEVNFVKNNLSDLGDMWVPLDGRFPQGHQPKLHLRIFLNNSRGTEVVMNYLEKMGKEVGKKTNSAFRKLFSLPPEEFLIDDFTCHLKRKMPLQVVPPKLATVGSPSLMIILCKDRGLEARHGAKALDPQGRLKFHFQTFVSFNDAHRIIMAIWKLRSSGLEQKGEVIDKEPELKENPYEEGSLLANEDVKMSEVYSAVLSVDVSALMEMFSGGPLEHKVMERAGCVDYLATEWELLNRNVYQRHINFRFDKSLSRYGGEATTTQQKYNLPNQNDWIVEEVMTLQGVQHEDYSSIQLKYHMTSTPLRPNSCRIKVLLGIAWLKGTKHQKKAAKNVMMNSANRLREIFSEVEKEVTSRKVPASG

SEQ ID NO: 227433 - protein, 813 aa, Zea Mays
MTRLLCLTALTIFPIILCLTTSAAVTASDTLDSGSNITDGATLVSAGGSFTLGFFSPTGVPTKRYLGIWFTASPEAICWVANRETFLSNTSGGVLVIGSTGSLRLLDGSGRTAWSSVDSTSSSAPPVVAQAQLLESGNLVVRDQSGRDVLWQSFDHPSNTLLAGMRFGKDPRTGAEWFLTSWRASNDPTPGGYRRVLDTRGGLLDSVSWKGSVKKYRTGPWNGLWFSGIPETASYKDMYSTQLVVRPDEIAYVFNTAAGAPFCRLVLNEVGMVQQLGWDPVSRVWNVFTQAPRDVCDNYAKCGAFGLCDVKSGSTLFCSCAVGFSPVNPSQWSMRETRGGCRRNVPLECGNGTTTDGFKMVRAVKLPDTDNATVDMGATLEQCRARCLANCSCVAYAAADIRGGGGGHGCVMWTDAIVDVRYVGKGQDIYLRLAKSELVEKKRNVVIIILPLVTACLLALMGMLLVWIWRKHKLRGKRRSMDDIQHKTIVRHLDETNTLGDENLDLPFFSFGDIGILGEDRVVAIKRLSQGSGQGIDEFRNEVVLIAKLQHRNLVRLLGCCIHGDEKLLVYEYLPNKSLDSFIFDAARKNALDWPTRFRIIKGISRGVLYLHQDSRLTIVHRDLKTSNILLDADMNPKISDFGIARIFGGNQQEANTTRVVGTYGYMSPEYAMDGAFSVMSDTYSLGVILLEIVSGLKITSTHSTSFPSLLAYAWSLWNGGRAMDLVDSSLLESCSASEAMRCIHIGLLCVQDNPNSRPLMSTVVFMLENETTLLSIPKQPLCFSQWYLEAQATGENTNSSMNSTSVSVLEGR

SEQ ID NO: 227434 - protein, 628 aa, Zea Mays
MSQLSKLRVYISPFIHGTRYSSFGRHFTKVEKLVEIVDRLHWYVETGDMIVDFCCGANDFSRLMKEKLDKVQKKCHFKNYDLIQPQIMGLNPPFGVKASLANKFIDKALTFKPKLIVLIVPKETKRLDQRRTPYDLIWEDSECLSGKSFYLPGSVDLNDKIVEGWNASAPPLYLWSHPGWTKKHMQVAEEHGHTCMGKIACHVEESNLSDDLSVRKQSDATNKLNSRSGKETPFNDRMSNLLDDGSARKQARSEEEKRTLGKIEHHVKKANIPDNLPVKKEPEASSKVMSHSGKDRKIGRYNRRRHDNRSSKGTPDHTESLPPEKQVEVAYEETRVIPSKKIAHNEKKSAQYNYEQTAAGMPNMRSRGGDSDMSISPPVSCNARSKPMSYSLTRPIEHLDTNAHLLAEEPSDSVLNRVPNHDSYLAIKEEYCDGFKRKNDPIFSHIDDSSRMRGSSIEEVTKPYITAPNSDPWSKGDGSFYRHPSSEDLNANADVLMPGYSARYGQIGGDSNPQASMVPLATDSRLHGGTVADNYLSARYSLGSSGARVSQPAPTVPPFGLSGASSQRGSVMDRYSYGLSGPTGTQRSVIDRYAPSLDGTNTTRSRSSLPEQYPFGQPGSSGGGWPHH

SEQ ID NO: 227435 - protein, 181 aa, Zea Mays
MTLRVILSRLRLTPLIHDGHHLRRSLSAAAAKLPDELPPGAPAPTSDSRLFVAGLSWSVDERSLTDAFSSFGTVTEDGAQCRSSAKCRGGREPLHRPQACSLFDEIPVRDVVTCSAAIYRHARSGLFHESAELFVGMMRAVRIMYDKNSGRSRGFGFVHFSNDNEAKCAKDAMDGKGGHCE

SEQ ID NO: 227436 - protein, 591 aa, Zea Mays
MRHLALLALLLAPVLGSTGTTLSPSPAATDSPANQGQASSPPQSAFALGPVAVPTAPTTPSASPSPEKAAAVSPAAPTEPRIAPAPVAPPKEYSAPPPVEVAPTDPTDEVPPPVAPPQAAVGNPTPILPGTPALLPYVQAPAPSVVLKPNPPVVVSPPPANNQPSRPVGSVPPYPPPASPPPANGIPPYPPSGRFPAIPPATSVPPPATSPVIAQAPQRRADPPSRDYKNGNAVPPANTYPPTNLKKHHVPHASPPKGSTGQTVPGHKSPVTGSAPATSPLPQNTNMPSIPKNASSVPHAHPSPPSIAPELAPTGRSHAQGWKSSNPNNKTNRLHAPSYPPPRAQGPEVSRTPRQTGTKNYTHHAPPPFPQGHPSFPVHSPSPSPASSRGPANAKKRNHISPTLPSIPPLPEPKAPSAHPIWTLPPPPPNSDCNSLSCPEPLTDPPAGAPCACVLPIRVGIRLSVDLYSFFPLVSDFAEEVASGVNMAQRQVRVMGANVAGDQPDKTMVLVDLVPVQVKFDNATAFSAFESLWSKKVSLKPSVFGNYEILYVVYPGLPPSPPSGQGVGDGAFGNNRNARAVKPLGVDLFDS

SEQ ID NO: 227437 - protein, 139 aa, Zea Mays
MSDPLLPNSNTQATQLWLPLLAAQFFAPCSSSSSFRTSAPASASTATEMEAQDDCKWRQVPAFGDWNLWDDMPVTQYFQAGTFFFAAPTTEKDDDEDLFKVPQFPATPYSYKKVKQNTTLHLISFTNHPRKKVFFFHQL

SEQ ID NO: 227438 - protein, 279 aa, Zea Mays
MLTRVNTYTSVMYKDDPTIFAWELMNEPRCTSDPAGNKLQEWIQEMAFHVKSIDPDHLLEVGGLAQRASTGPRRRHGFRPTRTPMLARSAPTSSATTASWASTSPPSTSTQTPGCRARLWRHGSGSWTRGWRRTSPTPTARWACRWCSRSSGRPPPRPGAAASTRPRETSSSRRCTRGSSTPRGVAAPERGLCSGRCSRWGPTTWTMATASCFPGRRPLPGSSRRTPGTWPFSTRGAPGAAAGGAGGGGTSRRILMLMMTCRSSRINNEKHRINTTNER

SEQ ID NO: 227439 - protein, 99 aa, Zea Mays
MGLRELKQMEGKLEKAINKIRARKEMDLQTDNMYLRSKIAENNNETGQPAMNMIGVPSTSEYDHMASFVDSRNFLQVNMQQQQPQHYSHQLQPTTLQLG

SEQ ID NO: 227440 - protein, 144 aa, Zea Mays
MVWKGKKLHLRMDSNIYDKKKWASLLYCSVKSTIERYKKANSDTSNSGTVAEVNAQHYQQESSKLRQAIDSLQNANRTIVGDSIHTMGLRELKQMEGKLEKAINKIRARKNELLYAEVEYMQRREMDLQTDNMYLRSKDFSHGC

SEQ ID NO: 227441 - protein, 796 aa, Zea Mays
MLLDKANLAGYQIGKTKVFLRAGQMAELDALRTEVLGLSAKKIQSKLRSFLARKKYIELQQCATQIQAICRGTTARRRYENLRRDVASLKMQTCYRMHYARKNYVEICSASTNIQSGLRGMGARIKLRLKRQTKAAVIIQSRCRCYLVRSRYVRLVKATITAQCGWRRRVARKELRNLKMAAKETGALQAAKSKLEKEVEELTWRLQLEKRIRADLEEAKSQENKKLQLQLQELQLQLKDTKDLLKREHEAAKEASEKAAAVPEILADTAQVNELTAENEKLKSLVASFEEKLQNAEQKFEETEKAREELVKKATDAESKINELKNTMQSLQEKLTSTEAENHVLRQQSMKARPDNMPLLNMHRKSNLANGSLHSDEQTPHGTPMEFGRRSIIERHNESVDALINCVVENVGFSEGKPVAAITIYKCLLHWRIFETDKTNVFDRLIQIFGSAMQKQDNNADLAYWLSNSSSLLIILQKSLKPPGSSVTTPMKRPQTQTSFLGRMGFRASSITVDMDLVRQVEAKYPALLFKQQLTAFVEGLYGMIRDNVKKEISSVISLVIQVTPSIESHPQAPRNAKAGLITDQGSYWQTIVKHLNDLLEILQENCVPTVFARKIFTQIFSFINAQLLNSLLVRRECCSFSNGEYVKQGLDELETWCTVAKPEYAGSAWDELKHICQAVGFLVIFKKFRISYDEIISDLCPVLSVQQIYKICTQYWDDKYNTESVSEEVLDEMKKVVNEGSGQGTSSDNTFLLNEEISLPLSLEEIANSMDAKEFQNVSPPQELLDNAAFQFLRS

SEQ ID NO: 227442 - protein, 1393 aa, Zea Mays
MASKSRFVVGSHVWVEDPDEAWMDGLVEQINGDELVVNCTSGKKVTANVSSAYPKDTESPRGGVEDMTRLAYLHEPGVLQNLKSRFMLNEIYTYTGNILIAVNPFQRLPHLYNNDMMGIYKGAEFGELSPHPFAIADRSYRLMINDHISQAILVSGESGAGKTESTKSLMQYLAFMGGKPQAEGRSVQQQILESNPVLEAFGNAKTVRNNNSSRFGKFVEIQFDANGKISGAAIRTYLLERSRVCQISDPERNYHCFYMLCSAPPEDCKKYKLGDPRSFHYLNQSNCIALDGLDDSKEYTETRRAMGIVGMSTDEQDAIFRVVAAILHLGNIEFAEGSEDDSSVPKDEKSQFHLKTAAELFMCDEKGLEESLCKRVMATRGESITKNLDPRAAALSRDALSRIVYSRLFDWIVNKINSSIGQDPDSKILIGVLDIYGFESFLTNSFEQFCINLTNEKLQQHFNQHVFKMEQEEYTKEEIDWSYIQFVDNQEILDLIEKKPGGIIALLDETCMLRNSTHETFAEKLYQKFKDNPHFSKPKFSRSGFTVHHYAGNVTYQTDLFLDKNIDYAVNEHQVLLNASKCSFVSSLFPPCEESTKSTKFTSIGSSFKQQLQSLLETLSATEPHYIRCIKPNNVLKPAIFENSNVLQQLRCGGVLEAIRISCLGYPTRRTFYEFVNRFGILQPKVLGRSHDEVTAAKMLLDKANLAGYQIGKTKVFLRAGQMAELDALRTEVLGLSAKKIQSKLRSFLARKKYIELQQCATQIQAICRGTTARRRYENLRRDVASLKMQTCYRMHYARKNYVEICSASTNIQSGLRGMGARIKLRLKRQTKAAVIIQSRCRCYLVRSRYVRLVKATITAQCGWRRRVARKELRNLKMAAKETGALQAAKSKLEKEVEELTWRLQLEKRIRADLEEAKSQENKKLQLQLQELQLQLKDTKDLLKREHEAAKEASEKAAAVPEILADTAQVNELTAENEKLKSLVASFEEKLQNAEQKFEETEKAREELVKKATDAESKINELKNTMQSLQEKLTSTEAENHVLRQQSMKARPDNMPLLNMHRKSNLANGSLHSDEQTPHGTPMEFGRRSIIERHNESVDALINCVVENVGFSEGKPVAAITIYKCLLHWRIFETDKTNVFDRLIQIFGSAMQKQDNNADLAYWLSNSSSLLIILQKSLKPPGSSVTTPMKRPQTQTSFLGRMGFRASSITVDMDLVRQVEAKYPALLFKQQLTAFVEGLYGMIRDNVKKEISSVISLVIQVTPSIESHPQAPRNAKAGLITDQGSYWQTIVKHLNDLLEILQENCVPTVFARKIFTQIFSFINAQLLNSLLVRRECCSFSNGEYVKQGLDELETWCTVAKPEVNKWKNDYITDVTFILHPFKYYTLKFQTWSK

SEQ ID NO: 227443 - protein, 194 aa, Zea Mays
MVAMTQITKKMLASKDKAEELYPVKPSNCRRFLVLSIGTGSTSEQGLYTARQCSRWGICRWLRNNGMAPIIDIFMAASSDLVDIHVAAMFQSLHSDGDYLRIQDNSLRGAAATVDAATPENMRTLVGIGERMLAQRVSRVNVETGRYEPVTGEGSNADALGGLARQLSEERRTRLARRVSAINPRGSRCASYDI

SEQ ID NO: 227444 - protein, 552 aa, Zea Mays
MGQCCSKGQCCSKGAEAAAAAKANAPIRGASASNADGQRPSSSCAAPGGGGGGGGGATKPASPTGGARASKPAAAAVGTVLGRPMEDVRATYTMGKELGRGQFGVTHLCTHRASGEKLACKTIAKRKLAGKEDVEDVRREVQIMHHLSGQPGVVCLRGAYEDRHGVHLVMELCAGGELFDRIIARGHYTERGAAALLRAIVQTVHTCHSMGVMHRDIKPENFLLLSRDEDAPLKATDFGLSVFFKEGEPLRDIVGSAYYIAPEVLRRRYGPEADIWSVGVMLYIFLAGVPPFWAENENGIFTAILRGKLDLSGEPWPHISPGAKDLVKKMLNSNPKERLTAFQVLKLVDHPWIKEDGDAPDTPLDNVVLDRLKQFRAMNQFKKAALRIIAGCLSEEEITGLKEMFKNIDKDNSGTITLDELKQGLAKHGPKLSDSEMEQLMEAADADGNGLIDYDEFVTATVHMNKLDREEHLYTAFQYFDKDNSGYITKEELEHALKEQGLYDADKIKEVIADADSDNDGRIDYSEFVAMMRKGTAGAEPMNNKKRRDIVL

SEQ ID NO: 227445 - protein, 2235 aa, Zea Mays
MANTRSGGGGDAPPPPSSPPAAASATATRKLADGRETRNTAAASAHTPNLRRSTRENKGKHKSRLADTPPLHRSAKTPTKDATAIATPKSTPLPNNPKDSTKKPSRVRNTSVSPSPSKQEPNETSTPASTKRKTQDDALTASTPSKKQKRLLHAKSYIALFNIGEESVLATLREDEEKASEVQPEGDGAVLVHEESNAPEQPNQEASNVVASEVLGGHSSDLHEIEVILEGDGLKIGSHQSDVVLERCILTETRSLNKAVESIPMLETGEQATGGSNQKPLLELPNSACSTAHHEEASKSVEDGNSIGIQGACTSRNTEAIQCDETWSCGGKGCKRHYHLSCMDPSLDVSLGIWLCIMCMKKRIQFGVYSVSEGIESLWDVKEGVVNSKQYFVKYKNLAHVHNQWVSESDIVDSTPQGSDLISKVSKKIHKEKTIRWKQEWAEPHRLLKRRLLMPQKEAEVFFNSLGDKFVYCNVEWLVKWKDLGYEHATWELESSSFLCTPEAEELKRSYEDRFKTARKASDPSKVDKAKGGIFQQLERLPDGCPPGLDDDHLRSLNQLREFWHNSCGAIFIDDQERVIKTILFVASILPHICQPLLIVSTTTTLSLWETKFNRLAASINVVVYNGEKDVRKSIQDLEFYQDGSVMLQVLLSHPDAILEDIEVIERINWEAVIVDDCQNSRVSKWLEQLRRLPTNFRMVLLSSSLKESIAEHISLLSFLNPEENGTLSVSNGVSFDTAGTLVVLKEKLARYVAFERKTDSSKLLEYWVPARLSPVQLEMYCYILLSNSPALRSHSKTDSVGALRNILISLRKCCDHPYLVDQSLQSTLTKDHPVTDILDIGVRSCGKLLLLDRMLQQIRIQGLRVLILSQSGGESGKPMGDILDDFVRQRFGYESYERVERGLLLQKKQTAMNMFNDKTKGRFIFLIDSRACGPSIKLSSVDAIIIYCSDWNPMNDLRALQRVSMESQSEPVPIFRLYSSFTVEEKALILAKHDHILDSNIVNITPSLSHCLLSWGASFLFNRLEELQQHSYSNVSGDELFMDNVDLEFLTKLLSKVELRTESGNTAISQAYLCGSFYSRAIVVAGEREGIPSVDGDLPKFWAYWLSLLNGRSPQWQYISEPVQRSRRKINNMEQQLKNTDKQLKITTEETDEARVKRRRIGEIMDSSAIDSPGKNKDTILPGNNTPPSSHQISVEDTWQELERSNLHATQKGLHVQLKPEISKLYKLLQLPEKVKSLCEEFLEYILKNHQISQEPKGILHAFNLALCWRAASLSKHKINHTESLALAVKNLNYECKEELVDFVYGKLKILKKKFARRAGEVSKQNYMVSVSDISTCEQVTSVRLRNDELVPSQVTLTDGNFENGSHHEATGDFWTEEMVSGEKELLPDPVTHEGEHLLRDELLSKIMDKRIKLVDKVFSLRGRSIYDKHSNQVSFLDMHRQKVVDKLRRACSLVVEHLRSSQNHIAQEDRDGKIKLIIEWFTMLLYAFLEHMKCQRNRLDMQQSASRIKESQLKEETLQAARCGQLDQNFDQHIPSPDFEFAMEEFRHFREVVGSCYVDPAALVPESLDDNSAMEIMLVQSATDAEVIEEVLNRPTEVLVQGPASEVVGPSVDVICNCSDGINSQRDASLAVHSLEPSSDDLRSTDHVEENTVGSQIQGGTSKHLGDAAMEVETGNRNTALADSPHFDKPALTAPSRQATLLVSRETEMLSNLVDQCAQQSLVSAQPLQDESEQADLSSAASTQPLQSERQQLISVSNNLLERAQLDQSQPNYQTDAAPGCAQSTELFPVTSMMFNHAPIDSEPLKNELHKLRLHMDTLNKVHEMKKTQLQTACSQELEKVKRKYDLLIKEHDSTHLQQKKALGDFYEKVQRNQSLAEDFRAKFISLSAAQGAAKGHTPPVRHTPQATQVVSSTSSIALSSACRPPVPRPRVQAPQVDQPLLSLSQFSRPSLQVVQPPNLELGNLFRATSTTLSHMPPQRGSYGVQSELAPRSPAPHLQFRSPRAHSMAPGNQQQSPAISVDAMSSRTQPVLAASTSPSDIHVGPLAASALSSLHSVLPSTSLPSSLHPSHLAQRVPPTPNPTLQAGAPKGSNATMPSIPTGMQLPDSGSLSLDAWLTANLGLNDASTAPAKDTASLGLSSDAPRAAPDTNTASLGLSSDVPRGTAPATNTASLGLSSDVPRGTTPATTTTSLGLISDSPRVIAPASSNSPGAIASATNGGSEIDVVCLSDDE

SEQ ID NO: 227446 - protein, 595 aa, Zea Mays
MFAAKCFCFVLFLLQCWRAASLSKHKINHTESLALAVKNLNYECKEELVDFVYGKLKILKKKFARRAGEVSKQNYMVSVSDISTCEQVTSVRLRNDELVPSQVTLTDGNFENGSHHEATGDFWTEEMVSGEKELLPDPVTHEGEHLLRDELLSKIMDKRIKLVDKVFSLRGRSIYDKHSNQVSFLDMHRQKVVDKLRRACSLVVEHLRSSQNHIAQEDRDGKIKLIIEWFTMLLYAFLEHMKCQRNRLDMQQSASRIKESQLKEETLQAARCGQLDQNFDQHIPSPDFEFAMEEFRHFREVVGSCYVDPAALVPESLDDNSAMEIMLVQSATDAEVIEEVLNRPTEVLVQGPASEVVGPSVDVICNCSDGINSQRDASLAVHSLEPSSDDLRSTDHVEENTVGSQIQGGTSKHLGDAAMEVETGNRNTALADSPHFDKPALTAPSRQATLLVSRETEMLSNLVDQCAQQSLVSAQPLQDESEQADLSSAASTQPLQSERQQLISVSNNLLERAQLDQSQPNYQTDAAPGCAQSTELFPVTSMMFNHAPIDSEPLKNELHKLRLHMDTLNKVHEMKVSYFWSLFLPLYMLFQYHNV

SEQ ID NO: 227447 - protein, 383 aa, Zea Mays
MHKILFNTDSSATTSNRIQDVQAVLICAQRLGARNARAGQLLTKELEEFRASTSADSMTKHQSRYVLQVIKYVTNHPDNRWVGVGDATGDYPFSHHKLTVQFSEASAAQDRKLEGLVHKAIRELWRPNPSQLILLQTRGIGALHKELPKACALTGSSDPCYIEAYHLADPTDGRITLHLKILNLTELELNRVDIRVGLSGALYYMDGFSRTVRHLRNLVSQDPVQSSVTVGVSHFERCSLWVQVLYYPFYGSSGSTDYEGDYAEEDSQMMRQKRSHRPELGEPVVLRCQPYKFPLAELLLPLECSPVEYFRLWPSLPAMVECTGTYTYEGSGFKATAAQQYDSSPFLSGLKSISSKPFHQVCSHFIRTVAGFQQRHGLVDLWA

SEQ ID NO: 227448 - protein, 71 aa, Zea Mays
MGTSSTLSYDSDLASSVSKSNVVIVEGYLFELPHTIEAIKQACEDAHQNGALVAVTASDVSCIEHCYNDFR

SEQ ID NO: 227449 - protein, 380 aa, Zea Mays
MILESKGVPRLNTPPPVSSKLLTESQEKKIAAPKPIRVSAENITNLDDLMQPWTRSPPKKLEQEHVLAKWQFISDSSSRSNIQLAPLPDSYDLDRGLLLSVQAIQALLENRGYPIIVGIGGPSGSGKTSLAQKMANIIGCEVVSLESYYKPEQVRDYKYDDYSSLDIALLTENIMDIKKRHKAEVPCFDFENFSRKGFKELQVSEESGVVIFEGVYTLHPAIRKFLDLWIAVVGGVHSHLIARIQRDKNRAGFSISQTEIMTTVFPLFQQYIEPHLVHAHLKIQNDFDPVLSPESSLFVLKSKKQVSCQDILKVLDASKVCSSVQNFTDVYLRLPGIPSNAQLTEGECIRVRICEGRFALLIREVCTLILFSLCFFHSLT

SEQ ID NO: 227450 - protein, 241 aa, Zea Mays
MEAAAAVLPTLVPSGSAVVVLLAYLGYLAAAGAILPGKLVDGALLPDSSRLHYRCNGLLSLLLLLGLSAFGVYMGWMSPTVVADMGLELLSVTFIFSVIVSFALYIAGIKSGHKSSSLRPHVSGSFMQDWWFGVQLNPHFMEVDLKFFFVRAGMMAWLFINLSLFAKSYFAGSANLSVILYQFFCAWYIIDYFVHEEFMTSTWDIIAERLGFMLVFGDLVFIPFTFTIQVSYIPANVDPWC

SEQ ID NO: 227451 - protein, 202 aa, Zea Mays
MEAAAAVLPTLVPSGSAVVVLLAYLGYLAAAGAILPGKLVDGALLPDSSRLHYRCNGLLSLLLLLGLSAFGVYMGWMSPTVVADMGLELLSVTFIFSVIVSFALYIAGIKSGHKSSSLRPHVSGSFMQDWWFGVQLNPHFMEVDLKFFFVRAGMMAWLFINLSLFAKSYFAGSANLSVILYQFFCAWYIIDYFVHEEFMTST

SEQ ID NO: 227452 - protein, 127 aa, Zea Mays
MEAAAAVLPTLVPSGSAVVVLLAYLGYLAAAGAILPGKLVDGALLPDSSRLHYRCNGLLSLLLLLGLSAFGVYMGWMSPTVVADMGLELLSVTFIFSVIVSFALYIAGIKSGHKSSSLRPHVVWSAT

SEQ ID NO: 227453 - protein, 59 aa, Zea Mays
MVELSSMSRKERRKPRQNPRRVFLPSTPVLPTPVRLACKMQTLVRSSLPASSWAGAGSC

SEQ ID NO: 227454 - protein, 533 aa, Zea Mays
MYVSAHLPFLVTLSSPAFPSSPPFRTSSTPANNFTSHDLAGALEDMQVAAAAASMRGTETVGAKSAARRLSRVLVGRRRRAAVLLLALAYAAAMLMLTIGGSEGSGSSGVVAGVLRRGAQSAPPGSVYRSHLVFERLLPEMRAFASRPNPLVTSQYKKFGKQWEPCISKGLIHSELPPSNGFLIVEANGGLNQQRISICDAIAVAKILNATLVTPAFHLNSVWRDSSKFGDIFDEDHFIESLRKYVRVVKDLPEDVFLRFNHNISIIPNMRTKAFSPPSYYLQHVLPKLLELGAVRIAPFSNRLAHSVPMNIQALRCLTNYKALRFSEPIRILADNMVDRMIKRSFLSGGKYVSVHLRFEEVGMMLRGMGFDNTTSLYVASGKIYNAEKYMTPLRRLFPFLQTKHALVTPEELAQFKGHSSRLAALDYTICLHSEVFVMTQGSNFPHFLMGHRRYMYGGHAKTIKPDKRKLVQLFDNPNIRWDRFKHHMQDMRRHSEMKGFALRKPQESIYTLPMPDCMCQQAEARSRDTARS

SEQ ID NO: 227455 - protein, 84 aa, Zea Mays
MPPVNSFVLMPLLDLFVLIHPFVVFLVRGCGDPESEFESLRRDWEVLCSDKLGLSLELGSFAAGVMISTTDLAQHTLEQVCSFC

SEQ ID NO: 227456 - protein, 609 aa, Zea Mays
MTFFLAPYTPNLPQESYDGCLGLFDESQALNYSKFNASGDSRFVAVEFDIRKDIWDPSSQHIGIDINSMDSRGDYTVLPDGSLVDAGVMSATVVYDNRTRSLRVTLMVGSVTYTSVATVDLRSLLPEKVAVGFSAATGDEYNANHTVLSFSFASTLATKNSTSMPVTVTSSTKKATLQLGAGAAAAALLVFLLVATVALLLVRRSSRRGKKPYDDEQLTTDGDDSLDAVDDSHFESSTGPKPIPYAQLAAATKDFAAEGKLGQGGSGSVYRGHLKESGLDVAIKVFSRGASMEGRKEYRAEVTVISRLRHRNLVQLIGWCHGRRRLQLVYELVSNGSLDDHLYSTEVTLTWPTRYQIILGLSSAVLYLHQEWDQCVVHGDIKPSNIMLDESFNAKLGDFGLARLIDHGMSLQTMTAVAGTPGYLDPECVITGKASPESDVYSFGIVLLEVACGRRPMAPPASTGEGKDGQVFRLVEWAWDMRGRGAALDAADERLGGAFDPWEMERVVSVGLWCAHPDPKMRPRIRQAAEALRSRSFRMPLLPPKMPVAVYLQPFGPSTLHFSDTTTSVGSSVTVPYTSTTSRATTATGTGMSNSSSPPAVTQHLSPRA

SEQ ID NO: 227457 - protein, 263 aa, Zea Mays
MRGRAQYIYQIILGLSSAVLYLHQEWDQCVVHGDIKPSNIMLDESFNAKLGDFGLARLIDHGMSLQTMTAVAGTPGYLDPECVITGKASPESDVYSFGIVLLEVACGRRPMAPPASTGEGKDGQVFRLVEWAWDMRGRGAALDAADERLGGAFDPWEMERVVSVGLWCAHPDPKMRPRIRQAAEALRSRSFRMPLLPPKMPVAVYLQPFGPSTLHFSDTTTSVGSSVTVPYTSTTSRATTATGTGMSNSSSPPAVTQHLSPRA

SEQ ID NO: 227458 - protein, 99 aa, Zea Mays
MQDGKSCELESYDLMSANDAPERDPMDWVLEGSADGGSTWNILDARNSEMFESRFLRKTFTVDKRYKANAFRFRFLRVRDSHSNPRFQIGSIDLYGKTI

SEQ ID NO: 227459 - protein, 208 aa, Zea Mays
MSAPEFRTSYQQSPENVGQLKVCQCGSGDSNFQITNKSDGGENSPTTCPNCQVLKSGNLLLSSKGIGWTVWKKRWFILTRTSLVFFRSDPNVPPPRGSEPIVTLGGIDLNNTASMIVKEERKLITVVFPDGRDGRTFTLKAETTEDLNEWRSALENALAQAPSVVNTAGQLPVVSTDITEPVEAAVEQLHSSRDAIFSNSGTMLHCPG

SEQ ID NO: 227460 - protein, 426 aa, Zea Mays
MSAPEFRTSYQQSPENVGQLKVCQCGSGDSNFQITNKSDGGENSPTTCPNCQVLKSGNLLLSSKGIGWTVWKKRWFILTRTSLVFFRSDPNVPPPRGSEPIVTLGGIDLNNTASMIVKEERKLITVVFPDGRDGRTFTLKAETTEDLNEWRSALENALAQAPSVVNTAGQLPVVSTDITEPVEAAVEQSENKSVIGRPAEFALVDADGTTAFLQKALKFIEDYGKNEFSPEEDAHVIGDCIKCILREMPSSPIPAPCCTALVRAYRTDKTKRLDAMNRVIYEVFPEPNRQLLQRILKMMQIVGSHKAVNRMSSSALAACMAPLLLRPLLLGECEIDSEFSMAGDGSFQLLQAAAAANHAQAIVIIMLEEYDQIFDVPAFPWTILKTVRTLQMLIPSLTLTRNILQTMTSLKIMMAPLVLVKMLKKI

SEQ ID NO: 227461 - protein, 239 aa, Zea Mays
MSVNSRSANVGRATPIFRSQINPTVAKIHQQLVQTVRSLRVEIYCFHLKVLFLAGIGWTVWKKRWFILTRTSLVFFRSDPNVPPPRGSEPIVTLGGIDLNNTASMIVKEERKLITVVFPDGRDGRTFTLKAETTEDLNEWRSALENALAQAPSVVNTAGQLPVVSTDITEPVEAAVEQSENKSVIGRPAEFALVDADGTTAFLQKALKFIEDYGVKVEGILRQSADVEEVKRRVQDYEK

SEQ ID NO: 227462 - protein, 107 aa, Zea Mays
MEESGFAITSINGRINRAVWGPLIRTIVTAREDATIRIWDSEEDEERERVCQKQGHQREGDHGGVVDAELDFGKKLPSFFFIQKRMAFSDDGKMKVDYELGYNVHLH

SEQ ID NO: 227463 - protein, 94 aa, Zea Mays
MPFRSGNSSSTSVMWRGQAQVAARTGPHCYPSCLTRTFSFSCTYTEDVGGRRGEGRRWSVSITSYSLTTGVCPTCLPISLAHVVIVHHVEIAQA

SEQ ID NO: 227464 - protein, 397 aa, Zea Mays
MPARGEGRPAKERVDQVVGVGTRGDNTWILAWVPSDDGHQGELEKEAINNGTSPGQAHDIDIPPPRPKRKANSPYPRKSGLSSETPTKELPSDKSTKPNMPLSNENVLMAGDASLQKFQRKELSGKESCSEVLNLFRDAPSPSFSSVNKSSSNHGAPIEASKTKIRDMTIMENSSLNPNMQEDVKEINDQEMERLNGTQISSKCEHSHEGYLDISMQQMKLKPESVETTYVDKQTARASHSLAERTGTTSIPVTATEETHSVLTSDQVGINGSMNPSIHPMFPADPKFDSSATPQPFPHNYAAFAPMMQCNCNQDTHRSLVNMSSTFSSMLVSTLLSNPAIHAAARLAASYWPAAEGNTPIDPNQENLADGVQGRSIGSPPSMASIVAATVAAASAC

SEQ ID NO: 227465 - protein, 659 aa, Zea Mays
MPARGEGRPAKERVDQVVGVGTRGDNTWILAWVPSDDGHQGELEKEAINNGTSPGQAHDIDIPPPRPKRKANSPYPRKSGLSSETPTKELPSDKSTKPNMPLSNENVLMAGDASLQKFQRKELSGKESCSEVLNLFRDAPSPSFSSVNKSSSNHGAPIEASKTKIRDMTIMENSSLNPNMQEDVKEINDQEMERLNGTQISSKCEHSHEGYLDISMQQMKLKPESVETTYVDKQTARASHSLAERTGTTSIPVTATEETHSVLTSDQVGINGSMNPSIHPMFPADPKFDSSATPQPFPHNYAAFAPMMQCNCNQDTHRSLVNMSSTFSSMLVSTLLSNPAIHAAARLAASYWPAAEGNTPIDPNQENLADGVQGRSIGSPPSMASIVAATVAAASAWWATQGLLPFFAPPMAFSFVPAPSAAFPTVDVPRPSEKDRDCPAENAQKECQEARKQGQFEGFRVAASSEYDGSGKGEVSVHTELKISPVQNADATSAAGADTTDAFMNKKKQDRSSCGSNTPSSSDVDVDNVPEKEGNGNEKAKQASCSNSSAGDTNHRRFRSSGSTSDSWKEVSEEGRLAFHALFSREKLPQSFSPPQAEGSKEVGKEEEDEVTTVAVDLNKSTTSIDHDLDTIGFKPYKRCSVEAKENRVPASDEGHAFT

SEQ ID NO: 227466 - protein, 709 aa, Zea Mays
MEVNSSGEETVIKVRKPYTITKQRERWTEAEHKRFLEALKLYGRAWQRIEEHVGTKTAVQIRSHAQKFFTKLEKEAINNGTSPGQAHDIDIPPPRPKRKANSPYPRKSGLSSETPTKELPSDKSTKPNMPLSNENVLMAGDASLQKFQRKELSGKESCSEVLNLFRDAPSPSFSSVNKSSSNHGAPIEASKTKIRDMTIMENSSLNPNMQEDVKEINDQEMERLNGTQISSKCEHSHEGYLDISMQQMKLKPESVETTYVDKQTARASHSLAERTGTTSIPVTATEETHSVLTSDQVGINGSMNPSIHPMFPADPKFDSSATPQPFPHNYAAFAPMMQCNCNQDTHRSLVNMSSTFSSMLVSTLLSNPAIHAAARLAASYWPAAEGNTPIDPNQENLADGVQGRSIGSPPSMASIVAATVAAASAWWATQGLLPFFAPPMAFSFVPAPSAAFPTVDVPRPSEKDRDCPAENAQKECQEARKQGQFEGFRVAASSEYDGSGKGEVSVHTELKISPVQNADATSAAGADTTDAFMNKKKQDRSSCGSNTPSSSDVDVDNVPEKEGNGNEKAKQASCSNSSAGDTNHRRFRSSGSTSDSWKEVSEEGRLAFHALFSREKLPQSFSPPQAEGSKEVGKEEEDEVTTVAVDLNKSTTSIDHDLDTIGEPRASFPNELSPLKLKLRRTGFKPYKRCSVEAKENRVPASDEGHAFT

SEQ ID NO: 227467 - protein, 709 aa, Zea Mays; identical to SEQ ID NO: 227466

SEQ ID NO: 227468 - protein, 141 aa, Zea Mays
MGKNQAYKAMQWARLGSSSDALGTADALEDGMDGMKQGIINPSDIDVTFEDFPYYVSENTKNVLLSCAFIHLEKKEFIKQFAEISSINQRILLFGPAGSEIYQETLVKALAKHFGARLLVVDSLLLPWGTKLWLSRQSDAC

SEQ ID NO: 227469 - protein, 2610 aa, Zea Mays
MNSAALAAYQLQQQQAHHFASHAYHQAPTGNTMHRSTKPAAAAKPAPPPGNQQAVLDRAQEAARKAREELVKGGDGVTAWKVAQAVLVALKADSWDSLGVQPQDVPLLRDLFLIEGKVNAFIHCYVAARKIVTVYDLEVEICKNEGVVQFEELGLGPFLQHPLVAHYFLVPADLSVVPKLCSEEIINTLLKFVDKSKKKITIEDFLNHLAEKKSVSGKEKLGVRVQSLGLHISLLRQAKQTEVSAAKLRANMSGSGNSSQEKDLLKNASFHTHKKALDKRFISLTNRIKELPGINKHIHFDSTDDETNSCTGSEDGKSDGNENENECSILDKKDGDKRVNSCPYPSKTEELERLGLKSEINKRQSLENSKPRDSGKKGKVLEMLANYYGRTISGKRRIRNFFSQYPGIGLLNVAVKSMGCGLLDSIYDVIQLADENDVASSPPPNTTTEVMEIEPPSVAIDDVIRRISEYIESNSKISGDVALQVRALNDCETWVTTQFSANQFSALGHGTFLEFLDKHCHQFRTALSSFFKEGPSNSSSLEVSVLQQQIEFLLCQAESNWLEDSDFSEDSFVMLLKKQFPTISFNIVQDKSDGGVSGFIEGQKKDIRTYSLKFSISLLEKRWSGTLPSRHGNVDELGNIVAEQSCYHTTVCSREAINCLLRAPMLSDLHLWSHWDSLFAPTLGSFVHWLLNTGPIQELACIATTDGRFIRVDSSATVDQFLEAIIHRSPLQVAVKLLSLLYIYNGSMNTPMSLLKCYAQRAIKLIVDNNNDLMNAKSENKIFMPDEPQNLSSESSTCFADQCQESSQASPGRLIRSDSLPNINNTVHLITKFVLDCLDHLPSEFRSLAADILLAGFRVVTKNWHAVMLHEATENGQLCMLHDIGLSLGVVEWVEDCHRLCLTDEVHVQTEMHSSAKLATPASVGATHEDSNMHISSDVNMMDKRKQLFPVINDRAGIDKEDNKMLNPAGTEADVAELHTTSRSSMMEETSLEEASLVIETIRREEFGLDQALSDTENSLLKKQHARLGRALHCLSQELYSQDSHLLLELVQNADDNTYPEDVEATLAFILQEDGIAVLNNERGFSAENIRALCDIGNSTKKGSNQGYIGNKGIGFKSVFRVTDAPEIHSNGFHVKFDITDGQIGFVLPTAVPPYSTTSFSRMLSVEDDKDAHSLWNTCILLPFRSKFRECTGMCSIVSLFSDLHPSLLLFLHRLKCIKFKNLFDDTLLIMRREILGDGIVRISHGIETMSWLVVSKRLQGTIVRHDVCTTEIAVAFTLQQTEEGDYEPYLKQQPVFAFLPLRNYGLKFILQGDFVLPSSREEVDADSAWNQWLLSEFPSLFVSAQESFCALPCFQRCPGKAVTAFLSFIPLAGEVHGFFSQLPHLILSKLRLTRCMFLDGSTVQWVYPCNTLRGWDEQTKMLFSEGLLHEHLGLGYLSKNIVISDKLSRALGIHDYGPNILLDAISSICRIDGCIESLGLEWLCAWFVNLYLTLLSHSSQNVSSARNLEDILLDKVRKIPCIPLSDGSFTSISDGRIWLPYDVASSIPECSSIPNFPALYGNLRTVSPNLLSACCKNKYLMEEVRINDLADMLQRIGVRKLSGHDIVKNHIMVSLRNGLDANVADIVIREYVSFIMVHLQSSCTSCNFERGEIVSELRKSPIFLTNHGYKSPADEPIHFSKDYGNSVDVTRLLQNVEISWIELDSSYLQHHGSQSSSFAREKWRQFFEEMGVTDFVQVVKVEKTLSQVDSILAGGLSLADVSTKQCTVYDWESPELSRILSIFSSKRCKENCVYLLEVLDRFWDDHYSAKSRIFTDATHCGENRAVESSFMKCIQSFKWIASRMDEDLHYATDLFYDCENVRSLFGSVAPYAVPQVSSSSLKKAIGFKTEVSYCDALMVLKSWITSKVPFRASMSQMCKFYTFLSEGVADAKIDIKREFMSSPSIFTPLQRPRASEVIPGRFLAPEDLYWHDPTGCSEITEDFVATKNRSMFPRKMLSAAYPNLYELFTLTCGVPKAPTTSNYVEMLLRLSTIALPSQAGNHVFCVFVRWAKCMHSESDKMNDILYLKESLQKLETTILPTSADKWVSLHPSFGLVCWVDDDELKQQFVNSNDVYFIQFGDLSSEDKQMLYGRVAALMKSLGIQALSKVVYREAIFYGTSENREKVSLICWLLPYMQRYIYKMHRDTYINFQKNDIMKISNLQVVVVDKLFHKYVLRGLESSSKKRFQCHCLLQGDTLYATQEADSHSVFLELSRIFFDGSHDLHFANFLHMIKTMAESGTHAEQIETFIVNNQNVPELPEHEAIWSFSSLSAAKHGSANQGGADTQGVDFQPVHEFSIPNHQKAQVMVSSWPLNYWRTAPVFRTPLINQHASMQEAKVNDAGPSSNLNMPAMYGHTEDSLLSADLERDWIIEENPRTETTLFGDSSSEILDEPQMVMSAEPFHAPAYLNLEAGNSSPTVHVELTNSDEKLANLAEDKNQRLSDANQLRTGRLGEELVEKYLAKQLGSNNVRWVNNRIETGLPYDIVITHPEGFTEYVEVKTTVSSRKDWFDVSAREWQFALEKGDSFSIARVILGTKKASIEMLKNPHKLCKQKALRLALLISRSAAT

SEQ ID NO: 227470 - protein, 1809 aa, Zea Mays
MCQESSQASPGRLIRSDSLPNINNTVHLITKFVLDCLDHLPSEFRSLAADILLAGFRVVTKNWHAVMLHEATENGQLCMLHDIGLSLGVVEWVEDCHRLCLTDEVHVQTEMHSSAKLATPASVGATHEDSNMHISSDVNMMDKRKQLFPVINDRAGIDKEDNKMLNPAGTEADVAELHTTSRSSMMEETSLEEASLVIETIRREEFGLDQALSDTENSLLKKQHARLGRALHCLSQELYSQDSHLLLELVQNADDNTYPEDVEATLAFILQEDGIAVLNNERGFSAENIRALCDIGNSTKKGSNQGYIGNKGIGFKSVFRVTDAPEIHSNGFHVKFDITDGQIGFVLPTAVPPYSTTSFSRMLSVEDDKDAHSLWNTCILLPFRSKFRECTGMCSIVSLFSDLHPSLLLFLHRLKCIKFKNLFDDTLLIMRREILGDGIVRISHGIETMSWLVVSKRLQGTIVRHDVCTTEIAVAFTLQQTEEGDYEPYLKQQPVFAFLPLRNYGLKFILQGDFVLPSSREEVDADSAWNQWLLSEFPSLFVSAQESFCALPCFQRCPGKAVTAFLSFIPLAGEVHGFFSQLPHLILSKLRLTRCMFLDGSTVQWVYPCNTLRGWDEQTKMLFSEGLLHEHLGLGYLSKNIVISDKLSRALGIHDYGPNILLDAISSICRIDGCIESLGLEWLCAWFVNLYLTLLSHSSQNVSSARNLEDILLDKVRKIPCIPLSDGSFTSISDGRIWLPYDVASSIPECSSIPNFPALYGNLRTVSPNLLSACCKNKYLMEEVRINDLADMLQRIGVRKLSGHDIVKNHIMVSLRNGLDANVADIVIREYVSFIMVHLQSSCTSCNFERGEIVSELRKSPIFLTNHGYKSPADEPIHFSKDYGNSVDVTRLLQNVEISWIELDSSYLQHHGSQSSSFAREKWRQFFEEMGVTDFVQVVKVEKTLSQVDSILAGGLSLADVSTKQCTVYDWESPELSRILSIFSSKRCKENCVYLLEVLDRFWDDHYSAKSRIFTDATHCGENRAVESSFMKCIQSFKWIASRMDEDLHYATDLFYDCENVRSLFGSVAPYAVPQVSSSSLKKAIGFKTEVSYCDALMVLKSWITSKVPFRASMSQMCKFYTFLSEGVADAKIDIKREFMSSPSIFTPLQRPRASEVIPGRFLAPEDLYWHDPTGCSEITEDFVATKNRSMFPRKMLSAAYPNLYELFTLTCGVPKAPTTSNYVEMLLRLSTIALPSQAGNHVFCVFVRWAKCMHSESDKMNDILYLKESLQKLETTILPTSADKWVSLHPSFGLVCWVDDDELKQQFVNSNDVYFIQFGDLSSEDKQMLYGRVAALMKSLGIQALSKVVYREAIFYGTSENREKVSLICWLLPYMQRYIYKMHRDTYINFQKNDIMKISNLQVVVVDKLFHKYVLRGLESSSKKRFQCHCLLQGDTLYATQEADSHSVFLELSRIFFDGSHDLHFANFLHMIKTMAESGTHAEQIETFIVNNQNVPELPEHEAIWSFSSLSAAKHGSANQGGADTQGVDFQPVHEFSIPNHQKAQVMVSSWPLNYWRTAPVFRTPLINQHASMQEAKVNDAGPSSNLNMPAMYGHTEDSLLSADLERDWIIEENPRTETTLFGDSSSEILDEPQMVMSAEPFHAPAYLNLEAGNSSPTVHVELTNSDEKLANLAEDKNQRLSDANQLRTGRLGEELVEKYLAKQLGSNNVRWVNNRIETGLPYDIVITHPEGFTEYVEVKTTVSSRKDWFDVSAREWQFALEKGDSFSIARVILGTKKASIEMLKNPHKLCKQKALRLALLISRSAAT

SEQ ID NO: 227471 - protein, 2744 aa, Zea Mays
MSRQDRHQWPRPNHGYDPRAAAAAAQWYGAASMLFPDPGAAALHGINPYGFAPNPFFNNFLPQNSAALAAYQLQQQQAHHFASHAYHQAPTGNTMHRSTKPAAAAKPAPPPGNQQAVLDRAQEAARKAREELVKGGDGVTAWKVAQAVLVALKADSWDSLGVQPQDVPLLRDLFLIEGKVNAFIHCYVAARKIVTVYDLEVEICKNEGVVQFEELGLGPFLQHPLVAHYFLVPADLSVVPKLCSEEIINTLLKFVDKSKKKITIEDFLNHLAEKKSVSGKEKLGVRVQSLGLHISLLRQAKQTEVSAAKLRANMSGSGNSSQEKDLLKNASFHTHKKALDKRFISLTNRIKELPGINKHIHFDSTDDETNSCTGSEDGKSDGNENENECSILDKKDGDKRVNSCPYPSKTEELERLGLKSEINKRQSLENSKPRDSGKKGKVSEKRKYEEIGSPSCSFKQPKKQQKLQKHEASPKCFLSIGKLENFVTTWKETCREHPVQQVLEMLANYYGRTISGKRRIRNFFSQYPGIGLLNVAVKSMGCGLLDSIYDVIQLADENDVASSPPPNTTTEVMEIEPPSKENTGSTNGAHEKSEDNMTAHGVAIDDVIRRISEYIESNSKISGDVALQVRALNDCETWVTTQFSANQFSALGHGTFLEFLDKHCHQFRTALSSFFKEGPSNSSSLEVSVLQQQIEFLLCQAESNWLEDSDFSEDSFVMLLKKQFPTISFNIVQDKSDGGVSGFIEGQKKDIRTYSLKFSISLLEKRWSGTLPSRHGNVDELGNIVAEQSCYHTTVCSREAINCLLRAPMLSDLHLWSHWDSLFAPTLGSFVHWLLNTGPIQELACIATTDGRFIRVDSSATVDQFLEAIIHRSPLQVAVKLLSLLYIYNGSMNTPMSLLKCYAQRAIKLIVDNNNDLMNAKSENKIFMPDEPQNLSSESSTCFADQCQESSQASPGRLIRSDSLPNINNTVHLITKFVLDCLDHLPSEFRSLAADILLAGFRVVTKNWHAVMLHEATENGQLCMLHDIGLSLGVVEWVEDCHRLCLTDEVHVQTEMHSSAKLATPASVGATHEDSNMHISSDVNMMDKRKQLFPVINDRAGIDKEDNKMLNPAGTEADVAELHTTSRSSMMEETSLEEASLVIETIRREEFGLDQALSDTENSLLKKQHARLGRALHCLSQELYSQDSHLLLELVQNADDNTYPEDVEATLAFILQEDGIAVLNNERGFSAENIRALCDIGNSTKKGSNQGYIGNKGIGFKSVFRVTDAPEIHSNGFHVKFDITDGQIGFVLPTAVPPYSTTSFSRMLSVEDDKDAHSLWNTCILLPFRSKFRECTDLHPSLLLFLHRLKCIKFKNLFDDTLLIMRREILGDGIVRISHGIETMSWLVVSKRLQGTIVRHDVCTTEIAVAFTLQQTEEGDYEPYLKQQPVFAFLPLRNYGLKFILQGDFVLPSSREEVDADSAWNQWLLSEFPSLFVSAQESFCALPCFQRCPGKAVTAFLSFIPLAGEVHGFFSQLPHLILSKLRLTRCMFLDGSTVQWVYPCNTLRGWDEQTKMLFSEGLLHEHLGLGYLSKNIVISDKLSRALGIHDYGPNILLDAISSICRIDGCIESLGLEWLCAWFVNLYLTLLSHSSQNVSSARNLEDILLDKVRKIPCIPLSDGSFTSISDGRIWLPYDVASSIPECSSIPNFPALYGNLRTVSPNLLSACCKNKYLMEEVRINDLADMLQRIGVRKLSGHDIVKNHIMVSLRNGLDANVADIVIREYVSFIMVHLQSSCTSCNFERGEIVSELRKSPIFLTNHGYKSPADEPIHFSKDYGNSVDVTRLLQNVEISWIELDSSYLQHHGSQSSSFAREKWRQFFEEMGVTDFVQVVKVEKTLSQVDSILAGGLSLADVSTKQCTVYDWESPELSRILSIFSSKRCKENCVYLLEVLDRFWDDHYSAKSRIFTDATHCGENRAVESSFMKCIQSFKWIASRMDEDLHYATDLFYDCENVRSLFGSVAPYAVPQVSSSSLKKAIGFKTEVSYCDALMVLKSWITSKVPFRASMSQMCKFYTFLSEGVADAKIDIKREFMSSPSIFTPLQRPRASEVIPGRFLAPEDLYWHDPTGCSEITEDFVATKNRSMFPRKMLSAAYPNLYELFTLTCGVPKAPTTSNYVEMLLRLSTIALPSQAGNHVFCVFVRWAKCMHSESDKMNDILYLKESLQKLETTILPTSADKWVSLHPSFGLVCWVDDDELKQQFVNSNDVYFIQFGDLSSEDKQMLYGRVAALMKSLGIQALSKVVYREAIFYGTSENREKVSLICWLLPYMQRYIYKMHRDTYINFQKNDIMKISNLQVVVVDKLFHKYVLRGLESSSKKRFQCHCLLQGDTLYATQEADSHSVFLELSRIFFDGSHDLHFANFLHMIKTMAESGTHAEQIETFIVNNQNVPELPEHEAIWSFSSLSAAKHGSANQGGADTQGVDFQPVHEFSIPNHQKAQVMVSSWPLNYWRTAPVFRTPLINQHASMQEAKVNDAGPSSNLNMPAMYGHTEDSLLSADLERDWIIEENPRTETTLFGDSSSEILDEPQMVMSAEPFHAPAYLNLEAGNSSPTVHVELTNSDEKLANLAEDKNQRLSDANQLRTGRLGEELVEKYLAKQLGSNNVRWVNNRIETGLPYDIVITHPEGFTEYVEVKTTVSSRKDWFDVSAREWQFALEKGDSFSIARVILGTKKASIEMLKNPHKLCKQKALRLALLISRSAAT

SEQ ID NO: 227472 - protein, 302 aa, Zea Mays
MAQGRDPEELFEELWRACAGPLVELPQTNERVFYFLQGHLEQLQEPTDPALLAEQIKMFQVPNKILCKVVNVELKAETETDEMYAQITLQPEPDQVDLPQLPEPPLQETSRPVVHSFCKILTPSDTSTHGGFSVLRRHANECLPALDMSMPTPTQELITKDLHGSEWRFKHIYRGQPRRHLLTTGWSTFVTSKKLIAGDAFVYLRSETGQQRVGVRRLVQKQSTMPASVISSQSMHLGVLASASHAIRTHSIFLVYYRPRLSQSQYIVRLNKYLESSKIGFDVGMRFKMSFEGDDVPIKNCR

SEQ ID NO: 227473 - protein, 596 aa, Zea Mays
MAQGAGRDPEELFEELWRACAGPLVELPQTNERVFYFLQGHLEQLQEPTDPALLAEQIKMFQVPNKILCKAETETDEMYAQITLQPEPDQVDLPQLPEPPLQETSRPVVHSFCKILTPSDTSTHGGFSVLRRHANECLPALDMSMPTPTQELITKDLHGSEWRFKHIYRGQPRRHLLTTGWSTFVTSKKLIAGDAFVYLRSETGQQRVGVRRLVQKQSTMPASVISSQSMHLGVLASASHAIRTHSIFLVYYRPRLSQSQYIVRLNKYLESSKIGFDVGMRFKMSFEGDDVPIKKFSGTVVDKGDLSPQWQGSEWKTLKVKWDEATNLNGPERVSSWEIEPFDASAPAITMPVQPSMKNKRPRETAEGLDIHALEPAQEFWLSGRPEQHEKTSVSSSEPKHQVAWTSERAGYSAMSSSICQNSAVTGSWFKGFNSSGSHPSLPEISQKLFQVTSNDARVPPWPGLSAYHADEPSSKLSCNTALCSYQTEEVAPRFSNAVEEEKKEPGMFRLFGVNLINHARSSATADKTSVGAGETSARAAGSFEDSAQLSRVTKDHTHMVNGSPREIQSHQSCSGRSRIKSCGFGKSGWVRAADG

SEQ ID NO: 227474 - protein, 657 aa, Zea Mays
MAQGRDPEELFEELWRACAGPLVELPQTNERVFYFLQGHLEQLQEPTDPALLAEQIKMFQVPNKILCKVVNVELKAETETDEMYAQITLQPEPDQVDLPQLPEPPLQETSRPVVHSFCKILTPSDTSTHGGFSVLRRHANECLPALDMSMPTPTQELITKDLHGSEWRFKHIYRGQPRRHLLTTGWSTFVTSKKLIAGDAFVYLRSETGQQRVGVRRLVQKQSTMPASVISSQSMHLGVLASASHAIRTHSIFLVYYRPRLSQSQYIVRLNKYLESSKIGFDVGMRFKMSFEGDDVPIKKFSGTVVDKGDLSPQWQGSEWKTLKVKWDEATNLNGPERVSSWEIEPFDASAPAITMPVQPSMKNKRPRETAEGLDIHALEPAQEFWLSGRPEQHEKTSVSSSEPKHQVAWTSERAGYSAMSSSICQNSAVTGSWFKGFNSSGSHPSLPEISQKLFQVTSNDARVPPWPGLSAYHADEPSSKLSCNTALCSYQTEEVAPRFSNAVEEEKKEPGETSARAAGSFEDSAQLSRVTKDHTHMVNGSPREIQSHQSCSGRSRIKVQMHGNDVCRAVDLGNLDGYEQLMGEVGEMFEIKDLGSKEKEEWKVTFINDENETMEVGAVPWQEFCQMVRKIVIHSIGDRGHMEACPCLGQDGKRDY

SEQ ID NO: 227475 - protein, 190 aa, Zea Mays
MERMQLQLQGSIASSLWADKQQQAASTNAAAAAAQMPFLALLQGAGVVVEAEQQEEQHHDGRKRQAFARAVSDLDLLESCVTQAVAPAAAASAPVAGRTERRRKRQRPRARAAPPPEKRKKPEEAESQRMTHIAVERNRRRLMNDHLASLRSLIPSSYTPRMEEGCEVATADEVATVVHQIFAYAAGACC

SEQ ID NO: 227476 - protein, 635 aa, Zea Mays
MDLDPAYPPSACADAWPFDSLTTSLLFSPQLTPIPANSSFSWLTPHSPLWLFEDRHLLPLDAPAVFEEVQRPRSGNSHTSSKPAEQISHRWQFHLSLDEDGTDNSSLFKEKLTHALRYFKESTDQHLLVQVWAPVKNGDRYVLTTSGQPFVLDHQSIGLLQYRAVSMTYMFSVDAENVGDLGLPGRVYKQKVPEWTPNVQYYSSGEYQRLNHAISYNVHGTVALPVFDPSAHSCIAVVELIMTSKKINYACEVDKVCKALEAVNLKSTEIHDHPNVQICNEGRQAALVEILEILTVVCEEHKLPLAQTWVPCKYRSVLAHGGGLKKSCLSFDGSCMGEVCMSTSDVAFHVIDAHMWGFRDACVEHHLQRGQGVPGKAFISHKPCFSKDIRKFCKLAYPLVHYARMFGLAGCFAICLQSSYTGNDDYILEFFLPPDCSDEDDQNALLESVLTLMKRCLRSLKVVGDRDLSGVSLHLSNVLKLENEEFKTDAQFDNSDGSLCQSPNGDRHGGSHEFDGGNKKVLDVPEGQLLTDDFSQGNGTSAGRPNGSGASDSSVLHKTNKPPERKRGKAEKTISLEVLQQYFSGSLKNAAKSLGVCPTTMKRICRQHGISRWPSRKINKVLSLFLLALHWILSM

SEQ ID NO: 227477 - protein, 407 aa, Zea Mays
MRKMLETWAYLGVSISKRCPSGHRMCSTIAVINYACEVDKVCKALEAVNLKSTEIHDHPNVQICNEGRQAALVEILEILTVVCEEHKLPLAQTWVPCKYRSVLAHGGGLKKSCLSFDGSCMGEVCMSTSDVAFHVIDAHMWGFRDACVEHHLQRGQGVPGKAFISHKPCFSKDIRKFCKLAYPLVHYARMFGLAGCFAICLQSSYTGNDDYILEFFLPPDCSDEDDQNALLESVLTLMKRCLRSLKVVGDRDLSGVSLHLSNVLKLENEEFKTDAQFDNSDGSLCQSPNGDRHGGSHEFDGGNKKVLDVPEGQLLTDDFSQGNGTSAGRPNGSGASDSSVLHKTNKPPERKRGKAEKTISLEVLQQYFSGSLKNAAKSLGVCPTTMKRICRQHGISRWPSRKINKRN

SEQ ID NO: 227478 - protein, 456 aa, Zea Mays
MYPPIPPLSSQQKDVTGLIPETKTEDNGVSSIGDSKPTSPNSKNMVTNASLLNDKVEMETENVQAIPEGNQAPKNELSNSNNGSPAMEISPNSVPDNSRLTVSDQMATAFVSVESPDAISKVAASRIVCSLPYISNEILKEAQTLEKAGNNPSMVSVVDVHAYGMDNNGAAPYSAVKSASLNENEVDPIHAYAAKAVTEHPDQNENLVPVNADEMADEGLNEILPDDKDDKKDCQLEVSSGPVILNDSSTPVYPEFSNFFYAKDGTEVSNNAVDSKNNAEQHASSNQGKGNMEECKDSDGNNASESSVAQKLVSVIVLPASDTGDVSNFVENDVEKSSRDQEKVAKKEYEDSVVAKKDHEDAILRRARYIEANIKRAGEWSLCNISLEKKQKSHWDFVLEEMVWMANDFTQERLWKNTVAAQMSHWISSRGRAAFEEASIQRKQKSVARVLANATE

SEQ ID NO: 227479 - protein, 983 aa, Zea Mays
MLLGLSNGHVQVVSWNAEFSDSFKLGCYVCSSEKPTAAVDALVFDPPSLRESSNARPAPCCTGNSSIVHVELSVKLRLLVALYSGCRIALCTIGKKGLRQPGSTRVERWLDTDDAMCTSVASEQQILAVGCSRGVVELYDLAENTRHIRTISLYDWGYSVEDTGPVACISWTPDNCALAVGWKFRGLTVWSVSGCRLMCTIRQTGSNSASSPMVKPSALKFEPLMGGTSHIQWDDNGYKLFAVEESLSERVLAFSFAKCCPNRGLSGTTYSHQVLYGEDRILLVQPDDADELKILHLNVPISYISQNWPVLHVVASNDGMYLAVAGSHGLVLYDLRNKRWRFFGDVTQEQKIQCKGLLWMRKIVIVCNYVESSNTYELLFFPRYHLDYSSLLYRKQLLGRPIVMDVFQDYILVTYSPFDVHIYHVVVSGELSPASNPVLKLSTLRELSIMSPKSPPVSMRFIPEQNDKGALTEDTHGFSDLLSQQPSRCLILRTNGELSVLDMDDGHEHTLTNSIELFWVTCSQFEEKGSLIKEVSWLDYGHRGMQVWYPSHGADRFKQEDFLQLDPELEFDREVYPLGLLPNVGVVVGVSQRMSFSTAEFPCFEPSPQAQTILHCLLRHLLQRDKIEEALLLANLSAEKPHFSHCLEWLLFTVFDADISRPSASKNQASQKVDSPKKSLLEKTCDLLRNFPEYMDVVVSVARKTDGRHWADLFSAAGRSTEMFEECFQQRWYRTAACYILVIAKLEGPAVSQYCALRLLQATLDESLYELAGELVRFLLRSGRDFENATSDSEKLSPRFLGYFLFRSPYKRQSSDLKSNSTKELSPHIASVMNILERHASYLMSGKELSKLVAFVKGTQFDLVEYLQRERQGSARLENFASALELIGQKLQMDTLQSRLDAEFLLAHMCSVKFKEWIVVLATLLRRTEVLVDLFQHDLRLWKAYSITLQSHDVFREYLDLLNILEEQLSSVSDLTLQNGPLS

SEQ ID NO: 227480 - protein, 706 aa, Zea Mays
MAHSPAPSGGGGGGPLPLLVSLNCLDDLSLEQEGLAGVAAVEHVPLSAVACGRIEAASAVLLPSLAFLPRAAQRRLRPWQLLLCLGSADRAADAAAAADLGLRLVHVDANRAEEVADTVMALILGLLRRTHLLSCHASSVPAAGWLGSVQPMCRGMRRCRGLVLGIIGRSAAARCLATRSLAFRMSVLYFDPRYVGLLYRLSNFSTTITTKGVFGNTVFQNHGISNTTVYKCHDMISVFNTTVLEYHGFEYMEVFGNKASGKTKRPSIVFPSAARRMDTLNDLLAASDLISLHCGLTNETMHILNADCLQHIKPGAFIVNTGSCQLIDDCALKQLLIDGTIAGCALDGAEGPQWMEAWVREMPNVLILPRSADYSEEVWMEIREKAITMLQSFFFDGVLPSSAISDEDEEISEAKNEDDYLGPQAKDSQSQIFDTEIDESHITLESEKKRAISHHKEPQASGKSVNIGSRSEGRRSRSGKKGKKRPAHRRPQQKPDDLSAVESDSNYSSRRDDDTAMSSRDQVVSSSSRFASPEDPKYKHKSLSESPMEITSEKKVPVLLSRKYPDKLKDGFIVALRARDNSGYHVARQRVVGGGGWILDVVSNATNRDPAAQFLVTFKNKDTMGLRSFVAGGKLLQINRKMEFVFASHSFDVWESWMLDGSLLEGSKLINCRNPSAVLDICIEILAAPSEEDGVTRWLDSPRWGL

SEQ ID NO: 227481 - protein, 75 aa, Zea Mays
MRTLQMGEYESSVSIGNDTFSIREPLGVCTGICPFNFPAMIPLWRGRRRVDFRFSPTAISIEDVRDAEEERVVAS

SEQ ID NO: 227482 - protein, 115 aa, Zea Mays
MGGEMKPGRGLRTWAQRHLNVTFAVGFLLVLLTYLVVSRQLAVAAPGGAASRVVAGKQVVVRDAGDNAEGASKRRQEWQPKQAAAEEEETSGAVPTEEEESYPKRDEADGKPSVH

SEQ ID NO: 227483 - protein, 1392 aa, Zea Mays
MTRLSYLHEPGVLNNLAVRYAKNIIYTYTGNILIAINPFQSLPHLSEPRTMEKYKGANFGELDPHVFAIADVSYRQMMNEGKSNSILVSGESGAGKTETTKMLMRYLAFLGGRSKTGGRTVEQQVLESNPVLEAFGNAKTVRNNNSSRFGKFVEIQFDKSGKISGAAIRTYLLERSRVCQINSPERNYHCFYFLCAAPLEDIKSYKLGDPSSFHYLNQSTCIKLDEISDAKEYLATRSAMNTVGITEQEQEAIFRVVAAVLHLGNISFVKGREADSSVIKDEKARFHLNATAELLMCDCGNLENALIKRKINTPEGVITTTVDPNSATVSRDGLAKQIYSQLFDWLVNRLNASIGHDTSSDRLIGVLDIYGFESFKTNSFEQLCINFTNEKLQQHFNQNVFKMEQEEYNREQIDWSYIEFVDNQDVLDLIEKKPGGIIALLDEACMFPKCTHESFSQKLYEKFRNNKRFCKPKLSRTAFTIQHYAGEVTYQSDQFLDKNRDYVVVEHQELLNASKCSFVSGLFPSVLENTKASKSSIATRFKWQLQELMETLSSTEPHYIRCIKPNNHLKPATFENINVLQQLRCSGVLEAIRISCAGYPTRKIFHDFLCRFCILAPEVFTERNNEKLICQKILDNIGLHGYQIGRTKVFLRAGQMAELDARRTEVRNKAAITVQSRFRTHVAREQFLALRMTSISFQSFVRVILACKLHVFLRKQAAVLHIQKSYRCYFAWKTYSELCSSAITLQTGLRAFGAYNEYIIRKQNKASICVQACWRCHRDHLNYLKMKRSVLIYQCAWRRRIAREELRKLKMAARDTEALKVEKEKLEEHVEELTSRLSFEKNLRIDLEKSKAREICKLQATLREMEQRVEEAIEMHERELAKKAIEEALAQEREKITVLTNEVDELKVLLSREREENSATKSALVVVREENDVLNKKIVVADASMEQLRDTVTRLQESLIEGEATLLAERKESDAAKKSLTEAHVKNEELFNKIEVAEHNVSIFQDDIQRLEETAATLETSLLSEKQQSTAIISQLTEAQQDIQVLQKKFADANKTIELLQDSLKRCEDSTTTRDALYVAERQEHGQTKQALSKAQERNLELLRKVDDSEKTLNKMLENAQRLEKHATARESLLLKTKQNLDCTTKALTEARGRNRDLLTSFEDSAKKINMLEDSLNRLEECTAEKDSLLAVERKQNKTTKEELANAQKTIDELVHESQQSQEIRNQLEDTIKRFKAESTARDTILLSEKQAHETTKKVLTEIQSRNEELIKKIQDCDKNILELQLTVERLQENTSTTEALLLREREQNNATMKAQAETQEINLQLLNKLEDVETKIGLLQGSVQRLGDNTAKDTLLLSEKREKDALKEALTESEYKNEELLIKTEEANKKA

SEQ ID NO: 227484 - protein, 719 aa, Zea Mays
MKAQAETQEINLQLLNKLEDVETKIGLLQGSVQRLGDNTAKDTLLLSEKREKDALKEALTESEYKNEELLIKTEEANKKVEHLQNTINSLKENMAASLEAERQENEAIKRSLVEAQERNDALFKKVRDSEYRAHQLQDTVQKLQVDAISRLSSFVMERQDGDGVKNAHTEVHGTNEDLMRRNENLLKRNDDLVKKIEDSAILVTELRGNLERLEGKAANLEAENQLLRQQAIATPPSTAKSSQAACSKINAFQQRCQESGHILNGNVAYAEMKSSTGQTEMRPSMGSSLDLINHKVYENGQSLFNDVYQHQQPQNHQQLLLKYITQYLGFSGRKPIAASLIYYCLLHWRSFEEAKTTVFDSIIQIVNSATEAQHDTRSLAYWLSNLSTLSVLLQRSFKATRATASTPHRRRISCERIFQANQTSSSGLACLSAQSVDGGTVFHQIEARYPASLFKQQLVDQVEKVYGVISDKIKKELNPLLELCIQDPRTYSNQAKALMSPSSGLGQQDQLMHWLSIVKIFNSYLHVLRANHVPSILVHKLLTQIFSVVNVQLFNRLLLRRECCSFSNGQYIKDGLTQLRYWCNDVSQEFADSAWVALRHIRQAVDFVVISLKPIRTWEEICNDICPALSLQQLERIVGMYWDDLKGTNVTSAEFMSSMRAMLREESNSVSSFSVLLDDDSSIPFSLEDISKSMPNIEETSVNDLLPFIRENQSFAFLL

SEQ ID NO: 227485 - protein, 235 aa, Zea Mays
MAEILKIQQLYDGSSCIFSHGQQRFRLLRHWLDVDGVPWGEVQIIEEDTPQRTPRDAFAQLAAPNSFRQCASSIMPSLHVYCSTQLDHVDSDMDRDSLSPTSTSSDHSITDKRIYLLGSRSSGLVRCGIADESSNEGQNSVHEQSCQSHDSVKEIDGYGQPDKNTNTGDEDNLCFISSKSFQRTRKKDTKQQKHYFTTKNASQAPLSFWPHWAYEMYDSYSLSRRAAGKLYIFIL

SEQ ID NO: 227486 - protein, 389 aa, Zea Mays
MAERDRVLERERRQMEQILELDMEELQVEEVDDDGSSSSSDVDTFLRNTHGDGGINTYEELSIDTSTVSLQDHTYLGAKVDGARGKFAFLHGDRVLNLPMFYLQGVVLFPEASLHLRVFQPRLVEAIDKAINHVDAPCMIGVVYVYRHTNDGHYTIASVGTMAEILKIQQLYDGSSCIFSHGQQRFRLLRHWLDVDGVPWGEVQIIEEDTPQRTPRDAFAQLAAPNSFRQCASSIMPSLHVYCSTQLDHVDSDMDRDSLSPTSTSSDHSITDKRIYLLGSRSSGLVRCGIADESSNEGQNSVHEQSCQSHDSVKEIDGYGQPDKNTNTGDEDNLCFISSKSFQRTRKKDTKQQKHYFTTKNASQAPLSFWPHWAYEMYDSYSLSRRAAD

SEQ ID NO: 227487 - protein, 798 aa, Zea Mays
MWLTDPEYGLSPKNTIGIDVYNPPPLHWTSLLVLAYQSCGVVYGDLSTSPLYVYKGTFSGSLHRFLDEETVFGVFSVVFWTITLIPLLKYVFIVLSADDCGEGGTFALYSLLVRHAKFSLMPNQQAADEELSAYYRPGYSTEETPILKALRNFLEKHRKSRTFLLLMVLFGASLVIGDGVLTPAMSVLSSFSGLQVHSNALTHGEVVLLSCIVLVCLFTLQHWGTRRVAFLFAPVVVLWLLLLAALGIYNIAVWNPRILRALSPYYVVRFFQRTGKDGWISLGGVLLSMTGTEAMYADLGHFTAASIRYMGQAAFLSKSPDCNIHFIFFESIPRPIFWPVLVIATLAAIVGSQAVISATFSIVRQCTALGCFPRVKIVHTSNRIHGQIYSPEINWILMLICLGVTVGFRDTDLIGNAYGMACAGVMVVTTLLMALVMVFVWQQGFILAAMFLLAFGSVESVYLSAALMKVPQGGWLPLALSLVVVAIMYVWHYGTRRRHLFDVQNKVSLKWLHALGPSLGIVRVPGIGLIYSELATGVPAIFSHFVTNLPAFHQVLVFVCVKAVPIPHVRCYERHLIGRIGPREFRMYRCVIRHGYKDVPGDDNDFENDLVVRIAEFVHMEAAEAAAHADAPRCSDASVDGRMAVVNRPFDLSRTGLLMRAPLPNPEDSVVVRAATAVTTAGDSSKTETMQSLQTMYEAESPGFAIRRRIRFEIDDSTSESMDPAVKEELSALVEAKHAGVAYIMGHSYIKARKSSSIVKKLAIDVAYSFLRKNCRGPAVALNIPHISLIEVGMIYYV

SEQ ID NO: 227488 - protein, 84 aa, Zea Mays
MASRQHNAQFHKSKTLDNKYMLGDEIGKGAYGRVYKGLDLENGDFVAIKQVSLENIPQEDLNIIMVLFCHIVHEKKNLQFLHHD

SEQ ID NO: 227489 - protein, 408 aa, Zea Mays
MWAPPAASPTGAFPSLRPSRTAVVRVLVTLPAAARPQDQPRRRLCLAVPRPAPEMASAAAEGEGEEEDVVVVEGDTGKKTAVEMDATVRRELAIRRLREEAEEEANEAGTRRRSSRRDFAVFETARGDALFTQSWTPAADDRLKGVVILLHGLNEHSGRYSHFAKLLNDQGLKVYAMDWIGHGGSDGVHGYVSSLDHAVGDLFLPVQKEFLEDVVLEENHGLPCFLFGHSTGGAIVLKAALDPSVELHVEGVVLTSPAIHVQPSHPIIKVVAPIFSMLAPKYRVSALHKRGPPVSRDPEALKMKYSDPLVYTGPIRVRTGNEILRISSFLQRNLSRVTVPFLVLHGTADTITDPRASERLYQTSMSTNKSIKLYDGYLHDLLFEPERDDIANDIINWLSARLSVLQRW

SEQ ID NO: 227490 - protein, 230 aa, Zea Mays
MWAPPAASPTGAFPSLRPSRTAVVRVLVTLPAAARPQDQPRRRLCLAVPRPAPEMASAAAEGEGEEEDVVVVEGDTGKKTAVEMDATVRRELAIRRLREEAEEEANEAGTRRRSSRRDFAVFETARGDALFTQSWTPAADDRLKGVVILLHGLNEHSGRYSHFAKLLNDQGLKVYAMDWIGHGGSDGVHGYVSSLDHAVGDLNFWRMLYWRKTMVCRASYLGTPQVELLF

SEQ ID NO: 227491 - protein, 272 aa, Zea Mays
MWAPPAASPTGAFPSLRPSRTAVVRVLVTLPAAARPQDQPRRRLCLAVPRPAPEMASAAAEGEGEEEDVVVVEGDTGKKTAVEMDATVRRELAIRRLREEAEEEANEAGTRRRSSRRDFAVFETARGDALFTQSWTPAADDRLKGVVILLHGLNEHSGRYSHFAKLLNDQGLKVYAMDWIGHGGSDGVHGYVSSLDHAVGDLKEFLEDVVLEENHGLPCFLFGHSTGGAIVLKAALDPSVELHVEGVVLTSPAIHVQPSHPIIKLLHQYSPC

SEQ ID NO: 227492 - protein, 824 aa, Zea Mays
MTSGASIDGSKKMISIAYGRFFQHFLVLFSMHQMSMGLYRFLAAIGRTQVMANMLGTAALIAIYILGGFVISKDDLQPWLRWGYWTSPFTYAQNAIALNEFHDKRWATEFYYNNANTVGEAILMIRGLLTEWHWYWICVAILFGYSLVFNIFSIFALEFMNSPHKHQLNIKTTKANFVNHRQMAENGNSSNDQAILPFRPLSLVFDHIHYFVDMPKKRKRMSHQEIANNGATEKKLQLLQDVSGAFRPGVLTALMGITGAGKTTLLDVLAGRKTGGYIEGTIKIAGYPKKQETFSRISGYCEQSDIHSPNLTVHESLKFSAWLRLPSNVKPHQRDMFIEEVMSLVELTDLKNAMVGIPGATGLSAEQRKRLTIAVELVASPSIIFMDEPTTGLDARAAAIVMRTVRKTVDTGRTVVCTIHQPSIEIFESFDELLLMKRGGQLIYSGSLGPLSSNMIKYFEAIPGVPKINKGQNPAAWVLDISSHITEYEIGVDYAEIYRNSSLYRENRLLIDELEQPEPNTDDLHFPQGYWQNFTTQCAACLWKQNCAYWKNSEHNVVRFINTFAVSIMFGVVFWKIGSNIKVEQDVFNILGIVYGSALFLGFMNCSILQPVVAMERVVLYREKAAGMYSTMAYAIAQVAVELPYMLVQVLIFSSIVYPMIGFQLSAAKFFWFFLYLVMSFMYYTLYGMMTVALTPNIEIAMGLSFLIFIFWNVFSGFIIARELMPVWWRWVYWADPAAWTVYGLMFSQLADRTEQILVPGLGVQTVREFLEGYLGLQDRYFELVTCLHLAIIGLFAFLFFLAIKHLNFQRRNTSRFKGILQNV

SEQ ID NO: 227493 - protein, 631 aa, Zea Mays
MTFLISRALADPNVDVRGRMINAGILIIDRHGKENVPLLFPIFESYLNKRASDEETYDLVREGVVIFTGALAKHLSKDDPKVHSVIEKLLDVLNTPSEAVQRAVSDCLSPLMVSKQEEGQTLVSRLLDRMMKCEKYGERRGAAFGLAGVVKGFGISSLKKYGIAATLQKNLEDRMSAKSREGALLGFECLCEKLGKLFEPYVIQMLPFLLVSFSDQVLAVREAAECAARAMMSQLTGPGVKLVLPSLLKGLEDKAWRTKQSSVQLLGAMAYCAPQQLSQCLPKIVPKLTEVLTDTHPKVQASGQTALQEVGSVIKNPEISALVPILLSALMDPNAHTKHSLDILLQTTFINSIDAPSLALLVPIVHRGLRERGVETKKKAAQIVGNMSSLVTEPKDMIPYISLLLPEVKKVLVDPIPEVRAVAARALGSLISGMGEEIFPDLVPWLLDTLKSDNSNVERSGAAQGLSEVLAALGQDYFDHILPDIIRNCSHQKASVRDGHLTLFRYLPRSLGGVFQNYLQAVLPAILDGLADENESVRDAALSAGHYLCCFLLLRMGSSVIIGVSDKVPLNFLGISYLRSLELLGRQSLKVEVMMKVLVQRLRGVLLLKYLEGRNAMKFLPPFIWFVLMSA

SEQ ID NO: 227494 - protein, 569 aa, Zea Mays
MSAKSREGALLGFECLCEKLGKLFEPYVIQMLPFLLVSFSDQVLAVREAAECAARAMMSQLTGPGVKLVLPSLLKGLEDKAWRTKQSSVQLLGAMAYCAPQQLSQCLPKIVPKLTEVLTDTHPKVQASGQTALQEVGSVIKNPEISALVPILLSALMDPNAHTKHSLDILLQTTFINSIDAPSLALLVPIVHRGLRERGVETKKKAAQIVGNMSSLVTEPKDMIPYISLLLPEVKKVLVDPIPEVRAVAARALGSLISGMGEEIFPDLVPWLLDTLKSDNSNVERSGAAQGLSEVLAALGQDYFDHILPDIIRNCSHQKASVRDGHLTLFRYLPRSLGGVFQNYLQAVLPAILDGLADENESVRDAALSAGHVFVEHYATTDNWRIRQSSVELLGDLLFKVAGTSGKAILEGGSDDEGASTEAQGRAIIEVLGREKRNEVLAAIYMVRSDVSLTVRQAALHVWKTIVANTPRTLKEIMPVLMDTLISSLASSSSERRQVAGRSLGELVRKLGERVLPSIIPILSQGLKDPSASRRQGVCIGLSEVMGSAGKHQLLSFMDELIPTIRTAL

SEQ ID NO: 227495 - protein, 308 aa, Zea Mays
MTKLVYLHEPGVLCNLALRYRLNEIYTYTGRILIAVNPFAKLPHMYDMHMMEQYRGVQFGELSPHVFAIADASYRAMVSENCSQSILVSGESGAGKTETTKLIMRYLTFVGGRAIGDIRSVEQQVLESNPLLEAFGNARTVRNDNSSRFGKFVEIQFNKSGRISGAAVRTYLLERSRVVQISESERNYHCFYQLCASGKDADKYKLAHPQNFYYLNQSHMYELEGVNDAEEYLKTRRAMDIVGICFSDQEAIFRIVAAILHLGNIEFSPGKEFDSSVIKDEKCKFHLQMAADLLIQLLRGTFVAFDQA

SEQ ID NO: 227496 - protein, 875 aa, Zea Mays
METLSSTEPHYIRCIKPNSLNCPQKFENGSVLQQLQSGGVLEAIRISLAGYPTRRTYSEFIDRFGLLVQEYMGERFDERSLTQRILTELNLENFQLGRTKVFLRAGQIAVLDSRRGEILDNAVRIVQSHFRTFTVRKKFLSTRKASISIQIFCRGCLARNVLEAKRQIAAAVSVERYARRWLCRCAYLRLRSASLVIQSGIRYILAVQRLRHLKNAKASTVIQAWWRMQKLYYFHQQYRWATVLIQCCWRQKLAKRALRNLKHAAYETGALREAKGKLEKSLEDLTLRFTLERRQRLAAEESKALEISKLLKILESVKSELEASNEENKNSCKKISSLQHQLDLSSKDQEAQQNILSQIEEVKRENILLQAKNTEMEQELLKAQKCSHDNMDKLHDVEKNYVHLRDNLKNLEDKISNLEDENHLLRQKALNLSPRHSRTGESSPVKLAPPPHNQTESRRSRMNSDRYEDYHDVLHRCIKDDMGFKKGKPVAACIIYKCLLYWGVFEAERTTIFDFIIHTINTTLKAENENDILPYWLANTSALLCMLQRNLRSKGFIMAASRSSSDTHLSEKANETFRTPLRAFGQQTSMSHIDARYPAMLFKQQLTASLEKIFGLIRDNLKKEISPLLSLCIQAPKLARGGSGRRSRSPDVALQQPISTHWDRIVKFLDSLMDRLHKNFVPSFFTRKLVTQVFSFINVQLFNSMLLRRECCTFSNGEYVKSGLCVLEKWIVDTEEHAGAAWDELQFIRQAVDFLIIPQKSKKTIEQIKKNICPALSVRQIYRLCTMYWDDKYGTHSVSAEVVARMRDMVSNDMQNPVSNSFLLDDDLSIPFTTEEIAEQVPDVDMSNIETPASLRHVHSAQFLTQHLQPPYTSR

SEQ ID NO: 227497 - protein, 348 aa, Zea Mays
MAATAMIRITTLRCRHDPLSSLPRTTSAACSCTLPPRCRQCRLLPPHSSGCSPSSSIFPRRVRVRPTAALKRIGGGNTSFMGPANNGATTLQRSSSPDLRRSLIVLKSTAGTGGGNASSGLLPTILGVAHLLVSLGIVLATDKFLKQAFVAASIKFPSALFGMFCVFSVLVVFDTFVPALAKAFMDFFEPATLFIQRWLPLFYVPSLVVLPLAVRDVPAASGVKIFAITFGGWFATLAVAGYTALAVRKLVKTQLIPAEPMSKASPFSTVETWAWAAVFVASFGVACFNPRALGTTARTCLPFLLAATVLGYMVGSGLPSGVKKVLHPIITCALSADLAAVAYGYLSG

SEQ ID NO: 227498 - protein, 1399 aa, Zea Mays
MAASGAVQPHVALDVNVEEDANDDEAADRLWATIEQVASPQRRNLAIVALDPGSASQKKEEVMDVRRLDRRGAQRVLQRALATADDNAKLLRGIRDRLDAAGLDVPRVEVRFRNLTVSTEVHYGRRALPTLLNYVHDIAERLLICCHLLRPKKTKLTILDDVSGLLQPGRMTLLLGPPSSGKSTLLLALAGKLDPQLKKTGQVTYNGTSLTEFFVQRTSAYVSQTDNHIGELTVRETLDFAAKCQGASENWQECLKELRDLEGKRGIRPNPEIDAFMKTASVGGQKHNLVTDYVLRVLGLDLCADTAVGTDMDRGVSGGQKKRVTTGEMVVGPRKTLLMDEISTGLDSSTTYQIVKCMRNFVHEMEATVLMSLLQPAPETFDLFDDIILLSEGQIVYQGPTVQVVDYFNSLGFSLPPRKGIADFLQEVTSRKDQSQYWSDKSRPYSFISAATMASAFKQSEYGRALDSVLCNSYDGTNSPKVLARSKFAVSKLSLVKACFSRELVLISRNRFLYIFRTCQVAFVGIITCTIFLRTRLHPVDEQNGDLYLSCLFYGLVHMMFNGFTELPITISRLPVFYKQRDNFFHPAWAFSIPNWILRIPYSLIEALVWSCVVYYTVGFEPTADRFFRFMLLLFSLHQMALGLFRMMGAIARDMTIANTFGSAALLAIFLLGGFIVPKEAIKPWWQWAYWLSPLMYGQRAISVNEFSASRWSKVFGVGNSPVGSNVLILHNLPTQDYWYWIGVCALLAYAILFNALFTLALTFLNPLRKAQAIVPSNFEETNDALTDSISDGHAIAENNSRNCEVKGQTEGELNKGMILPFQPLTMTFHNINYFVDMPKEMKSREKRLQLLSEVSGVFRPRVLTALVGSSGAGKTTLLDVLAGRKTGGYIEGDIKISGHKKEQRTFARIAGYVEQNDIHSPQEFVEEVMALVELDQLRHALVGKEGSTGLSTEQRKRLTIAVELVANPSIIFLDEPTSGLDARAAAIVMRTIRNTVDTGRTVVCTIHQPSIDIFEAFDELLLLKRGGRVIYGGSLGVNSIDMIDYFQSIPGVNHISEGYNPATWMLEITTQACEEILGLDFAVVYKNSDQFREVEQLIKESSIPAIGTEPLKFSSEFSQNFLTQFKACWRKQRLVYWRSPEYNVVRLFFTAIAAIIFGSIFWNVGMKRDTTEDLMLVMGSLYAACLFLGVNNASSVQPVVSTERTVYYRERAAKMYSSFPYAAAQGLVEIPYIAVQTLIFGLITYFMINYERNIGKLLLYLLFMFLTFTYFTFYGMVAVGLTPTQQVAAVVSSAFYSLWNLLSGFLIPQSRIPGWWIWFYYICPVAWTLRGIITSQLGDVQARIVGPGFDGTVQEFLEESLGFQQGMAGVTVAVLIGFSLFFFAVYATSIKVLNFQRR

SEQ ID NO: 227499 - protein, 674 aa, Zea Mays
MRPEERDAAVGRVRDQFPVGMRVLAVDDDPVCLKVLENLLRRCQYHVTTTNQAVVALSMLRQNRDLFDLVISDVHMPDMDGFKLLELVGLEMDLPVIMLSVNGETKTVMKGITHGACDYLLKPVRLEELRNIWQHVVRRKFSNCDRANNDGYEECNRPSNADFDLAHSQITAGPPDQSGRPSKKRKEYHSEEEDEGEESNGQDNDDPSAPKKPRVVWSVELHRKFVAAVNQLGIDKAVPKRILELMNVERLTRENVASHLQKYRLYLKRLSAVASQQASIVAALGGNDPFMRMSAFEGLHGYQSFVSSAALPSFSPQGLLNRNNPASFAIQGVSASRPIQIATGNTTMSHSIGDPNDKYHLSLPGTSCLQGNLAQGLPTPVGQVQLPQKWIHEETDDLSTILSASGRANSGVPGTLQSVTNSHLLQQGFVERRQDKVVIQPSSSASSDRPEGTVGVSSSLMDSCATQQRVVPLSAFSSSASPMNGSFCSNGVAELGATSSGGTSIFPSNDLRIERDSKVGASSFGSVILLSPDTVPNQKYLNFGGGSDLRSNMEGGNAGNLLNPKLLWSCLPASQPPNLIGSHHPMSQRLNLGGSMVRQTTASASAAAPQTRIDMFISGDAPKSASDLSFPKVHSELSSSSCSFDGLLNSIIKVDDASFSDDLGCDLYSLGACI

SEQ ID NO: 227500 - protein, 386 aa, Zea Mays
MRMSAFEGLHGYQSFVSSAALPSFSPQGLLNRNNPASFAIQGVSASRPIQIATGNTTMSHSIGDPNDKYHLSLPGTSCLQGNLAQGLPTPVGQVQLPQKWIHEETDDLSTILSASGRANSGVPGTLQSVTNSHLLQQGFVERRQDKVVIQPSSSASSDRPEGTVGVSSSLMDSCATQQRVVPLSAFSSSASPMNGSFCSNGVAELGATSSGGTSIFPSNDLRIERDSKVGASSFGSVILLSPDTVPNQKYLNFGGGSDLRSNMEGGNAGNLLNPKLLWSCLPASQPPNLIGSHHPMSQRLNLGGSMVRQTTASASAAAPQTRIDMFISGDAPKSASDLSFPKVHSELSSSSCSFDGLLNSIIKVEKDDASFSDDLGCDLYSLGACI

SEQ ID NO: 227501 - protein, 413 aa, Zea Mays
MRNNSRLQQLGIPALVSMCGNINSISRNKKPNNRDNEDSESEYDPSHDDSIEGDLFDHDDHNKGSKDTNRRTIHMAPGGIKPRTKRVYAEQHTTRNTRSKKSIAQPDTSLTRSDIYVPPPSLSHLTQVGEVARSIENHRKTSVEANGPTQVDNTHMANRDGFDQFDDNMTNQGEGITQPGGKGVNQHRERGLNMGLGLQRMNRARRGKLPIVITEGRIRPVAPIVAAKFATECNIAVRNHVLVLKSWKEYEKHPGLFKLFTAKLSAKFDINTEDALVKNACFQMMRNALRQQRYKLKKQYFDPFPLHLVRKTSPIKSTSDEQWNDLVEHWKGPKNMATCEHNKGNRGKVKFHQTTGSRSYMVHVENLGDKYMDQEPDALDLFKECHYSKKKLKWKTSDLHQEKVNNQCLRLRL

SEQ ID NO: 227502 - protein, 526 aa, Zea Mays
MRNNSRLQQLGIPALVSMCGNINSISRNKKPNNRDNEDSESEYDPSHDDSIEGDLFDHDDHNKGSKDTNRRTIHMAPGGIKPRTKRVYAEQHTTRNTRSKKSIAQPDTSLTRSDIYVPPPSLSHLTQVGEVARSIENHRKTSVEANGPTQVDNTHMANREDGFDQFDDNMTNQGEGITQPGGKGDGVNQHRERGLNMGLGLQRMNRARRGKLPIVITEGRIRPVAPIVAAKFATECNIAVRNHVLVLKSWKEYEKHPGLFKLFTAKLSAKFDINTEDALVKNACFQMMRNALRQQRYKLKKQYFDPFPLHLVRKTSPIKSTSDEQWNDLVEHWKGPKNMATCEHNKGNRGKVKFHQTTGSRSYMVHVENLGDKYMDQEPDALDLFKECHYSKKKQGYTSTVQLAITQMEDKRSTPGEGEQPMSTTQVVADVLAENTKKNRFLQNVGIQNARPRSSVQNIEAQLEVERKANAELQSLVSIQRERMDVLLKQVHEAELVRIREQEEMKKKQDAMDAQLELMLSQIQPS

SEQ ID NO: 227503 - protein, 520 aa, Zea Mays
MRNNSRLQQLGIPALVSMCGNINSISRNKKPNNRDNEDSESEYDPSHDDSIEGDLFDHDDHNKDTNRRTIHMAPGGIKPRTKRVYAEQHTTRNTRSKKSIAQPDTSLTRSDIYVPPPSLSHLTQVGEVARSIENHRKTSVEANGPTQVDNTHMANRDGFDQFDDNMTNQGEGITQPGGKGVNQHRERGLNMGLGLQRMNRARRGKLPIVITEGRIRPVAPIVAAKFATECNIAVRNHVLVLKSWKEYEKHPGLFKLFTAKLSAKFDINTEDALVKNACFQMMRNALRQQRYKLKKQYFDPFPLHLVRKTSPIKSTSDEQWNDLVEHWKGPKNMATCEHNKGNRGKVKFHQTTGSRSYMVHVENLGDKYMDQEPDALDLFKECHYSKKKQGYTSTVQLAITQMEDKRSTPGEGEQPMSTTQVVADVLAENTKKNRFLQNVGIQNARPRSSVQNIEAQLEVERKANAELQSLVSIQRERMDVLLKQVHEAELVRIREQEEMKKKQDAMDAQLELMLSQIQPS

SEQ ID NO: 227504 - protein, 392 aa, Zea Mays
MCFPLQLWLIWMVMDIWTSLLGLLMACFMLLIIVVRNKFPLEMAEIHAPVIAADINDDGKIEMVTTDSHGNVAAWTAEGEEIWEVHLKSLIPQRPTVGDVNGDGHTDVVVPTVSGNIYVLSGKDGSKIQPFPYRTHGRIMSPVLLLDMSKHGDNAKGLTLATTSFDGYLYLIEGSSGCADVVDIGETSYTMVLADNVDGGDDLDLIVTTMNGNVFCFSTQSPHHPLKEWRSSNQGRNNAAYQYNREGIYVKHGSRTFRDEEGKNFWIEFEIVDKYRVPYGKQAPYNVTVTLLVPGNYQGDRRIVVSGVYHQPGKQRMMLPTVPVRTTGTVVVEMIDKNGLYFSDEFSLTFHMHYYKLLKWLLLLPMLGMFGVLVILRPQEGAPLPSFSRNID

SEQ ID NO: 227505 - protein, 128 aa, Zea Mays
MRMACNITCPSIEIGGYGDALLNLIYASPSSQFEELSLECELDATGNHSRVKDAQVHGSPIPESNGRLSTTAQTKMMSTVSEDAILVGSSFRYQSSLGNNNKRVGLFDMGDGSSEPAAEDNNQMHQTM

SEQ ID NO: 227506 - protein, 144 aa, Zea Mays
MRMACNITCPSIEIGGYGDALLNLIYASPSSQFEELSLECELDATGNHSRVKDAQVHGSPIPESNGRLSTTAQTKMMSTVSEDAILVGSSFRWKRKLTYFITMKPEDVYQSSLGNNNKRVGLFDMGDGSSEPAAEDNNQMHQTM

SEQ ID NO: 227507 - protein, 301 aa, Zea Mays
MDFPGGSGRRPQQQEPEHLPPMTPLPLARQGSVYSLTFDEFQSSLGGAAKDFGSMNMDELLRSIWSAEEVHSVAAASASAADHAHAAARGPVSIQHQGSLTLPRTLSQKTVDEVWRDLTCVGGGPSSGSAAPAAPPPPAQRHPTLGEITLEEFLVRAGVVREDMTAPPPVPPAPVCPAPAPRPPVLFPHGNVLAPLVPPLQFGNGFVSGAVGQQRGGPVPPAVSPRPVTASAFGKMEGDDLSSLSPSPVPYIFGGGLRGRKPPAMEKVVERRQRRMIKNRESAARSRQRKQYFAIMVLRIL

SEQ ID NO: 227508 - protein, 160 aa, Zea Mays
MQCALDPCRAQVVGWPPVRNYRKNTLAAATASRSKAPTEEAASGAGPMYVKVSMDGAPYLRKVDIKMYSSYEDLSLALEKMFSCFIAGQSGLHKSSSKDRLTNGSKVDALKDQEYVLTYEDKDADWMLVGDLPWELPSELEELTIRAVLLPTDKEERRWP

SEQ ID NO: 227509 - protein, 555 aa, Zea Mays
MGVSGAGKTTLMDVLAGRKTSGYIVGNITISGYPKKQETFARVSGYCEQNDIHSPNVTVYESLAFSAWLRLPADVDSSTRKMFIDEVMELVELLPLKDALVGLPGVSGLSTEQRKRLTIAVELVANPSIIFMDEPTSGLDARAAAIVMRAIRNTVDTGRTVVCTIHQPSIDIFESFDELFLMKRGGEEIYVGPLGMHSCELVKYFEGIEGVNKIKDGYNPSTWMLEVTSTMQEQITGINFSEVYKNSELHRRNKTLIKELSTPPEGSSDLSFPTEYSQAFLTQCLACLWKQSMSYWRNPPYTGVKYFYTTVIALLFGTMFWGVGRKRDSQQDLFNAIGSMYASVIFMGVQNSGSVQPVVSVERTVFYRERAAHMYSPLPYALGQVVIELPYIFVQSLIYGVLVYAMIGFEWTADKFFWYLFFMYFTLAYYTFYGMMVVGLTPNYNVSSVASTAFYAIWNLFSGFLIPRTRIPVWWRWFYWICPIAWTLNGLVTSQFGDVTETFSDGGVRISDFVEDYFGYHHDLLWVVAVVVVAFPVLFALLFGLSLKIFNFQKR

SEQ ID NO: 227510 - protein, 1112 aa, Zea Mays
MGGLVEVRCRCRDLVMRQVTPWPPEVSGSSSKQKQWQDQSNKDGVILVDESPQKKQRKGRKQDAILKEPNASRKRCKTSEAPDGPGSCQQLHISQIEASSPAAAPVIIDVDLMSTPSKAGHANSIDQDISPLKVDLRSEAKIAAEEIRRLSSGKKIHPFFHSRKLNKCASQDQDVINIENMHGLCDSERDPPFYPIHVVYQSEINVDTQNLLRPGASCQASLLDLNVEPEDPQNGCQPACYLWTDKYRPETVAQVCGNSEHVKFLAEWLKSWDEKGHKIGVANGDTNDNSYQDISDSDYSESASDCENTLLITGPVGCGKSAAVFACAREQGFNVIEVNTSDMRNGAYVRQKFEEATKSHGLEKWSQEEVINPLRDDSLDPDSGTPDRTEYQCLMSCATRVMIDCDQQKSPVGYYSGLKACDEPPKQVANKTLILFEDVDTVFDEDRGFISTILKMAETTKWPIILTSNKKDPSLPNLLDQLVLDFKYPSTSELLSHVAMICKSEGVNVTVPQLKHVIDVCLGDIRRVVMFLQFWYQGHQFTVHSTVPKMLPWEFPCKLSETLCMEVDKTILLAEEKKKQMEISDLEGLQLHVTAPLIKGRTSKTRRAKKSKLKRAHSTEHNDISPCKNELDDFHDLPDISLPSDKQIKRNRHRSLLLSESDDDPADVGTEKHNIFTVTEVGFFPQPSEVPPMHGQGISDQFHFPVESRETCEIADSFQNPPESNMYGSISQVCDTFMSQDVSCVPESSLILDGTSASISGDEFLSRAVSNGFSAFCEGTYTTSRMVLEDSDCVKNLMAERQKDVEDVVGETSETYMESFRRNEQASCSAAGFQLMDECSRAESIWLLSGKKSNDSCKVELVQDTWNRLRSCRLEFTSEANHNRATSGALKLVSEVSDLISESDLMLFRCYPLTKDTLDPSLTPCDEPVDSSWYSNQVEMGSVYAQHALRILSRNSQKIDGGSVDLSQELFASTAAVSFGKITCSGFRNDYGSTDLSHMKNPTTCIFKRRERHVHLCETLSPVVPPKLLQSLRGPAFVDYLSSISQISKLENLRLSENKVINKRRRSRQARHYLSSGALQLSHEDVVLLEESGCFSSRRERVEVVEQAPVST

SEQ ID NO: 227511 - protein, 51 aa, Zea Mays
MYHCRIIGKSILLGTKGAGKQCVGEYCEHEKKQCDLHDTVDMFLVRRRRLA

SEQ ID NO: 227512 - protein, 191 aa, Zea Mays
MILCEMQAELGANTMLAVSIAACKAGAAEKEVPLYKHIADLVGKSATTLPVPANTVINGGKHAGNGLPIQEIMILLVGAMNFEEAMQMGSETYHHLKDIILEKCGSDSCNIGDHGGFAPNISRQLLVHEYLMANQVGTVTEAIEVVKQANDAHWGVMVSHRSGDTEDSFIADLAVGAAAGQIKASVPCRGV

SEQ ID NO: 227513 - protein, 656 aa, Zea Mays
MLLRLRPPRHPSTAAATTLSSFLPSTSFRRLIPLPRWRPPPRRRLSAAAKDSIGRLDPRQERYDVIVVGGGHAGCEAALASARLGARTLLLTLNIDRIAWQPCNPAVGGPAKSQLVHEVDALGGEIGKITDRCYLQKRVLNSSKGPAVRALRAQTDKREYAIEMKNSVERTSMPAGRAGESASHGLTENLQFLGFETDRLKTGTPPRIDRRTVDFSGLEPQHGDEEVGWFSFDPEFHVEREQMCCYLTRTTKETHQIVIDNLDETPTYGGWVEAKGPRYCPSIEDKIVRFKDKESHQIFLEPEGRNVPELYLQGFSTGLPERLQLSLVRTIPGLENCLMLRPAYAVEYDYLPAYQCSRSLMTKKIEGLFFSGQINGTTGYEEAAAQGIISGINAARHSDGKSLIILERESSYIGTLIDDLVTKDLREPYRMLTSRSEHRLLLRSDNADSRLTPLGREIGLIDDRRWELYQSKQARIKQEKERLRSTKVPGGEFAAEVTAVSNQPVKDSSTLEAILKKPHVQYKLLDEHGCGNENLSRIEKECVEIDIKYEGFIARQQSQLHQIVNQEHRKLPEDLDYHSMTNLSLEAREKLSKVRPQTIGQASRIGGVSPADMTVLLIWMESNRRMATHRRQREQLGSVAVESDGSSEEAVQASTA

SEQ ID NO: 227514 - protein, 468 aa, Zea Mays
MSSSMESSYLPATTESLAQAQEAKDASESISILYRVIQDPSSSADALRTKEVAITNLTNYLTKENRAEELRNLLTQLRPFFAVIPKAKTAKIVRGIIDAVAKIPGTSDLQISLCKEMVEWTRAEKRTFLRQRVEARLAALLLENQEYTEALTLLTSLIKEVRRLDDKLLLVDIDLLESKLHFSLRNLPKAKASLTAARTAANAIYVPPAQQGTIDLQSGILHAEEKDYKTAYSYFFEAFEAFSALEDPKAIFSLKYMLLCKIMVNQADDVAGIISSKAGLKYLGPDVDAMKAIFSLKYMLLCKIMVNQADDVAGIISSKAGLKYLGPDVDAMKAVADAYSKRSLKYFETALRDYKSQLEEDPIVHRHLSSLYDTLLEQNLCRLIEPYSRVEIAHIAEMIELPIDHVEKKLSQMILDKKFAGTLDQGAGCLIIFEDSKTEEIFPATLETISNVGKVVDSLYVRSAKIMA

SEQ ID NO: 227515 - protein, 203 aa, Zea Mays
MRMDPKATLRAEDILNSWPELELGRILREYGEESNWQSVQKQIVKARSVGGLHSTGDLVKLIQRMCTISSGRQGWIKTSTRVFQALRIAVNDELRVLEDSLHSCFDCLATGGRLAVISFHSLEDRIVKKTFLELIHGGEANEEDDKDDQALTDIEDGDEPWSGQRVQGRNGTVLTKRPITPSQEEEKLNQRCRSAKLRVIQKT

SEQ ID NO: 227516 - protein, 217 aa, Zea Mays
MKSGRSTQHKPKVSNADAKADKDDTKSLMKGKKRKSQLGTEIQDKEKRSSHSLLVLQFPLPLKKQLVDDWEFVTQMGKLVKLPRSPTVDDILKKYLEHRAKKDGKINDSYAEILKGLRCYFDKALPAMLLYKKERDQYAEEVKGDVSPSTVYGAEHLLRLFVKLPELLASVNMEEDALNKLQLKLLDVLKFLQKNQITFFTSAYDGSCKGADEDKTK

SEQ ID NO: 227517 - protein, 156 aa, Zea Mays
MLTLDPEDSLDFLRTARMATYVFLISGPTLHLWFNFISKLFPKKDVVNTLKKMALGQAVYGPIMKSVFFSYNAGLQGETLPEIIARLKRDLVPAITSGLLYWPTCDLITFKFVPVHLQPLVSNSFSFLWTIYITYMASLKKADACGCGHEYVAVVK

SEQ ID NO: 227518 - protein, 155 aa, Zea Mays
MDIPGSPCICGSSPQQSCRKCPQAVVLCQVEKAKEDMLSQLYTSISTQSLAKIEELIQEDHNVKRKREKFQLQSSLLSKVTRLLSIHDSRSGSAGLSTDSAGSARGTADTLVTTGDLHSELDRPVGLLEQPLPAAAYRVEVRRRLHQMLADCELF

SEQ ID NO: 227519 - protein, 775 aa, Zea Mays
MEELAELADTILQGTALLADDDPSEDRPSRRGSSFLTVVAIGNVGAGKSAVLNGLIGHPVLVSTVLPLSFFSQLSVLPTGENGATRAPICVELQRDASLSSKAIVLQIDSKSQQVSASSIRHSLQDRLSKVSGKGRPDEITVKLCTSTAPPLKLIDIPGVDQRSTDESISNYAARNDAILLVIIPALQAPDVASSRALRIARELDSEGPRTAADIQWVATIGHSVPTASAQSEAGSETPPEAYWQAEVKTLVSTLGGAPESKLGRVALVDSLSKQIKARIKARLPNLLNGLQGKSQVVQDELAKLGEHMVQSSDGTKAIALGLCREFEDKFLENIAGGEGAGWKVVASFEGKFPTRIKQLPVEKHFDMKNVKKVVLEADGYQPYLISPEKGLRFLIKGLLELAKEPSILLVDEVHRVLLDIVSSAANATPGLGRYPAFKREVIAIASTALDGFKNEARKMVVALVDMERAFVPPQHFIRLVQRRMERQRQEEELKNRSTRRGQDPDQSRDTTPQKNSHQGEMKQASNLQVLGPAGEIIAGFLFKKRAKANDWSKRWFVLNEKSGKDCNLEDNLDDEDAPRSSKDSKKANMVDTGKDSSLMFKITHKIAYKNVLKAHSAVILKAESMSDKTEWIAKIKGIVDPKGLSAKKPSASEGGAPVRQSHPDGSLIFHRYSCILSFQEPVLKKPVNHEEELRWISQEVRAYVEAVLNNLAGNVPKLRPQSLSRLSCVAGCGSLPSRESQRRYAQPVIYFYKHAKLSQNRRANPGGPQREAEA

SEQ ID NO: 227520 - protein, 891 aa, Zea Mays
MEELAELADTILQGTALLADDDPSEDRPSRRGSSFLTVVAIGNVGAGKSAVLNGLIGHPVLVSTVLPLSFFSQLSVLPTGENGATRAPICVELQRDASLSSKAIVLQIDSKSQQVSASSIRHSLQDRLSKVSGKGRPDEITVKLCTSTAPPLKLIDIPGVDQRSTDESISNYAARNDAILLVIIPALQAPDVASSRALRIARELDSEGPRTAADIQWVATIGHSVPTASAQSEAGSETPPEAYWQAEVKTLVSTLGGAPESKLGRVALVDSLSKQIKARIKARLPNLLNGLQGKSQVVQDELAKLGEHMVQSSDGTKAIALGLCREFEDKFLENIAGGEGAGWKVVASFEGKFPTRIKQLPVEKHFDMKNVKKVVLEADGYQPYLISPEKGLRFLIKGLLELAKEPSILLVDEVHRVLLDIVSSAANATPGLGRYPAFKREVIAIASTALDGFKNEARKMVVALVDMERAFVPPQHFIRLVQRRMERQRQEEELKNRSTRRGQDPDQSRDTTPQKNSHQGEMKQASNLQVLGPAGEIIAGFLFKKRAKANDWSKRWFVLNEKSGKDCNLEDNLDDEDAPRSSKDSKKANMVDTGKDSSLMFKITHKIAYKNVLKAHSAVILKAESMSDKTEWIAKIKGIVDPKGLSAKKPSASEGGAPVRQSHPDGSLIFHRYSCILSFQEPVLKKPVNHEEELRWISQEVRAYVEAVLNNLAGNVPKLRPQSLSRLSCVAGCGSLPSRESQRRYAQPVIYFYKSTIAIEFEVFEVFLTKKTKATNSRLSHVVISTQSLAKIEELIQEDHNVKRKREKFQLQSSLLSKVTRLLSIHDSRSGSAGLSTDSAGSESSPRNGGHSGDDWRSAFGAGSASWSTGAAIAGRRVPSRGPPPPPPNVG

SEQ ID NO: 227521 - protein, 702 aa, Zea Mays
MEELAELADTILQGTALLADDDPSEDRPSRRGSSFLTVVAIGNVGAGKSAVLNGLIGHPVLVSTVLPLSFFSQLSVLPTGENGATRAPICVELQRDASLSSKAIVLQIDSKSQQVSASSIRHSLQDRLSKVSGKGRPDEITVKLCTSTAPPLKLIDIPGVDQRSTDESISNYAARNDAILLVIIPALQAPDVASSRALRIARELDSEGPRTAADIQWVATIGHSVPTASAQSEAGSETPPEAYWQAEVKTLVSTLGGAPESKLGRVALVDSLSKQIKARIKARLPNLLNGLQGKSQVVQDELAKLGEHMVQSSDGTKAIALGLCREFEDKFLENIAGGEGAGWKVVASFEGKFPTRIKQLPVEKHFDMKNVKKVVLEADGYQPYLISPEKGLRFLIKGLLELAKEPSILLVDEVHRVLLDIVSSAANATPGLGRYPAFKREVIAIASTALDGFKNEARKMVVALVDMERAFVPPQHFIRLVQRRMERQRQEEELKNRSTRRGQDPDQSRDTTPQKNSHQGEMKQASNLQVLGPAGEIIAGFLFKKRAKANDWSKRWFVLNEKSGKLGYTKKQEERHFRGVINLEDCNLEDNLDDEDAPRSSKDSKKANMVDTGKDSSLMFKITHKIAYKNVLKAHSAVILKAESMSDKTEWIAKIKGIVDPKGLSAKKPSASEGGAPVRQSHPDGSLDFRKPSTNGRKRMNS

SEQ ID NO: 227522 - protein, 499 aa, Zea Mays
MEELAELADTILQGTALLADDDPSEDRPSRRGSSFLTVVAIGNVGAGKSAVLNGLIGHPVLPTGENGATRAPICVELQRDASLSSKAIVLQIDSKSQQVSASSIRHSLQDRLSKVSGKGRPDEITVKLCTSTAPPLKLIDIPGVDQRSTDESISNYAARNDAILLVIIPALQAPDVASSRALRIARELDSEGTRTIGVLSKIDQASGEQKALGAVQALLVNQGPRTAADIQWVATIGHSVPTASAQSEAGSETPPEAYWQAEVKTLVSTLGGAPESKLGRVALVDSLSKQIKARIKARLPNLLNGLQGKSQVVQDELAKLGEHMVQSSDGTKAIALGLCREFEDKFLENIAGGEGAGWKVVASFEGKFPTRIKQLPVEKHFDMKNVKKVVLEADGYQPYLISPEKGLRFLIKGLLELAKEPSILLVDEVHRVLLDIVSSAANATPGLGRYPAFKREVIAIASTALDGFKNEARKMVVALVDMERAFVPPQHFIRLVQRS

SEQ ID NO: 227523 - protein, 53 aa, Zea Mays
MENDVPTKEARGTNQRIHFSNQGLFTSAISRFVQFGVHKTGFANSWRHVHCII

SEQ ID NO: 227524 - protein, 593 aa, Zea Mays
MSFRKRQPSSNGASINLAPLGFPSQELEKVNPVNSVMSTDFESMDGVDIDMREVYFLIMHFLSHGPFKRTFGELCNELLEHQLLPRRYHAWYSRGGFHSGEENDDGISLPLDYVKLAERYPHIGKDHLVKLLKQLMASSYHPHNLIGRVSPNAADVPTLLGSNSFSLLPSDRQDKGTPRLPSYLRWPHIQTDQVHGLSLREIGGFTKHCRAPSVRASCYAIAKPSTLVEKMQIIKRLRGHQNAVYCATFDRTGRYVITGSDDRLVKIWAMETAFCLASCRGHEGDITDLAVSSNNSVVASSSNDFIIRVWRMPDGMPVSVLKGHTGAVTAIAFSPRPGAAFQLLSSSDDGTCRIWDARYSQQPPRLYTPKPPDVAPGKSGDASSSAAQVQPTNHQILCCAFNANGTVFVTGSSDTYARVWNACKSSSDEHEQPIHEMDLLCGHENDVNYVQFSGCAVASRSFSSDSSHTSKEENSLKLRNSWFTHNIVTCSRDGSAIIWVPRSRRSHGKIGRWTRAYHLKVPPPPMAPQPPRGGPRQRYQPTPRGVNMIVWSLDNRFVLAAIMDCRICVWNASDGSLVHSLIGHKESENCVSL

SEQ ID NO: 227525 - protein, 69 aa, Zea Mays
MGYLLIQLLLQVLLHPDQYWEAALDVTIFCKKSFLVIAQVHFEKDKALARRFQPVLVNEPSQLAVELGW

SEQ ID NO: 227526 - protein, 95 aa, Zea Mays
MPHPYPARPKRNPRLAAMEGIATQSPHRHPAHRTTIGLHPIASAGPPRHLILPILRANPAWIFRCSSTSHSTHQPRPDLGMLKYEMEDTSLSAQI

SEQ ID NO: 227527 - protein, 1046 aa, Zea Mays
MEKDGGGGRGLPAAMVDGGGREMDSPRFRAILRATSGRRKRAPEVKSFSHELSSRGGGGGVPAMRKMVRGGGLGSTTPEEFIGAIRTKFIRLKEEVDSELGVFAGDLVDMLARSGDHRDDCRVALEDLLVVAQRCAEMSPEELWTRCEGVVQGLDDRRQDLPAGLPKQAHTRILFILTRFTRLLQFRKGAAAGCRYAADADDDDRHNVLGLHNLSDLGLYPIHVDGGDLGPKSTSSLTELKERLIRRRMLEHRQLTVDFSPARIFSPFGDGSAVDGHSPSSKMASWKKLPSPAEKNKTAAAAGDATAAAAKGDDSPSKKKPITRHGKATVDEIVERVDAASIHIRPDGLACLGGDEAISLEIPSRYPEAQQIMVDGKPRMICRICDFEIPMACAEGHFVVCTLADRCDAKGHSADQRLLRVAEVLDRVLACFGPLGGGRASTSSESDSNAADHEALSHLLTVPSTELFSEGALTPASGSLPQSPLLTPRTSHAESQLTKHRAFADLESSQQIESLVAIARGVEGVKSSEYNSLEDLSSYLEDLNAVIDTRKVDALVVETFGRRIAKLLQEKFMQLCVQIDDTGGAAEQQQLLLQHLHPIDEEGPTTTESGGGTTASSRATLSGNRFKDRTSIEDFEIIKPISRGAFGRVFLAKKRVTGDLFAIKVLRKADMIRKNAVESILAERDILISARNPFVVRFFYSFTCRENLYLVMEYLNGGDLYSLLRNLGCLDEDMARTYIAELVLALEYLHSMNVIHRDLKPDNLLISRDGHIKLTDFGLSKVGLINSTDDLSGPDVSCALVGEHQPADAEQREQKRRQRQKQAAVGTPDYLAPEILLGMAHGPTADWWSVGVILFELLVGIPPFNAEHPQIIFDNIMNREIPWPHVPEELSSEAYDLIDRLLMENPVQRLGATGAGEVKAHPFFKDINWDMLARQKVAFIPSTDDEYDTSYFACRHAWSGAGEHGGAAGSDYDDRSEASSMSCGSSPRSDYEEDGDECGSMEEFGAPLSVKYSFSNFSFKNISQLASMNYDLMTKHNNLDPLQSSR

SEQ ID NO: 227528 - protein, 293 aa, Zea Mays
MTSNYPIRSLARSAYNRNDFHTSKILWESALSLNSLIPDGWFAYGTAAWKDKDLDKAVDAFSRAVQIDPENGEAWNNIACLHMIRGKSQAAVQAFREAVKFKRNSWEIWENYSKVALDTGNIRLFSVGILDKVMTMLEEQSPDFVDTHEASDDANKDTRQSNQLLDITGDILQQIVRSGGSNAAIWGLYARWHKTKGNLIACSEALLKQVRSLQGSGLLHDQMKFAKYAQASLKLCKVYMEISSSTGSRRELLTAEMHLKSTLKQTMDFSDTEEYKALDNCLEEIKNLIAATA

SEQ ID NO: 227529 - protein, 70 aa, Zea Mays
MKDNFIPIKCPNPRTGTRSVPVAPYTCNCNATVVFLNEYTVSHTLFQDVAEDVLAALPSYLCPISPKARL

SEQ ID NO: 227530 - protein, 263 aa, Zea Mays
MLQSWVPLIILITSLRKMYAMDGNVLFTIARTDLHHYMALPPFIHHLESAKKGNLVLTGPSWATSAYSPIAFTLYLHDGSPQAGEAAEDDEDIGRIICDCIDGDFSNYNRAIVETVQTGYGPAEVIYAVLSNGVQGRVAIKLARLPVSKAGEEDATAILGRIVARSKLFDVGCVLFYKEGDNGVSVRPGGLIQLAREALAVPLHMPLTIELDLHRCSGDEIVGGVLEFNPATNGQHTERLVGENGAELEVTISWSQYPCLAHR

SEQ ID NO: 227531 - protein, 91 aa, Zea Mays
MDTPSGVKGSIPACIKFSVKVPGEIPYYGIYYDPPEEMKTMESPLLHSINCPKKTGKQPVMKMDIFSYDYSPDFGSVARELLVPTKAFPSP

SEQ ID NO: 227532 - protein, 180 aa, Zea Mays
MSAAGGDLPETVEVTLRAVGPSRPTTLRLPPLLSVAELRGCIARERRLAGTEEVRLRLILRGKTLPHQDDSHVTLRDGDTLIVAVAPKPPVNHLLDDDVEDEEEDELKFRIPQTTTLWKRKFFMFLRDKLRLPDHFDGAVFSQYESMDYHCNVVPIGTDCSEVRHWTFIYNWYWFLDHTY

SEQ ID NO: 227533 - protein, 202 aa, Zea Mays
MFSLADHGICIEQEKLPLEDQISQTWFCGKYCKEIFIGLRSHVGTDNILDSDLSWSILRCNNDGQKLHSVQKIACLAECNMKLAVALTLLEECIIRMVDPRTGVDMIPHVLYNKGSNFARVDYQGFYTVILEKGDKILCVASIRVHGTKAAELPFIATSVDFRRQGMCRILMSIIEKSWLAHGCQDLASNLSKMLKGNNFIM

SEQ ID NO: 227534 - protein, 68 aa, Zea Mays
MEGNQFGDGRRHGLRITRPRFVPQSVDGGNILGAPNQTATIKETRGEQPICAETEPMRHNPRIFTRPH

SEQ ID NO: 227535 - protein, 68 aa, Zea Mays; identical to SEQ ID NO: 227534

SEQ ID NO: 227536 - protein, 287 aa, Zea Mays
MNFCRHLLLAAVFALLLAVCASAASRGAGSFDPSRVVQLSWRPRAFLHKGFLSDAECDHLIALAKDKLEKSMVADNESGKSVQSEVRTSSGMFLERKQDEVVTRIEERISAWTFLPPENGESIQILHYQNGEKYEPHYDYFHDKKNQALGGHRIATVLMYLSNVEKGGETIFPNAEGKLLQPKDNTWSDCARNGYAGYSFFSSALHIILHGSCPVIEGQKWSATKWIHVRSFDLPVKQPGSSDGCEDDNILCPQWAAVGECAKNPNYMVGTKEAPGFCRKSCKVCAE

SEQ ID NO: 227537 - protein, 124 aa, Zea Mays
MMAPCHDDCAPFLFIVSQVRCSISTEFSPGYALPNRAERNRCRRIHSMERGPQPTRSCAEEASCPALALETWSERAKSAQLRFSGEPTKGRGGAQRTARKAIADFFTGCRPLFPRSAHLAGRYG

SEQ ID NO: 227538 - protein, 144 aa, Zea Mays
MPPGSPSSPTDPTSSKVVPPPSYCSHGSPAIILSFLYCLLPPDREAALVQVLPGEVEPNRIPWRTTLQWIQDVRHQINGERWHSRAGGTSEVEPGRIPWRTTFQLIQGVRHQFSGEKNKNRDCNGKWKVKALLIDNLDGMELKF

SEQ ID NO: 227539 - protein, 183 aa, Zea Mays
MPPGSPSSPTDPTSSKVVPPPSYCSHGSPAIILSFLYCLLPPDREAALVQVLPGEVEPNRIPWRTTLQWIQDVRHQINGGSFLRLATTATTPLTSFSPSSVVFVSLLCCWEREVAQPRRWYQRGGARSHPMEDNLPIDPGREAPIQWRGKRRRIWQLSGCPPSPSAQTHSPASIVELNFQDVM

SEQ ID NO: 227540 - protein, 96 aa, Zea Mays
MNPQTTDAESSNNKRVNKRKHNSFTPYIPLPTNVVEARKTRRVLPNQNRLGRRDSMMTTTTTSQCAYFTNEYIQSLKDQLALILLMQKTTISTKET

SEQ ID NO: 227541 - protein, 94 aa, Zea Mays
MNPQTTDAESSNNKRVNKRKHNSFTPYIPLPTNVVEARKTRRVLPNQNRLGRRDSMMTTTTTSQCAYFTNEYIQSLKGSNMDLCASKKSRTPDL

SEQ ID NO: 227542 - protein, 87 aa, Zea Mays
MRHVNLFFLATRSSSNVHLSMSTSRPPKHGSLLEEAPASLRSLPSFSSLVARCQVRPARRTKTRCVCFWRYGAVRWNGRPPAPIVVA

SEQ ID NO: 227543 - protein, 649 aa, Zea Mays
MDEAFARAVEDGLKLTKRLVLPSGGGMPPPPRPHLAMDRDDPAAALQQLMPAAPMAYAVVVDPAAVDSPDVPSYQPHVYGRLDPPALIPLQMREVELRVDCAAGCATAEVALRARWWLHCITRSRACHCRIVVPMAHQGSILGAEVTVGKRSYNTHVIDTEDNCSVKIAMPESGGLLKQEFFSLTIPQVGGGEDIFATIRWSQKLLYDNGQFSVEVPFRFPQFVNPLPKVFMKKEKIQLIVNSGVTKEILLQGTSHPLKEKSRQGEKLSFLHEAVVENWSTKDFTFAYTVYSGDLSGGVLVQPSTLRDYDDRDMFCLFLLPGNNENRKVFRKAVVYIIDTSGSMQGKPLESVKNALSTTLSDLIPGDYFNIITFNDELHSFSSHLEQVNEKTIGNAIEWMNLNFVAQGGTNIMHPLSEAMTLLSTSHDALPQIYFVTDGSVDDERNICHTLKTQLIKSGSKSPRISTFGLGSYCNHYFLRMLASIGKGHYAAAFDTGSIEGRMLQWFQKASSTIVSNVSIDAIKHIQDFEVDSVYIPDISAKYPLCVSGRYNGKLPETLIAKGHLADMSEISIELKVQHIKDIPLDKVLAKQQMDLLTAKAWLMENKELERKVVKLSIQNSLPSEYTRMVLLQTSLDKIDPAQQKYCCI

SEQ ID NO: 227544 - protein, 478 aa, Zea Mays
MDEAFARAVEDGLKLTKRLVLPSGGGMPPPPRPHLAMDRDDPAAALQQLMPAAPMAYAVVVDPAAVDSPDVPSYQPHVYGRLDPPALIPLQMREVELRVDCAAGCATAEVALRARWWLHCITRSRACHCRIVVPMAHQGSILGAEVTVGKRSYNTHVIDTEDNCSVKIAMPESGGLLKQEFFSLTIPQVGGGEDIFATIRWSQKLLYDNGQFSVEVPFRFPQFVNPLPKVFMKKEKIQLIVNSGVTKEILLQGTSHPLKEKSRQGEKLSFLHEAVVENWSTKDFTFAYTVYSGDLSGGVLVQPSTLRDYDDRDMFCLFLLPGNNENRKVFRKAVVYIIDTSGSMQGKPLESVKNALSTTLSDLIPGDYFNIITFNDELHSFSSHLEQVNEKTIGNAIEWMNLNFVAQGGTNIMHPLSEAMTLLSTSHDALPQIYFVTDGSVDDERNICHTLKTQLIKSGSKSPRISTFGLDKFSNCFP

SEQ ID NO: 227545 - protein, 512 aa, Zea Mays
MTASDPARPLLYTLDRSPGPLMEGGTPATAAAEAMEATGKAKNDGVVKEVIRLERESVIPIIKPKLVMKLAYLIERENDRTEFMKLCKRVEYTIRAWYLLQFDDLMSLEQQSMTSNELKTLELNFLTYLFQIMEKSNFKLLSDEEYEVAQSGQYLLNLPIKVDESKVDSKLLTKYFREHPHDNLPAFANKYIIFRRGIGIDRTTDYFFMEKVDVIISRAWRSLLRVTRIDRLFSKKQVLPRKDTKKTDGINDDVEEPDLYVERVRLEKMELSVMNLLRKMTIQEPTFERMIVVYRKASPESKPDRGIFVKHFKHIPMADMELVLPEKKNPSLTPMDWVTFLISAVIGLVTLIGSLEMPKADIWFVTAILSGLVGYCAKIYFTFQANMVQYQNLITKSMYDKQLDSGRGTLLHLCDDVIQQEVKEVIISYYILMEQGKATVQDLDSRCEQLIKEEFGMECNFDVVDAVKKLEKLGIVSRDSIGRILCVPLKRANEIIGTTTEEMVMRAQQASG

SEQ ID NO: 227546 - protein, 57 aa, Zea Mays
MMPDTADLQHHPTESSTAAVNRGPDSARAWTQVRPRLVGSHLSSSSAVGVKTRQSSR

SEQ ID NO: 227547 - protein, 1029 aa, Zea Mays
MEKRLAYAALLPLLLLTLRILPLPSGSPNCSGGEGETPPASRHVVRFLEYRRAEEHREYLDAGLRDGAPAAAWRWVERRNPAAAFPTDFAVLEIRDAHREAVVAAVRALGRVRDVHADATYSRSALSAAPDRSRPPRRGKLFTAMSFEGEEEGGGETGNSSSAAWGRKLLLQRSQVTSLFGAERLWGRGFTGKKVKMAIFDTGIRADHPHFRNIKERTNWTNEDTLNDNLGHGTFVAGVIAGQDAECPGFAPDTEIYAFRVFTDAQISYTSWFLDAFNYAIATGMDVLNLSIGGPDYLDLPFVEKVWELTANNIIMVSAIGNDGPLYGTLNNPADQSDVIGVGGIDYNNHIASFSSRGMTTWELPHGYGRVKPDVVAYSRDIIGSKISTGCKTLSGTSVASPVVAGVVCLLVSVIPEDKRKLILNPAAMKQALVEGASKLSGPNMYEQGAGRLDLWQSYEILKNYQPRASIFPTMLDFTDCPYFWPFCRQPMYAGAMPVIFNATILNGMGVIGYVKDQPLWQPSEDIGNLLSVHFTYSDVIWPWTGYLALHLQVKDEGSQFSGIISGNVTLTIYTPAAHGESSPRSSTCILHMKVKVVPTPVRSKRILWDQYHNIKYPSGYVPRDSLNVHNDILDWHGDHLHTNFHILFNMLRDAEYYIETLGSPLTCFDASNYGTLLMVDLEDEYFDEEIQKLRDDVIHKGLGIAVFAEWYHVDTMVKMTFFDENTRSWWTPITGGANIPAINELLAPFGIALGDKILTGDFSINGEQTHYASGTDIVQFPAGGFLHSFQLQENSKTVQDHIGTLDTESTQGKGKLSSILGVIEAGEGRIAVYGDSNCLDSSHMVTNCYWLLRKILEFTGNRVKDNVLFSEAAQLKFPVFENIHHPSRRTDVNFSTYSTVVGKELICHQDSRFEVWGTKGYGVQPIGTSRKLPEYQMHESSSSPNVTIQIAGSRQDKVERLQRNLSIPNAAKFDDKRDYFGFIGHEEVDIGMLMASQWMIPCFAATAFVECNKNAADEGRGRWLVLIG

SEQ ID NO: 227548 - protein, 635 aa, Zea Mays
MASTAKEKTKGCRPKLFTAKEKKVAKSTKNPGRHAAKLAPSSSKTSSSSPLRTFSEVKSMRLSHFLAQSSNNTTTEPIRIFVSTWNVGGKTPIAALNLDDFIPPDDNSDIYVLGFQEIVPLNAGNVLVIEDNEPAARWLVLINQSLNRPADIDANVFQHEPSPSVDSSSSRASSSIGTSFSDLSKTASGATIFQNSLLKAISKSFMPVRRKQLKACNCPVEMTRTSYRDACFGCQKAYADETDSSGEDEEKGKDKEKSRDSDGSVVDGITSGPATRDQLKYNLIACKQMVGIFVTVWVKKELVQHIGHLRKACIGRGILGCLGNKGCISISMTLHQTSFCFVCSHLASGQKEGDEFRRNSDVLEIMRLTMFSRICRRAGRKIPERIVDHDKVIWLGDLNYRIALSYADTKKLLMENDWDALFEKDQLKIERDAGRVFKGWNEGKIYFAPTYKYSFNSDAYAGETATSKKKRRTPAWCDRILWRGDGIVQLSYYRGESRFSDHRPVCGTFAVEVEVLNKKTNRRSSNADMRIDAEELLPTGKGKGKRDENHVAREEERLVLQPDSQMPYVPSSLMFQRPALKMDGRFTGSAHNSSSPPMFPSHHPCQTANSSQPPVPRAAGQHLLPCRVRAWIVTP

SEQ ID NO: 227549 - protein, 656 aa, Zea Mays
MASTAKEKTKGCRPKLFTAKEKKVAKSTKNPGRHAAKLAPSSSKTSSSSPLRTFSEVKSMRLSHFLAQSSNNTTTEPIRIFVSTWNVGGKTPIAALNLDDFIPPDDNSDIYVLGCCVYLILDLSHILVLIHSRKCFQEIVPLNAGNVLVIEDNEPAARWLVLINQSLNRPADIDANVFQHEPSPSVDSSSSRASSSIGTSFSDLSKTASGATIFQNSLLKAISKSFMPVRRKQLKACNCPVEMTRTSYRDACFGCQKAYADETDSSGEDEEKGKDKEKSRDSDGSVVDGITSGPATRDQLKYNLIACKQMVGIFVTVWVKKELVQHIGHLRKACIGRGILGCLGNKGCISISMTLHQTSFCFVCSHLASGQKEGDEFRRNSDVLEIMRLTMFSRICRRAGRKIPERIVDHDKVIWLGDLNYRIALSYADTKKLLMENDWDALFEKDQLKIERDAGRVFKGWNEGKIYFAPTYKYSFNSDAYAGETATSKKKRRTPAWCDRILWRGDGIVQLSYYRGESRFSDHRPVCGTFAVEVEVLNKKTNRRSSNADMRIDAEELLPTGKGKGKRDENHVAREEERLVLQPDSQMPYVPSSLMFQRPALKMDGRFTGSAHNSSSPPMFPSHHPCQTANSSQPPVPRAAGQHLLPCRVRAWIVTP

SEQ ID NO: 227550 - protein, 576 aa, Zea Mays
MRLSHFLAQSSNNTTTEPIRIFVSTWNVGGKTPIAALNLDDFIPPDDNSDIYVLGFQEIVPLNAGNVLVIEDNEPAARWLVLINQSLNRPADIDANVFQHEPSPSVDSSSSRASSSIGTSFSDLSKTASGATIFQNSLLKAISKSFMPVRRKQLKACNCPVEMTRTSYRDACFGCQKAYADETDSSGEDEEKGKDKEKSRDSDGSVVDGITSGPATRDQLKYNLIACKQMVGIFVTVWVKKELVQHIGHLRKACIGRGILGCLGNKGCISISMTLHQTSFCFVCSHLASGQKEGDEFRRNSDVLEIMRLTMFSRICRRAGRKIPERIVDHDKVIWLGDLNYRIALSYADTKKLLMENDWDALFEKDQLKIERDAGRVFKGWNEGKIYFAPTYKYSFNSDAYAGETATSKKKRRTPAWCDRILWRGDGIVQLSYYRGESRFSDHRPVCGTFAVEVEVLNKKTNRRSSNADMRIDAEELLPTGKGKGKRDENHVAREEERLVLQPDSQMPYVPSSLMFQRPALKMDGRFTGSAHNSSSPPMFPSHHPCQTANSSQPPVPRAAGQHLLPCRVRAWIVTP

SEQ ID NO: 227551 - protein, 430 aa, Zea Mays
MPVRRKQLKACNCPVEMTRTSYRDACFGCQKAYADETDSSGEDEEKGKDKEKSRDSDGSVVDGITSGPATRDQLKYNLIACKQMVGIFVTVWVKKELVQHIGHLRKACIGRGILGCLGNKGCISISMTLHQTSFCFVCSHLASGQKEGDEFRRNSDVLEIMRLTMFSRICRRAGRKIPERIVDHDKVIWLGDLNYRIALSYADTKKLLMENDWDALFEKDQLKIERDAGRVFKGWNEGKIYFAPTYKYSFNSDAYAGETATSKKKRRTPAWCDRILWRGDGIVQLSYYRGESRFSDHRPVCGTFAVEVEVLNKKTNRRSSNADMRIDAEELLPTGKGKGKRDENHVAREEERLVLQPDSQMPYVPSSLMFQRPALKMDGRFTGSAHNSSSPPMFPSHHPCQTANSSQPPVPRAAGQHLLPCRVRAWIVTP

SEQ ID NO: 227552 - protein, 157 aa, Zea Mays
MATPSVVQAPLCFVSPQGDSMSRSRWPLHYRFRFKGRLAADKAHEGAQGEPRRFCHEARDADRWDSEADDLAPHHSQHARMPFSRWGEQNRDRNGDGGRRPSRSSAAELPVSLSLMRRYTLNEKKVQIVDTTCSCFSKEALLNSLPRLLGSLSSSVR

SEQ ID NO: 227553 - protein, 57 aa, Zea Mays
MGFHSRFLKIYLELPPIVQPLQMEEDLEQLKVFENSYRMKVIKVEQNARGVDAPEVH

SEQ ID NO: 227554 - protein, 257 aa, Zea Mays
MLEAGALVLADGGLCCIDEFDSMREHDRTTIHEAMEQQTISIAKAGLVTTLSTRTTVFGATNPKGQYDPNESLSVNTTLSGPLLSRFDIVLVLLDTQNTGWDEIVSSHILKENSDEKKDKADASDIKWMLPQLRRYINYVRRKFKPVLTKEAERVISSYYHLQRKSGTHNAARTTVRMLESLIRLAQAHARLMFRNEVRQLDAIAAILCMESSMTTSPIVDIVGNALHSNFTVDPDEEYKTQEKKILKKLGITQGSP

SEQ ID NO: 227555 - protein, 98 aa, Zea Mays
MNASWLQRLVTSTLRGAPLPSYPNNAHLKELEKAPENLYLFKADEPDHDTLTAAVEGCEGIFHLATPAVPEDKIVDPEEDLMADVMNKNDRLVRHRRP

SEQ ID NO: 227556 - protein, 81 aa, Zea Mays
MNASWLQRLVTSTLRGYPNNAHLKELEKAPENLYLFKADEPDHDTLTAAVEGCEGIFHLATPAVPEDKIVDPENASALYSP

SEQ ID NO: 227557 - protein, 481 aa, Zea Mays
MAPTSMLPFAPSNTSLPYSSRATTAAAFAPRGLHHAAAGRSGGGQRLACAAPRRRRGGGLVVRASADYYATLGVPRAASNRDIKAAYRKLARQYHPDVNKEPGATEKFKEISAAYEVLSDEKKRALYDQYGEAGVKSAVGGSGGAYTTNPFDLFETFFGASMGGFSGMDQSAFRTSRRSTAIQGEDIRYDVILGFTEAIFGTEKDIILSHLETCDTCGGSGSKAGSKMRICSTCGGRGQVMRTEQTPFGLFSQVSICPTCAGEGEVISEYCRKCSGEGRIRVRKEIKVKIPPGVSKGSTLRVRGEGDAGPKGGPPGDLFVCLDIEEPSDIKRDGINLYSTVSISYLEAILGTVMQVRTVDGTSDLRIPPGIQPGDVIVLAKQGVPSLNKPSIRGDHLFTVKVAIPKRISGRERELLEELASLSNGRFARTDTKPKPAQPKAIHQEKEVGASQEDTSKSKEAEGDWLKKLTDFAGCITSVEI

SEQ ID NO: 227558 - protein, 102 aa, Zea Mays
MIFASAVLTELCPRIVDHRAHHLFDETLPRTAYVFDRSTRATGQPPAAARFVLIRELHPLGTEMTRALSTANCHAAMEMTHGRTSGLCADGSTFCIWAGAAS

SEQ ID NO: 227559 - protein, 259 aa, Zea Mays
MFGEHVGIIGSTKELGSWKSQVDMDWTPNGWVCQLDVPGEALLEFKFVIILNKGKDKIWEDGDNRVVNLPKNGSFDMPCHWNKTKEPLDLLGSSEIKLSGDTEVIGEDAKLSENIALEEMGSICNAGVGDLTPKHESSTLGGQWQVSLKLVEGDKASRNWWRKLELVRVLLSEYVQDQSHLEALTYSAIYLKWIYTGQIPCFEDGGHHRPNKHAEISRQIFGEIERIYYGKNTSSQVDCFIPHSSCEINIVLQLFYLYH

SEQ ID NO: 227560 - protein, 86 aa, Zea Mays
MTSVTEGIDAIATTRVVVTGDVTNNSKHALTGRAFNRSFSGSGAAMDIVVSSVRAYLSALNKMCSFAGAAKASGEVPESASVQSAE

SEQ ID NO: 227561 - protein, 274 aa, Zea Mays
MRWLPRLLSHSIEVGRASAAGRSNPSLVKAGSHGFASGGWDGSPAVPREWLRKLWVDVLKKQKEDARRWGIGASPGNAGSGAEPSLCAFANSVEAAGATREAPSRSYQYEYRGLAGLVVQMSKSNPLLFMFQLLRTRRPFVAEITDAMGNEIFKVRRPFWWINSSIYAEVDGKEIGVVHRRWHLWQRIYDLYLGNRQFAVVENPGFWNWTFSLVDEDDKLLAQIDRNWRGIGFERTSVSDCHGVGTRTTICRIQGISLFSFLKRLAVTLITVVR

SEQ ID NO: 227562 - protein, 124 aa, Zea Mays
MLNKSLIANLSAANCYKSEHLKRPENWALVEKAKYIYIAGFFLTVSPDSIQLVAEHAAANNKVFLMNLSAPFICEFFRDAFVGGFLSQLVLGKGIEDCVRAGCYAANVIIQRPGCTYPEKPDFN

SEQ ID NO: 227563 - protein, 52 aa, Zea Mays
MVKFWNDNVAEEMPWSSFKCRILQKSGWRTPLFRLLSCFCRRRDDVFHLCMT

SEQ ID NO: 227564 - protein, 509 aa, Zea Mays
MTATPAVIGLSAGHRLLATSFGSPDLASPDAHSSLQFAAAAPKLTVVAHRAPASSSSSSPPNVGRGSSAAGHARARAIRALRNHSAPALATPPPPPLPADPTPDLDSEFESSLEAIVLLQRSMLEKQWELPFEDDIISTDDEQDDRVSKATVVAARSGVSARQRRMSGRRRGAGRKSVAISPELMQSRNRIYLRGTVSKDLLTHKQVIQLSRKIKDGIWLQHQRSKLKEKLGNEPSYKQLAQSLRISAPELRARMRESFLAREMLTMSNIRLVISIAHKYDNLGVDLADLIQGGLIGLLRGIEKFDASRGFRISTYVYWWIRQGVSRALADNSKTFRLPTYLHERLIAIRGAKYALEDQGIAPTIENIAESLNISEKKVHNATENSRLQAVNKVLSLDQQAFPSLNGLPGDTLHSYIEDQNVANDPWHGFEEMYLKEEVNNLINSNLNERERDIIRLYHGIGKQCHTWEDISRQFGLSRERVRQVGLVAMEKLKHAARRKHLDALLEDY

SEQ ID NO: 227565 - protein, 211 aa, Zea Mays
MPRCRRDKGQALIDLDSDAEDECQSKGSQTSRTTTLKTSGRLKNVLTTTLKTSGRRSKNVLPSFYDNLPQGRASRHATSRRNKTNQDKLNTDIFELYMEDLWKHIDEDKKSAYAYLDSLWFNMYYHGSNKPNVLKWIKAKRIFSRQYVFVPIVCFGHWSLLVLCHFGDANCSDIKKGPRMMVLDSLNTTDPTRLRSAIRKHRKRELYCFFG

SEQ ID NO: 227566 - protein, 218 aa, Zea Mays
MHVTAEPIQWWDVCRRTNWPERDENIANIVLYNQRSSMMAMGASDCEDSEHSDSTASNDGISGKEIMRIRERSSWYLSNAEVQINSWRIPIWQKSKICFYVMGYPAAELVESVSSGGGEIEIEKLPLHEVEIRRRELLPVFKQFQYSDRHSSDRNIANGGFQNALSHISNAQNSSVKDNGEYETKPVALSGFYAGKHMMSMYMSLLYYTIVDWKIFLL

SEQ ID NO: 227567 - protein, 555 aa, Zea Mays
MPTCIANGSGATRYDWTASHVHLYKLYRGMTSAVIQDISFSHFSQWISIVSSRGTCHIFTLSPFGGDASLQPQNSHSDGPPLAPCQSRPWWSKPSFLMDQQLHQVPSTVTHSVVSRIKNNTSGWLNNVSNVAASASGKLSVPSGAVTAVFHNSIYQGSLPVPSKANALEHLLVYSPSGHVIQHELLPSSGSESSGSSPRVGSGPNLQLQDDEMHVTAEPIQWWDVCRRTNWPERDENIANIVLYNQRSSMMAMGASDCEDSEHSDSTASNDGISGKEIMRIRERSSWYLSNAEVQINSWRIPIWQKSKICFYVMGYPAAELVESVSSGGGEIEIEKLPLHEVEIRRRELLPVFKQFQYSDRHSSDRNIANGGFQNALSHISNAQNSSVKDNGEYETKPVALSGFYAENGNNGYISTPPETKASIRSLSSYSLLDGHVDGMLSPNSASHKPETTNNSVLSNAASTDVQNGCLTTVDSGQQEASHSHSSVEFTQYFQEGYCKISELDDCRELTEAVTDADSSSSHCEREKPEEDGDNDDLLGGVFAFSEEGSSHLFI

SEQ ID NO: 227568 - protein, 453 aa, Zea Mays
MSLVVKLRYILKLLSAASWVVILPVTYAYTWKNPTGLARAIKSWLGDGQNQPSLYILAVVIYLAPNLLSATLFLFPVIRRALERSNLKVVTFIMWWSQPRLFVGRGMHEGAFSLFKYTMFWVLLLATKLVVSFYVEIKPLVQPTKDIMKEPIRTFKWHEFFPHANNNIGVVIALWAPIILVYFMDTQIWYAIFSTLIGGVYGACRRLGEIRTLGMLRSRFESLPKAFNQCLIPSDTSKRRGFRAAFSKPSKTSEDTREQEKIAARFAQIWNLIITSFREEDLIDDREKDLLLVPYCKDRDMDIIQWPPFLLASKIPIALDMAADSGGKDRDLKKRMKSDPYFTYAIKECYASFKNIIYELVIDSRERGYIQKIFDAVDEHIAEETLIKELNMSNLPTLSKKFIELLDLLESNNKEDHDQIIILFQDMLEVVTRDIMVDQLSERTAHHCIKKIK

SEQ ID NO: 227569 - protein, 759 aa, Zea Mays
MSLVVKLRYILKLLSAASWVVILPVTYAYTWKNPTGLARAIKSWLGDGQNQPSLYILAVVIYLAPNLLSATLFLFPVIRRALERSNLKVVTFIMWWSQVVLINLKLIQPRLFVGRGMHEGAFSLFKYTMFWVLLLATKLVVSFYVEIKPLVQPTKDIMKEPIRTFKWHEFFPHANNNIGVVIALWAPIILVYFMDTQIWYAIFSTLIGGVYGACRRLGEIRTLGMLRSRFESLPKAFNQCLIPSDTSKRRGFRAAFSKPSKTSEDTREQEKIAARFAQIWNLIITSFREEDLIDDREKDLLLVPYCKDRDMDIIQWPPFLLASKIPIALDMAADSGGKDRDLKKRMKSDPYFTYAIKECYASFKNIIYELVIDSRERGYIQKIFDAVDEHIAEETLIKELNMSNLPTLSKKFIELLDLLESNNKEDHDQIIILFQDMLEVVTRDIMVDQLSELLELIHGANNKRSEGMTSLDQQDQLFTKAIDFPVKKTQAWNEKIKRLRLLLTVKESAMDVPTNLDARRRISFFANSLFMSMPDAPKVRQMLPFSVLTPYYKEDVLFSSQALAEQNEDGVSILFYLQKIYPDEWKNFLERVHCESEDQLHETEHSEEQLRLWASYRGQTLTRTVRGMMYYRQALVLQASLDMARDDDLMEGFRAADLLSESDESPLLTQCKAIADMKFTYVVSCQQYGIQKRSGDPHAQDILRLMTTYPSLRVAYIDEVEEPSKDKNKKIEKVYYSALVKAAVTKPDDPGQKLDQGYI

SEQ ID NO: 227570 - protein, 711 aa, Zea Mays
MSLVVKLRYILKLLSAASWVVILPVTYAYTWKNPTGLARAIKSWLGDGQNQPSLYILAVVIYLAPNLLSATLFLFPVIRRALERSNLKVVTFIMWWSQPRLFVGRGMHEGAFSLFKYTMFWVLLLATKLVVSFYVEIKPLVQPTKDIMKEPIRTFKWHEFFPHANNNIGVVIALWAPIILVYFMDTQIWYAIFSTLIGGVYGACRRLGETSEDTREQEKIAARFAQIWNLIITSFREEDLIDDREKDLLLVPYCKDRDMDIIQWPPFLLASKIPIALDMAADSGGKDRDLKKRMKSDPYFTYAIKECYASFKNIIYELVIDSRERGYIQKIFDAVDEHIAEETLIKELNMSNLPTLSKKFIELLDLLESNNKEDHDQIIILFQDMLEVVTRDIMVDQLSELLELIHGANNKRSEGMTSLDQQDQLFTKAIDFPVKKTQAWNEKIKRLRLLLTVKESAMDVPTNLDARRRISFFANSLFMSMPDAPKVRQMLPFSVLTPYYKEDVLFSSQALAEQNEDGVSILFYLQKIYPDEWKNFLERVHCESEDQLHETEHSEEQLRLWASYRGQTLTRTVRGMMYYRQALVLQASLDMARDDDLMEGFRAADLLSESDESPLLTQCKAIADMKFTYVVSCQQYGIQKRSGDPHAQDILRLMTTYPSLRVAYIDEVEEPSKDKNKKIEKVYYSALVKAAVTKPDDPGQKLDQKVKSFVL

SEQ ID NO: 227571 - protein, 1896 aa, Zea Mays
MAAALAWRFNGTNGGAHGSADLERHTDKVQDSEPQTPMSIVKMGKNRVNVEDEETLSSVAQCIEQLRQSSSSSQEKESSLKQLLDLVQTRDTAFGAVGSHSQAVPILVSLLRSGPSGVKMLAATVLGSLCKEEELRVKVLLGGCIPPLLALLRSKSAESQTAAAKTIYAVSQGGIRDHVGSKIFSTENVVPVLWEQLKISLKNESLVDGLLTGALKNLSKNTEGFWSATVQCGGVDILIKLVSSGQTNTLANTCYLLGSLMMEDSSVCSKVLSGETTKQLLKLLGPGNETSIRAEAAGALKFLSAQSKEARRQIANSNGIPSLINATIAPSKEFMQGESAQALQENAMCALANISGGLSYVISSLGESLESCSSPAQIADTLGALASALMIYDTNAESISASNPVDIEKTLLKQFKPKVPFLVQERIIEALASLYGNPVLCKTLADSDAKRLLVGLITMAATEVQDDLTKSLFALCKKDCDLWQALQGREGVQLLISLLGLSSEQQQECAVALLALLSKENDESKWAITAAGGIPPLVQILETGSSKAKEDSATILGNLCNHSEDIRACVQSADAVPALLWLLKNGSDNGKEIASKTLNHLIHKSDTGTISQLSALLTSDQPESKVYVLDALKSLLSVAPLNDILHEGSAANDAVETMIKILSSPKEETQATSATALAGLFHCRKDLRETHIAVKTLWSVMKLLDMQSNKILTGASCCLAAVFLSIKENKEVAAIGRDALNPLVSLANSSVIEVAEQATRALANLFLDQELSLQVPFEEILFRVTRVLREGTIDGRTHAAAAIARLLQCRTINQPLSDTVNRSGSVLALAGLLEAANGEAAATSEVLDALVLLSRSKASSGHTKAPWAILAENPHTILPLVSCIADAAASLQDKAIEVVSRLCSDLHDVVGGLVSETPGCMSSITRRIIGSNILKVKVGGCALLVCAAKEYCQKQIEVLNDASLYIQLIHSLIGMIHMANTQAENVSSESISDIRISRHSKENNSDGETLCCTAVISGNMIPLWLLAIFSRHDSKTRAELLEMGAVEMLIEKISQNAFQYVRSLIGDKMMVFVGLGHGLMVKKITPHGSDEPAYRYFAAQALSSLVCNGSRGTLLAVANSGAAIGLISLLGCADVDIADLLELSEEFMLVPNPDQIALERLFRVDDIRVGATSRKSIPLLVDLLKPIPERPGAPFLALGLLTQLAVDCPPNMLLMAEAGILEALTKYLSLSPQDATEEATTELLGILFSSPEIRHHESALGVVNQLVAVLRLGGRNSRYSAAKALESLFCADHVRNSESTRQAIQPLVEILSTGMEREQHAAISALVRLLSDNPSRALAVADVEMNAVDVMCRILSSDCSVELKGNAAELCCVLFTNTRIRSTMAAARCVEPLVGLLVSEANPAQLSVVRALDRLLDDEQLAELVAANGAVIPLVGLLYGKNYMLHEAVARALVKLGKDRPACKLEMVKAGVIESILDILHDAPDFLCIALAEMLRILTNNATIAKGPSSAKVVQPLFSLLSKADMGPEGQYSTLQVLVNILEHPECRADYNLTPRQTIEPVITLLNSSPPAVQQLAAELLSHLLLEDHLQKDTVTEQAITPLIQVLSSGLPNLQQRAIKALANLAIAWPNTIAKEGGVFELSKVLLQSDPPLPHVVWESAASVLSSILQYSTEFFLEVPVAVLVQLLRSGTESTVVGALNALLVLESDDSTSAEAMAESGAVEALLDLLRSHQCEETAARLIEALLNNVRIREAKAAKNAIAPLSMYLLDPQTQSQQGRLLAALALGDLFQNEGLARSTDAVAACRALVNLLEDQPTEEMKVVAICALQNLVMYSRANKRAVAESGGVQVLLDLISSSNPDTSVQAAMFVKLLFNNHTIQEYATSETVRVITASL

SEQ ID NO: 227572 - protein, 63 aa, Zea Mays
MASSYSCWPVFVILYNLPPSLCMKYEFIFLCLIIPSPEDLGKKLNVMLKPLIEELKELWKGVE

SEQ ID NO: 227573 - protein, 362 aa, Zea Mays
MAVISPNSTPMFELRSKAADQKEESEPPATPPHASAAASTPAPASRTVYSDRFIPSRTGSNLALFDLAPSPSSAASSSHDGGPVASSGSAQPAASPYCTLLRAALFGPDTPDRVASSAAACSSSSSSSPGPSPVGTPATGNIFRFKTEVRRNAKRALFSGDQEEDALFPGIFTTRGAGPRKVPRSPYKVLDAPALQDDFYLNLVDWSSHNVLAVGHKLPVKYKVHITSCSNFSHHMLDRFTDNTSCQSSLAPTFDLVLEGVTPCIQSLQLQAGDTVTFSRIDPGGKLVMGFRKATNTDSQISAIADGSLLSETLFSTANESIGVLTGMSVRIRQEAEKHLSDMVNSKSLTAKIDNVVVSIGR

SEQ ID NO: 227574 - protein, 123 aa, Zea Mays
MVAGTDPNRGPSIPLEFARLLMQCKPATCRGALVPGAASQQIKETARGRPRGPGLLTATGEREPMWSGNFGLANVLTSDDLVSSISILEKFLVLHLFAGVSCYRIFSNKGGSNTELYVPRTSC

SEQ ID NO: 227575 - protein, 55 aa, Zea Mays
MAPPHGARRSTSTRSAATSATARCGGTRSGDDDGEEASAMAYERATNGVMGRPGG

SEQ ID NO: 227576 - protein, 430 aa, Zea Mays
MAVPAHDSRDHEFAVKYELPIIKVVSPPNGNCDPVEAYEDDGIMINSSSSSSGLNINGMLSQDAAKKVTEWIENNGFGKKKVNYKLRDWLFARQRYWGEPFPVSYLDDTNEMVPLTEDDLPLTLPELDDFTPTGTGEPPLTKATNWVRTIDPSSGKPARRETSTMPQWAGSCWYYLRFMDPKNCSILVDKAKERYWGPVDIYVGGAEHSVLHLLYARFWHKVLYDMGVVSTKEPFKCLINQGLILGEIEYTAYRDNEGRWVSADSDSSLIDCYQEKVAPDKVTKVGDHYVLKDNPNIRLNARAYKMSKSRGNVINPDDVVSEYGADSLRLYEMFMGPLRDSKTWSTGGIEGVHRFLGRTWRLIVGPQLSDGSYNDGTMTTEDEPTLDQLRVLHRCIARVTEEIQETRFNTAISAMMEFVNAAYKVKPNLS

SEQ ID NO: 227577 - protein, 54 aa, Zea Mays
MFVIFISIHLVIICVVLIWRTYETHPALPLKSGRDNNVKYNLLCSGVVHIAEGN

SEQ ID NO: 227578 - protein, 403 aa, Zea Mays
MKFGDPISALYYLDPAGTTPSHVMMDRNSIWFCQGPAAKKLNIDLPETEIVETHRNHSARITCLRLFPLIDTPLFRSDTQKNEKALVTSSTDRTIRLCWKGYSRCYKGHSAPVTALADRLLMDGESKLLASGGEDCTIRLWSMSTRAKNHPLIATFHGHEKALSFLSVAWHKSSLLVSCSKDSKVKVWDTVSPSSGSSSCVGSAHLNSNGPPIAMKCHESLCYIAAGAEVTAIDLRTMKKASVLALQNHRILSCEMMPSEWLICTGTKDRALLWDIRKAQELPNTVAEMQSSGPVTLLHLDQYKLQSFVEQPDKVMVTDLFSIGILWGRASTHGHGHGHGGILGSAWHVHDKIGKQQEGRKDPSCPAAHPAGFPQLFGLAAQPTGMPDAMVPLPLRPAGGSSL

SEQ ID NO: 227579 - protein, 118 aa, Zea Mays
MSAPPVRTLADLDGDVLAHCAGYLGARDVASLAMACRPLRAAAYCDAVWYRLFRDQWPFEKVPCDALGLRELYIHRHTEIHQMKFGDPISALYYLDPAGTTPSHVMMDRNSIWFCQVS

SEQ ID NO: 227580 - protein, 100 aa, Zea Mays
MRRVEIIPMMMRGGRLTGLTSQVLRCFSTEIFVSRLSFYTTEEEFKDIFSPFGTVEEARLMRDHQTGRMKGFGFVKYSSQAEAEKAVKAMDGKATPNLDD

SEQ ID NO: 227581 - protein, 275 aa, Zea Mays
MKQSSNESAGADVSRAQSVKSRIARSNDARRLKNWITVLQEAQAAVADGADCAPQVMALQAEALLRLQRHDEADSLLSGAGAPRFGVDESTKFFGTFGHAYFLIVRAQVDMAAGRFEDAVATAQTAFQLDPSNREVSVVQRRAKAAAAARLRGNDLFKAAKFAEACAAYGEGLDREPGNAVLLCNRAACHAKLGRHEKAVEDCSAALDVRPSYSKARLRRADCNVKLERWEASLRDYQVLVQELPENEDVKKALSEVEAKLKGQRHGAAAARSQH

SEQ ID NO: 227582 - protein, 85 aa, Zea Mays
MTAVSGWDDESVLLDVMVAEATLACESHRKRQASTCSNDDGTGSNTKYGDTVDSRAPLFHDAKVTCVLSNGANHAHPRDLGLIAD

SEQ ID NO: 227583 - protein, 533 aa, Zea Mays
MALAIWRGATRVDWATTSDGGQLTEQRSSESDKSRGEFDSRPTRERSPAPVACKGSTAAGHAGGSECAHVYRRLGICACGGASLVHEVAPTVEQAHAGINALALSQITINKLRENFIDIDKLCQECQTLIENHDKIKLLSNTRNNLNTTLKDVGGMMSISVEAAAAHDSLSNDQELIHTYERLIALDGKRRFALAAAASHKEEVGRLREYFEDVDQTWETFEKTLWGHITNFFKLSKESPQTLVRALRVVEMQEIFDEQVAEEATEAEGAGVIATITNQRRTAKKGAGATATPRKSTQEKSKVQGKGYRDKCYESIRVAVEARFNKLLTELVFVEDLMEALEEAKAIGEELGDIYDYVAPCFPSRYEIFQLMVNLYTERFIQMLRLLSDRANDIQNINILKVTSWVVQYQEDLIGLGVDESLAQVCSESGALDPLMNMYVERMQATTKKWYNNILEADKTQPPKSREDGKLYTPAAVDLFRILTEQVQIVRDNSTYVMLYRIALAVIQGWKGIYSMLWAKAHYKEDVEIAAKL

SEQ ID NO: 227584 - protein, 258 aa, Zea Mays
MAAFDNLIALPAAALAPAPAAPAPPSSETQLPYKSQLQIYAQKRGKLLPSYRPIHGGSLHAPLFKSEVTIDGQTFESPEYCHTMKEAETVAAKVALMSLPQEANPTQQLLLPSVNYKNLLQELVQKEGFPLPIYNTASDVSNYSAAFVSTVEIHGVTFHGKPGNTKKQAEMNAAKSAFEHFKNINHDAGSSGSANPLPVAATKQSVDGNTLRAKLEVNKSHLAEPSTEVEAIYSSTEVDKLPLPGPSMDIESQSQKLK

SEQ ID NO: 227585 - protein, 68 aa, Zea Mays
MPRPSELTLAVSHPPTGQEQVPLDEAHGGCCTVFERGLDRRLPVDFLAPRMDFRSCSIYLLFCKTSAM

SEQ ID NO: 227586 - protein, 448 aa, Zea Mays
MAGRYYQGQGGGGGTSMEVVSTPNQELALTNCAYVCPADLRRFPNALAVVADSWVFTLREHNAVASGRIALNAIQRRQAKVSAGDSVTVSSFVPPDDFKLALLTLELEYAKARANRNDELDAVVLAQQLRKRFLDQVMTLGQRVPFEFHGTNYVFTVNQALLEGQESSTPLDRGFLSSDTYIIFEAAPNSGIKVINQKEAASSKLFKHKEFNLEKLGIGGLSAEFTDIFRRAFASRVFPPQVVSKLGIKHVKGILLYGPPGTGKTLMARQIGKLLNGKDPKIVNGPEVLSKFVGETEKNVRDLFADAENEQRTRGDQSDLHVIIFDEIDAICKSRGSTRDGTGVHDSIVNQLLTKIDGVEALNNVLLIGMTNRKDLLDEALLRPGRLEVHIEINLPDENGRFQILQIHTNKMKENSFLSPDINLLELGQRTTVEQSWKVLSKVLSRML

SEQ ID NO: 227587 - protein, 50 aa, Zea Mays
MIPGCPLKKCSRFQMQLTLLTLKDIRCSDYYVITACEDVVEYLHITVLDG

SEQ ID NO: 227588 - protein, 838 aa, Zea Mays
MESHNGEADDLPPPPPLAAGVEPLKADETKMPLKPRSLVQRNGFGRKGQQIKLITNHFKVSLMKAEDFFYHYYVNLKYEDDTPVDRKGSGRKVIEKLQQTYAAELANKDFAYDGEKSLFTIGALPQVKMEFTVVDEDVSTGKTPANGSPGNDSPPGSDRKRVRRPYNTKTYKVELSFAAKIPMSAISQALRGQESEHTQEAIRVIDIILRQHSAKQGCLLVRQSFFHNNPSNFVDLGGGVVGCRGFHSSFRATQSGLSLNIDVSTTMIVKPGPVIDFLIANQKVNDPSMIDWAKAKRSLKNLRIKTSPANQEQKIVGLSDRPCREQLFTLKHKNGESEEITVFDYFVKNRGIKLEYSGDLPCINVGKPKRPTYFPVELCSLLPLQRYTKALSTLQRSSLVEKSRQKPQERMSVLSDVLQRSNYDAEPMLKACGITIARNFIEVDGRVLQPPKLKAGNGEDIFTRNGRWNFNNKKLIRASSVEKWAVVNFSARCNVRDLVRDLIKCGGMKGIMVDAPFAVFDENPSMRRSPAVRRVEDMFEQVKTKLPGAPKFLLCVLAERKNSDIYGPWKKKCLAEFGIVTQCVAPTRVNDQYLTNVLLKINAKLGGLNSLLQIETSPAIPLVSKVPTIILGMDVSHGSPGHSDIPSVAAVVSSREWPLISKYRASVRTQSPKMEMIDSLFKPRETDDDGLIRECLIDFYTSSGKRKPDQVIIFRDGVSESQFNQVLNIELQQIIEACKFLDEKWNPKFTLIIAQKNHHTKFFIPGKPDNVPAGTVVDNKVCHPRNFDFYMCSHAGMIGTTRPTHYHILHDEIGFNPDDLQELVHSLSYVGFLALQFQ

SEQ ID NO: 227589 - protein, 66 aa, Zea Mays
MVVVHVCVSEAMELREYMMFPLGVELQFCLSYYIYVLHQSVCLTSYYCVFEIPHKIFISCHCIARP

SEQ ID NO: 227590 - protein, 240 aa, Zea Mays
MDRGERLGRALDAFGGNLWALVDAALDAAARDRPDELRARRDSIVERLYAAAAGCSNCAGRPPSVAALAAAGLEEEDGEEAAPASPWAEADAQAGGAEAQTEVLGAGEPDLESKIVAIRDFLEDPNQPENELVSLLQNLADMDVTYNALQETDIGRQVNGLRKHPSAEVRRLVKQLIRKWKEIVDDWVRLDNSGGDGSASVMTADGDSPHKIQGRSHQSPRVSGFQYSPSPQRWFNFRDG

SEQ ID NO: 227591 - protein, 65 aa, Zea Mays
MQAMEIDPDNSTLYAKRSLCFLYTGYEGKALEDATTYRDMQPALALVKEYCMTCEALLPGLNSDF

SEQ ID NO: 227592 - protein, 772 aa, Zea Mays
MQLSFGVDEFLIIAPLSASGVILDDPESTKLLSSVAIALSNCGSNWPAFVPVHDPSRKAYIGIQNLGTVFTRRFEADRIGSQVPIRLMHLEGLHELFLSKFVLSSSDFPARVKVHFSMKLSYKTPEYDHDNETLDSEATEPLTENEVVNHPRKLWDDDCPWAEWYSAEDPVKGFELTAIWGERTFEETLEMAEVENASSFDADSWFLHPVVSRYMVDDSIGKFVGFASQLHLLVNAYESSVEAQFLEDFVAADTSGQDNAKSTATVPPPSVIDRVMKDLFSDETGNYMEAENKYSRAMRGAPADSLFGQFCLHALWFGNCNICAIATLWIDFVREIRWCWEESERLPRMKSTSSIDLSSCLIHQKLQMLTICIERKRSLNREKGTGYKDETSNSTAVNKSRKGSAGVVPKMMLLNTFQEMHAPYTQDAPLMTEDMHEERLHAAEAFGNAIGLSGQLERDILCSDMSAFKAANPDAVFEDFIRWHSPGEWLSEDKTDGNAGWPPKGKLSHRMSQHGNVWRKIWNDALPLPVSEQKSLLDPVREGEKVLHYLETLRPQQLLEQMVCTAFKSSADILNKTMYGGFKEMKTKMDRLYVTMASTLKSFLGNSDVNDLVGGLKRLCQVFEHIEKLLILAASINRKLIDAPRLAQAIFYDYYNFYLPKMGTSLESICYEKEFTTKEKVGMYERDAVSNLFPPPTANQSWRKVLSMGNLLNGHEPMQREIIFSVQERISNGHYSSPTPLCTNNEKIQTHRMYISGTSNDLWVALSVTSWD

SEQ ID NO: 227593 - protein, 548 aa, Zea Mays
MASTSSSRYAKHRRIGEDDELEEVEEEAEEELPCLVGYHLPHCFDWEHQKGAEGVPPFENLYMIKRELKHGKRVYSMEYHFMKSAKGQNSYWDDDTHSMQLSFGVDEFLIIAPLSASGVILDDPESTKLLSSVAIALSNCGSNWPAFVPVHDPSRKAYIGIQNLGTVFTRRFEADRIGSQVPIRLMHLEGLHELFLSKFVLSSSDFPARVKVHFSMKLSYKTPEYDHDNETLDSEATEPLTENEVVNHPRKLWDDDCPWAEWYSAEDPVKGFELTAIWGERTFEETLEMAEVENASSFDADSWFLHPVVSRYMVDDSIGKFVGFASQLHLLVNAYESSVEAQFLEDFVAADTSGQDNAKSTATVPPPSVIDRVMKDLFSDETGNYMEAENKYSRAMRGAPADSLFGQFCLHALWFGNCNICAIATLWIDFVREIRWCWEESERLPRMKSTSSIDLSSCLIHQKLQMLTICIERKRSLNREKGTGYKDETSNSTAVNKSRKGSAGVVPKMMLLNTFQEMHAPYTQVLFALFFRFNIVIHMHPLMFPLVP

SEQ ID NO: 227594 - protein, 829 aa, Zea Mays
MACRWRKDLNGAEGVPPFENLYMIKRELKHGKRVYSMEYHFMKSAKGQNSYWDDDTHSMQLSFGVDEFLIIAPLSASGVILDDPESTKLLSSVAIALSNCGSNWPAFVPVHDPSRKAYIGIQNLGTVFTRRFEADRIGSQVPIRLMHLEGLHELFLSKFVLSSSDFPARVKVHFSMKLSYKTPEYDHDNETLDSEATEPLTENEVVNHPRKLWDDDCPWAEWYSAEDPVKGFELTAIWGERTFEETLEMAEVENASSFDADSWFLHPVVSRYMVDDSIGKFVGFASQLHLLVNAYESSVEAQFLEDFVADTSGQDNAKSTATVPPPSVIDRVMKDLFSDETGNYMEAENKYSRAMRGAPADSLFGQFCLHALWFGNCNICAIATLWIDFVREIRWCWEESERLPRMKSTSSIDLSSCLIHQKLQMLTICIERKRSLNREKGTGYKDETSNSTAVNKSRKGSAGVVPKMMLLNTFQEMHAPYTQDAPLMTEDMHEERLHAAEAFGNAIGLSGQLERDILCSDMSAFKAANPDAVFEDFIRWHSPGEWLSEDKTDGNAGWPPKGKLSHRMSQHGNVWRKIWNDALPLPVSEQKSLLDPVREGEKVLHYLETLRPQQLLEQMVCTAFKSSADILNKTMYGGFKEMKTKMDRLYVTMASTLKSFLGNSDVNDLVGGLKRLCQVFEHIEKLLILAASINRKLIDAPRLAQAIFYDYYNFYLPKMGTSLESICYEKEFTTKEKVGMYERDAVSNLFPPPTANQSWRKVLSMGNLLNGHEPMQREIIFSVQERISNGHYSSPTPLCTNNEKIQTHRMYISGTSNDLWVALSVTSWD

SEQ ID NO: 227595 - protein, 627 aa, Zea Mays
MVDDEYEDHAGSYRWARSSEGRALGLDRVRSRAKNAAAGTVGSPANGGDSSKQTSESGGLQDQGAWSSKDGDGVSSSSFGQGESGRHLFGGPVSSFEEKQRDDAVHEKDDDDPRAGVAALPPLSSDIMQESGGGLEDLELQVQNAIAAAAAAAPPKESNSVSSNDPGSSSSEIFPSGPGPADQVPVPATSPEIEPLFANQIPAASSEVKAAPPFHLDPPVADAEAKQTAPLREWKPLCDLTSNRRIDWCELEGDVRVVGGSNGSVTLVAAPGADERSFHEESWSIKPYPRKADPNAMRSVRALAVRSVATAPPVACTDWHGVPALVFSARGYTGNYFHAYTDVILPLFLTARQYAGEVLLLVTGFQAWWVGKYLPVFRSLSNYEPVDLDRDRDPRVRCFRRVQVGLTSHDDFSIDPRRAPNGYSMLDFTRFMRATYGLPRDAVPRRGRGRPRPRLLVIARARTRRFLNAEDIVRGARKVGFEVVVSEVAQEVAAFAELVNTCDAVVGVHGAGLTNMVFLPPGGVVIQVLPLGPLEFVASYFRGPARDMGLSYLEYRISPEESTLLDQYPRDHPVLTDPMSVQAKDWVSFMGVYLFKQDVRLDMKRFRPVLKKALARLRAKPRNNNNK

SEQ ID NO: 227596 - protein, 143 aa, Zea Mays
MRWLLPLLSLTGLQSTVGALWFVRQNMSSPRHAASTYPDASSSTVGSSSSPPQCTGIYLFSTILYEPNEGVHNYTVAPPPSTTRVMPPPTLSRDLRRRVFTTQARDLRRRPHLGQVRSAFGGPSSSSSARPRPCSPRISAAVS

SEQ ID NO: 227597 - protein, 109 aa, Zea Mays
MHLPPRPTARAEPPELRPSDPPLVQPLGPTCTAYIVLLDSRVSNSNPPENLILPQMGLRKERRSHCRGNLRLGYCSRRQRYRGLSSGVRKDGHGCATQDWALAHHNFSP

SEQ ID NO: 227598 - protein, 56 aa, Zea Mays
MVPQRQGKHNTEGTQSAATRISFSQILFTIPLITRCVGRLLGCLYIRMDSSEQKCL

SEQ ID NO: 227599 - protein, 362 aa, Zea Mays
MGFIGAHGVETLKRYRYSGEDRSVVAKYVLQPFWSRCVTLFPLWMPTWLCFPTFQITLTGFSFLVLSALLGYICSPHLDTAPPRWVHLAHGLLLFLYQFEALALGSTLMCGGWTLCFWVVAAVPFYLATWEHFFTNTLILPTINGPTEGLMLIYVSHLFTFFTGAEWWAQDFRKSLPFFGWIPLPFLSEIEIPLYVLVLILMIVCAVIPTVRSNVSNVQEVVEARKGSMALALAMILPFIVLLAGVAIWCYLSPSSIMRNQPHLLVIGTGFNFGYLVGRMILAHLCDEPKGLKSGMFMSLVFLCFPIANALIAKINDGSPLVDELVLLLLYCAYTVCYVSVFWDYGTPFLCRCFCLVIWSHS

SEQ ID NO: 227600 - protein, 63 aa, Zea Mays
MGFIGAHGVETLKRYRYSGEDRSVVAKYVLQPFWSRCVTLFPLWMPWVHLAHGLLLFLYQSNI

SEQ ID NO: 227601 - protein, 514 aa, Zea Mays
MTEAQSPLSATMAKEAQSSPSATVAQATALPQLVLFNSLTKREEPFQPRVEGKVGMYVCGVTPYDFSHIGHARAYVAFDVLYRYLKFLGYEVEYVRNFTDIDDKIIKRANERGETVTSLSSRFINEFLLDMTELQCLPPTCEPRVTEHIEHIIELITKIMENDKAYAMEGDVYFSVESFPEYLSLSGRKFDQNQAGARVAFDTRKRNPADFALWKAAKEGEPFWDSPWGRGRPGWHIECSAMSAHYLGHLFDIHGGGKDLIFPHHENELAQSRAAYPESEVKCWMHNGFVNKDDKKMAKSDNNFFTIRDTLYDCEEVLATYREEGISLSVPFEEQNLIDKHHSEFLKYMSNDLKTTDVLDRCFMELLKAINSSLNDLKKLQQKIEQQKKKQQQQKKQQQKQQQLQKQPEHYIQALIALEIELKNKLSILGLMPSSSLAEVLKQLKDKALKRAGLTEEKLQEQIEQRNVARKNKQFEISDGIRKNLATKGIALMDEPSGTVWRPCEPEGPHPLNK

SEQ ID NO: 227602 - protein, 1296 aa, Zea Mays
MIIDAIDWLVLSTTEKVRNIYDDLFEVPSKVMQTAITPRDATSSINFYWNSKGSSLGYIPVFHFSEVLQAGAGVVRQFNININGKRFTSHDYYTPRHLESGYVYGTRPYTNQIRYNVSIVKTDTSTLPPIINADEIFIVISTTNVGTDSEDVSAMKAIKAKYQVKKNWMGDPCVAGTFRWDGLTCSYAISDPPKITALNMSFSGLTGDISSAFANLKAVQSLDLSHNNLTGSIPSSLSQLPSLTTLDLTGNQLSGPIPSSLLKRIQDGSLNLIYADNPDLCTNAGDSCQTAPQGKSKLVIYYVAVPMALIVVALAVLLCCLLRRRKTRGLADVSVKPRDKTPTSLASMAADEHRLSSLRLENRRFTYEDLEMITDSFKRVIGRGGFGYVYEGFLEDGTQVAVKMRSQSSNQGAKEFLTEAQILTRIHHKNLVSMVGYCKDGVYMALVYEYMSEGSLQEHIAGKRLTWGQRLRIALESAQGLEYLHRGCNPPLIHRDVKTSNILLNAKLEAKVADFGMSKALDRDTYASTNTLVGTPGYVDPEYLETMQPSTKSDVYSFGVVLLELVTGRPPILHSPQPTSVIQWARQHLARGDIEVVVDASMGGNHDVNSVWKAAEVALQCTEQASAQRPTMGDVVAQLLECLDLEKGRSANESFCDGDDSGSATASLSHSSAFVTGRIFGTVPMVETGPATRRALVCVSLSPLSPLPRARLPSAPPWDESAFLAMAASHLPPAATLVKKYPTLLHPFGAKPHAQRLIFRCRATSSEGADDGWASFVDELKRSLQVDPSDAVISNAGAGLTSNNDLVTALPLEPSAGPAAGDATTAAAGAVSELLGVDASGAVATPDRLLSSLLHLDASNPVASVAGGALSRLDALTSGLSDAQRWALFGFLAATWLYLTARPGVLSGAVDMYVLAPLQLALDSVLGRRSLKMSDFVVGERIGEGSFGVVYAGAVVPKNGAVVEERSGKAKTSLQNDDRYKEKVILKKIKVMTVGAKECGDYEEWFNYRVSRAAPESCADFLGSFVADKNKAEFVKGGKWLVWKFEGDRTLANYLSERGFPSNLERLMFGRVLQGLGPLEREALVVKQVMRQLITSLKRIHATGIVHRDIKPSNLVVTRRGQVKLIDFGAATDLRIGKNYVPDRALLDPDYCPPELYVLPEETPEPPPEPIAAILSPILWQLNSPDLFDMYSAGIVLMQMAIPTLRTQSGLKNFNAELRSAGYDLNRWRQSARRRPDLQILDLDSGRGWDLATKLISERGANGGGRLSAAAALRHPYFLLGGDQAAAVLSKFSLSK

SEQ ID NO: 227603 - protein, 1226 aa, Zea Mays
MIIDAIDWLVLSTTEKVRNIYDDLFEVPSKVMQTAITPRDATSSINFYWNSKGSSLGYIPVFHFSEVLQAGAGVVRQFNININGKRFTSHDYYTPRHLESGYVYGTRPYTNQIRYNVSIVKTDTSTLPPIINADEIFIVISTTNVGTDSEDGTWDGLTCSYAISDPPKITALNMSFSGLTGDISSAFANLKAVQSLDLSHNNLTGSIPSSLSQLPSLTTLDLTGNQLSGPIPSSLLKRIQDGSLNLIYADNPDLCTNAGDSCQTAPQGKSKLVIYYVAVPMALIVVALAVLLCCLLRRRKTRGLADVSVKPRDKTPTSLASMAADEHRLSSLRLENRRFTYEDLEMITDSFKRVIGRGGFGYVYEGFLEDGTQVAVKMRSQSSNQGAKEFLTEAQILTRIHHKNLVSMVGYCKDGVYMALVYEYMSEGSLQEHIAGKRLTWGQRLRIALESAQGLEYLHRGCNPPLIHRDVKTSNILLNAKLEAKVADFGMSKALDRDTYASTNTLVGTPGYVDPEYHLARGDIEVVVDASMGGNHDVNSVWKAAEVALQCTEQASAQRPTMGDVVAQLLECLDLEKGRSANESFCDGDDSGSATASLSHSSAFVTGRIFGTVPMVETGPATRRALVCVSLSPLSPLPRARLPSAPPWDESAFLAMAASHLPPAATLVKKYPTLLHPFGAKPHAQRLIFRCRATSSEGADDGWASFVDELKRSLQVDPSDAVISNAGAGLTSNNDLVTALPLEPSAGPAAGDATTAAAGAVSELLGVDASGAVATPDRLLSSLLHLDASNPVASVAGGALSRLDALTSGLSDAQRWALFGFLAATWLYLTARPGVLSGAVDMYVLAPLQLALDSVLGRRSLKMSDFVVGERIGEGSFGVVYAGAVVPKNGAVVEERSGKAKTSLQNDDRYKEKVILKKIKVMTVGAKECGDYEEWFNYRVSRAAPESCADFLGSFVADKNKAEFVKGGKWLVWKFEGDRTLANYLSERGFPSNLERLMFGRVLQGLGPLEREALVVKQVMRQLITSLKRIHATGIVHRDIKPSNLVVTRRGQVKLIDFGAATDLRIGKNYVPDRALLDPDYCPPELYVLPEETPEPPPEPIAAILSPILWQLNSPDLFDMYSAGIVLMQMAIPTLRTQSGLKNFNAELRSAGYDLNRWRQSARRRPDLQILDLDSGRGWDLATKLISERGANGGGRLSAAAALRHPYFLLGGDQAAAVLSKFSLSK

SEQ ID NO: 227604 - protein, 66 aa, Zea Mays
MVNRSEDSNKPMCIYPVGRRYPAMGHGWMLFTERELGQHRRGLVATQEKIRVAQRGRGRQAATAVG

SEQ ID NO: 227605 - protein, 510 aa, Zea Mays
MLLTPPGTPRVPALEGAEKTPSSNILPKRTTTRSSSTTRASRLSISQTENGNSTIPTRPARSNSVSRSSIQSALMNGNNRTSVLNTSISSVTSRPTTPSRRSSTVGTPKHSAPAARPVPARSSTPVNTRPSTPAKTRPSTPTRTRPTAPNSSTDSAAAKTTFTHNARPSTPNSRSRIVPNSSSSATHVISRPSASLSATSRPGSSSGNVPGISRATSLSSSSVPSMSRSSSRSSTPTRQPAIRSSAPAIGRSPSVGRTSSINSFTTSSRSAASTGRNSAPSSAPSSRPSSPNPRPRAPVRPLDIPDFPNETPPNLRTKLPERPPSAGRSRPGMALGIRSTPNTEPSAASAPVKKISVPAVSRSKFSDASSKTSTLTNGHQNRQADRSNIDSQANRPSRPSTGTTDNGFGRSISRRSLDMAIKHMDIRQNLGGIRGTSLFPQSIRSAAAKVRPARASDPGHGISNGDQRYSDNGKQRERTPLPGTQTGFSHVMVAAQPIRQTGGASGPRRP

SEQ ID NO: 227606 - protein, 161 aa, Zea Mays
MPPAFAAAPSSSICGVRIPTVRRFEAQSTVSTPRFMRNRVAAKTRSTSAWSLKAGLWDSLRSGLLKNNSSTETVEPPPAPLEVEEPLPVEIVLLERTLPDGSTEQILFSSAGDVDVYDLQALCNKVGWPRRPLSKIAASLRNSYLVATLYSIIRSSETVYL

SEQ ID NO: 227607 - protein, 118 aa, Zea Mays
MTGRFLLGRSREHGVVGDMRDAWPNARVRKNVSIIHTYHGFKGALEFLKLIFRALCLCWDRQTQDLHVDWILFRGRPLVPALCEVINDNIDGVYPSSHFPIFAEFLLPRSVRLAETPS

SEQ ID NO: 227608 - protein, 278 aa, Zea Mays
MNNQSHTETVLSTRQQIESRNPLAFAPKVIHTSEPGLELRDFSNKTPASARHKRGCNCKKSSCLKKYCECFQGGVGCSISCRCEGCKNAFGKREGAAVLSIEEPKQGLEEKDVCVKEEKSEIEKQLVVYQTPDDAPAENVLTTPSMVQCRPLACRPPPSSKKSSKKPRSSTKLTGHPSRLCNLQAPPKTDTMLSPFENYAEMVLGDSTSDILKGNSSPQTSVKVVSPNKKRISPLRMGTGLSPICRSGRKLILKSIPSFPSLGGDVNNEDPETKLPAP

SEQ ID NO: 227609 - protein, 602 aa, Zea Mays
MLSRLAAARRQLLLSPAVAYRSSSAAATASAVHERAAPASASVLPDTLERGSDAYQRNTAAVGGLLSDLRARVSQVLRGGGAEAVRRNAARGKLLPRDRIDRLLDPGASFLELSQVSLAAPARTLVFLALIWPHCEVNSIACSDVYDEALPSAGIITGIGPVHGRLCMFVANDPTTKGGTYYPLTVKKHLRAQEIASECKLPCIYLVDSGGANLPRQADVFPDRDNFGRIFYNQAKMSSDGIPQIAVVLGSCTAGGAYIPAMADESVIVKGNGTIFLAGPPLVKAATGEEISAEDLGGASVHCKVSGVSDHFAQDEIHGLELGRNIVKNLHLAAKGTNIQSSACGYQEPLYDVEELRSIAPADVKQSFDIRSIIARIVDGSEFDEFKKLYGTTLVTGFARICGQPVGIIGNNGILFTESALKGSHFIELCAQRHIPLIFLQNITGFMVGSKSEASGIAKAGAKMVMAVSCAKVPKITIIVGGSFGAGNYGMCGRAYSPNFLFLWPTARISVMGGIQAAGVLAQIEKNNKRRQGVEWSKDEEEAFKAKVVEAYDREGSPYYSTARLWDDGVIDPADTRRVLSLCLSASAKPVPEDTRYGVFRM

SEQ ID NO: 227610 - protein, 390 aa, Zea Mays
MLSRLAAARRQLLLSPAVAYRSSSAAATASAVHERAAPASASVLPDTLERGSDAYQRNTAAVGGLLSDLRARVSQVLRGGGAEAVRRNAARGKLLPRDRIDRLLDPGASFLELSQVSLAAPARTLVFLALIWPHCEVNSIACSDVYDEALPSAGIITGIGPVHGRLCMFVANDPTTKGGTYYPLTVKKHLRAQEIASECKLPCIYLVDSGGANLPRQADVFPDRDNFGRIFYNQAKMSSDGIPQIAVVLGSCTAGGAYIPAMADESVIVKGNGTIFLAGPPLVKAATGEEISAEDLGGASVHCKVSGVSDHFAQDEIHGLELGRNIVKNLHLAAKGTNIQSSACGYQEPLYDVEELRSIAPADVKQSFDIRSIIARIVDGSEFDEFKKLH

SEQ ID NO: 227611 - protein, 297 aa, Zea Mays
MADESVIVKGNGTIFLAGPPLVKAATGEEISAEDLGGASVHCKVSGVSDHFAQDEIHGLELGRNIVKNLHLAAKGTNIQSSACGYQEPLYDVEELRSIAPADVKQSFDIRSIIARIVDGSEFDEFKKLYGTTLVTGFARICGQPVGIIGNNGILFTESALKGSHFIELCAQRHIPLIFLQNITGFMVGSKSEASGIAKAGAKMVMAVSCAKAAGVLAQIEKNNKRRQGVEWSKDEEEAFKAKVVEAYDREGSPYYSTARLWDDGVIDPADTRRVLSLCLSASAKPVPEDTRYGVFRM

SEQ ID NO: 227612 - protein, 280 aa, Zea Mays
MGIPSDGDDVVQIRHADAAGEPTVVTVSCPDKTGLGCDLCRAVLLFGLSVVKGDMSTDGRWCYIVFWLLPRGRRPVAVPWDLLKDRLLQLCPVAPPFGFGSHDAYLAAAAGLQDVPPPAPQLFLLKLCCFDRMGLLHDVTRVLCELELTIRRVKVSTTPDGSVLDLFFITDARGLLHTKSRREETQDRLESVLGDSLTCCEIDPAGEDMVSCCLQSWAWASLTPAVIAQMFSTADRVEEQPIGTRGGGGGTIISVTMDNSLSPAHTLIQIQCGDHKGLLK

SEQ ID NO: 227613 - protein, 149 aa, Zea Mays
MTFSLLCRKSDLALLHMVPCAPLSRLLDNIQEDVVATGGIDTNAVIFDQSSGQILCTLTGHSKKNRYYGIEMFGSTYRVSSIIDVGTSLLCTRSGVCFAIEDYFYIIFVCLLGDILWCTNPKAGAVDPKAENKAIEKIKSARNKSSQGR

SEQ ID NO: 227614 - protein, 128 aa, Zea Mays
MRDDGDPEATLEADRKASESFLNHGPLQLERSLMCQDDANLGPGVGRNSENKAKLGTDARKTKERRSTRRLKRSEMDRRTKAKQQEKENEGAALFRTPMPAIVNKKAVGPRSARRRRVFAEANRILDG

SEQ ID NO: 227615 - protein, 54 aa, Zea Mays
MPRAYHHSRFEEESQDFADLELFYLRFKQCWMCLSQINWYCVFGDPGLSFGMVM

SEQ ID NO: 227616 - protein, 1099 aa, Zea Mays
MPGTSSTTSLTYKYLEQVGVDFDDKNSWEYLFKLYWLDLKGKHLLTIEELKSAKNYWTVPTTAGRREKEESSDELYDASNDQDATFDISSKKQRQNNSSGKRGQKRKKDGGITSRKRGISINSAGSLPNGSTGEGMSLAGDTKWASSELLEFIGHMRNGDSSYISQFDVQVLLLEYIKQNNLSDPRRKSQIICDARLSNLFRKPRVGHFEMLKLLEMHYLVKQVPTLNADSERAFDSYSAQVNHGGYNELSDKLGSDKRRKAHMKIERESTINPEDYAAIDMHNINLIYLRRSVMEDLIDEVAVFSDKIAGAFVRIRISGLGNKQDMYRLVKVLGTHKVAERYTVGKKTTDYALEISNLEKKEIITMDTISNQDFTEEECKRLRQSMKFGLTARLKVRDVYDKAKIFQSLQFKDLQLLNTPEETERMINEAPEVHVDPQMDPSYESAEEPDYKKAVDWTMHRNGPDLLFPGRKGTKLNSVENHTQNSLDASGHISSLPTEDVDHRLGAGSNINLNNMAPEPASLGVLSNDTEPEKVWHYKDPNGNVQGPFTLLQLSNWASFFPRDLRIWLTFESEENSLLLTEVLPKQQKDFIQPSTVTTSDKSIWAGSGQDRINSNANNSSSPSLSAECYDPTKYLKPLGGTSPSRSLKDSHALHEVQNQVNDSSTILSSAGSYVPTSSHDERVSRDRVDEWNSSQDNGGIWNPTMNHSRKSNAQQHPDGFTGKDQMLTESKCSSHMVSVLTPQQSERDPATSLSTTSRPECKTMCRQEGSSWSSATNAGVHDLQLTIALTKPETCSPTNPVEDRDSSSASAVSCQSGAPACIPQPDPTSTCNSSKIEATMDLHKTCQPDTSNESFGRLPEPQSGSLFSLKTLNLESEHPSSTPKLEGKETSMNQSGSTSVAHENLATKTRVRPPTSKIDSLQPLKERSCPTERDSITQLEHLFEENVVKRNNEVVNPVSDAEGIAVSDVLESLTEQDCEKYSTHGADCEKYSTHGAAPLQNLVPASAEEEQPQCSSPIALSPWGEPSYYQGEAVDSALWGVQDGNDMWSMPSPTPGLQPSSGLRCSSFSVFASLNNFLTLQNLLHALELMEKTLHAS

SEQ ID NO: 227617 - protein, 108 aa, Zea Mays
MKYFYQPRRSQRSLAVAVVGDKVPLYGGGAGLSSTPTTLPPPRKRAPPVVVPPPPVPLRLAVRVRSRAFVLGSLVKPKFYSEAQCSVTMDQARLGKPVSLNKACTYTH

SEQ ID NO: 227618 - protein, 290 aa, Zea Mays
METSAATPTRPPHQAATSPSPSPSSSLRLWRPAAQRNMRNQWSHLSAAKEQWLAAVADGRAHASALVNVHLSCRNMPAMDLGVLKDMPGIRDKANSKLALREVEQYSGMLLSAYKEMVCQLSYLVEASHSMRCFSKAAPNCSITQFSDRQDNLNDSGDGGGAPVFKWFSVLEFESLAQELVQMFVSEQKLKRLLLLEFLSIALKEGVELQTSLNWGDELYDGESNKLQSIGLQSGDAYSPPENWCAERLGSQRPGNLPLHEVLQVYLTTWHANMNINRKLVKYLSLLRRR

SEQ ID NO: 227619 - protein, 245 aa, Zea Mays
MKEQLPVPLVPIIGKGVLEEEVMVSFVTTNGEPTTTTTSKLVWWNLVDQMTMTLTSCTSAAMLPTRTRASPSRALYKSGSIIVLGKTNFLRPGMDPITIWTATKKSGLISYKKILFHGLDLWTALSLPQPLGRAALWPPHRTIHQHLQCKCSRFSNELRSGIRILQEFFVLFAWIYTEGNAFKTPIDDESHLSLFSWTRILVSSSSKRWSFLWSGSKMLGKHHLQQLAATPPPPHHGSYKNTLSR

SEQ ID NO: 227620 - protein, 490 aa, Zea Mays
MEVVKTTHAGHAKSLVSTFDFSACPDGIVCVGGDGIVNEVLNGLLIRSDRAEAVSIPVGIIPAGSDNSLVWTVLGVRDPISASLLIVKGGFTALDILAVEWVQSGQIHFGSTVSYYGFVSDVLELSEKYQKKFGPLRYFVAGILKFLCLPSYFYELEYLPSPKEMAVNGKGTDQDKAHLSNVYTDVMHSRSKKEGIPRASSLSSIDSIMTPSRMSLGDVDTSGSTVASTEPSDYVRGLDPKAKRLSLGRSNIVSEPEEVLHPQPHHGSFWPRTRSKARADRNSVGITSTNDTRSSWAAPSMHDKEDISSTISDPGPIWDCEPKWDTGPKWDSELTWEPDHPIELPGPQEDMGIGAPMELVPNLDEKWVVRKGHFLGVLVCNHSCMTVQSLSSQVVAPKAIHDDNSLDLLLVGGKGRWKLLRFFILLQFGRHLSLPYVEYVKVKSVKLKPGANTHNGCGIDGELCRVKGQVLCSLLPEQCRLIGRRCRQSI

SEQ ID NO: 227621 - protein, 658 aa, Zea Mays
MDGSELENPTSRSSSQKSSRRSSSRRSQKSAGQHSLTGAQEKRSKSKSSRQKHLVIDDKEAKKGKKHDHKIDVADERSNFLGYEVYAGKLILQKKNRSASDNNQLPSNGKADAIDARLTSKALIWGSSVLLLEDVVSVSYNSGVKHFTLHAYSTKKSLFKKTCRVQKDFCFIASTLDEAILWVTCFAEQSIYVNLLPRLGASSINQDSENPLSESLFDQPPIKCKSPQRVLVILNPRSGHGRSSKVFHEKAEPIFKGGFTALDILAVEWVQSGQIHFGSTVSYYGFVSDVLELSEKYQKKFGPLRYFVAGILKFLCLPSYFYELEYLPSPKEMAVNGKGTDQDKAHLSNVYTDVMHSRSKKEGIPRASSLSSIDSIMTPSRMSLGDVDTSGSTVASTEPSDYVRGLDPKAKRLSLGRSNIVSEPEEVLHPQPHHGSFWPRTRSKARADRNSVGITSTNDTRSSWAAPSMHDKEDISSTISDPGPIWDCEPKWDTGPKWDSELTWEPDHPIELPGPQEDMGIGAPMELVPNLDEKWVVRKGHFLGVLVCNHSCMTVQSLSSQVVAPKAIHDDNSLDLLLVGGKGRWKLLRFFILLQFGRHLSLPYVEYVKVKSVKLKPGANTHNGCGIDGELCRVKGQVLCSLLPEQCRLIGRRCRQSI

SEQ ID NO: 227622 - protein, 490 aa, Zea Mays; identical to SEQ ID NO: 227620

SEQ ID NO: 227623 - protein, 191 aa, Zea Mays
MASLLRRSAVPARQLLLLLPRHLAAAGSAPASSRSFSRFHPRDDDDSSMFDPPEPPVNWGMNIVPEKKAFVVERFGKYLKTLDSGFHLLIPAVDRIAYVHSLKEETIPIPDQNAITKDNVTIQIDSVIYIKIMDPYLASYGVEDPIYAVLQLAQTTMRSELGKITLDKTFEERDALNEKIVETECIALDDL

SEQ ID NO: 227624 - protein, 272 aa, Zea Mays
MDPYLASYGVEDPIYAVLQLAQTTMRSELGKITLDKTFEERDALNEKIVSAINEAATDWGLKCIRYEIRDITPPTGIRQAMEMQAEAKRRKRAQILESEGKKQAQILESEGKKTAQVLESEGAMLDLANRAKGAAEAILAKSEATARGMRLVSDAMTTEGSAKAASLKLAEQYIEAFSNLAQKTNTMLLPGDSASPASFVAQAMKTYQQIHSHSQALKYHPQIEGLEESGETSPAAPSSEASKTPPFVGEADSNHTFSLQRPRIRSELPSSA

SEQ ID NO: 227625 - protein, 112 aa, Zea Mays
MAYIMDTNEEERVKGKTVEVGRAHFETEHTRFTILDAPGHKSYVPNMISGASQADIGVLVISARKGEFETGYERGGQTREHVLLAKTLGVAKLVVVINKMDEPTVKWSKERR

SEQ ID NO: 227626 - protein, 163 aa, Zea Mays
MLLIALIRRPAQAHRTSGFMDNCVPSFKTSPRRSFARPPTRNDSWKTVGSITRPRPSLGGKTKPSSRRTNPKENPANGPAAASFSRSSRLRTILTILVIPPKDPICQLGTKYGTPSLIPLSLAARICPISCTPIIRPVTRAPDSPSFNNSSSPVEQVHFEVAE

SEQ ID NO: 227627 - protein, 378 aa, Zea Mays
MELRNRLTELKRKTAVDKTEVEQASSDLKAKTVPLNLALVTLKKRRADAVAMHTNAMKVAQMNLMATTSDCMKMQSKSVKQLCRLFPMRRNDQNVFMGSSKDNFHGMSKTGEQFLAGVYHHLPSILAFTAPHPNSYDRIQPDTWSGAYLCWGKENKEAPLRTACPPESNPSDHSSKLKRLPQNLQESVESLSADKVLHELIGDKLVTTAIVIRKGFILLYKKFKWINNKGSLVDMNKPPEMISGNMKVGSANSFERKRPRKGTLGQAFGVLVHSSRALAEPEAATPGDIIILDLSTCSLDCFVRVKVIRMIGETTEAVGARVGGGSSGNKMPTLEEYGTNLTKLAEEGKLDPVVGRQPQIEHVIPHIHKSLINKSSKE

SEQ ID NO: 227628 - protein, 85 aa, Zea Mays
MCMNICVGNFLVTCFPHNNIIKLWNETAFAYSAITFYSTPIKFMGCLACKTRVKYFNSRVTSFVEFLGALLQLFGGSFCCWYVIF

SEQ ID NO: 227629 - protein, 339 aa, Zea Mays
MAKGEGPAIGIDLGTTYSCVGVWQHDRVEIIANDQGNRTTPSYVAFTDTERLIGDAAKNQVAMNPTNTVFDAKRLIGRRFSDPSVQSDMKLWPFKVVAGPGDKPMIVVSYKGEDKQFSAEEISSMVLTKMKEIAEAYLGSTIKNAVVTVPAYFNDSQRQATKDAGVISGLNVMRIINEPTAAAIAYGLDKKATSSGEKNVLIFDLGGGTFDVSLLTIEEGIFEDEEHKKKVDAKNSLENYAYNMRNTIKDDKIASKLGADDKKRIENAVDGAISWLDSNQLAEVDEFEDKMKELEGICNPIIAKMYQGAGADMGAAAGMDEDAPAAGGSAAGPKIEEVD

SEQ ID NO: 227630 - protein, 561 aa, Zea Mays
MKLWPFKVVAGPGDKPMIVVSYKGEDKQFSAEEISSMVLTKMKEIAEAYLGSTIKNAVVTVPAYFNDSQRQATKDAGVISGLNVMRIINEPTAAAIAYGLDKKATSSGEKNVLIFDLGGGTFDVSLLTIEEGIFEVKATAGDTHLGGEDFDNRMVNHFVQEFKRKHKKDISGNPRALRRLRTACERAKRTLSSTAQTTIEIDSLYEGIDFYTTITRARFEELNMDLFRKCMEPVEKCLRDAKMDKSTVHDVVLVGGSTRIPKVQQLLQDFFNGKELCKSINPDEAVAYGAAVQAAILSGEGNEKVQDLLLLDVTPLSLGLETAGGVMTVLIPRNTTIPTKKEQVFSTYSDNQPGVLIQVYEGERARTKDNNLLGKFELSGIPPAPRGVPQITVCFDIDANGILNVSAEDKTTGQKNKITITNDKGRLSKEEIEKMVKEAEKYKAEDEEHKKKVDAKNSLENYAYNMRNTIKDDKIASKLGADDKKRIENAVDGAISWLDSNQLAEVDEFEDKMKELEGICNPIIAKMYQGAGADMGAAAGMDEDAPAAGGSAAGPKIEEVD

SEQ ID NO: 227631 - protein, 610 aa, Zea Mays
MAKGEGPAIGIDLGTTYSCVGVWQHDRVEIIANDQGNRTTPSYVAFTDTERLIGDAAKNQVAMNPTNTVFDAKRLIGRRFSDPSVQSDMKLWPFKVVAGPGDKPMIVVSYKGEDKQFSAEEISSMVLTKMKEIAEAYLGSTIKNAVVTVPAYFNDSQRQATKDAGVISGLNVMRIINEPTAAAIAYGLDKKATSSGEKNVLIFDLGGGTFDVSLLTIEEGIFEVKATAGDTHLGGEDFDNRMVNHFVQEFKRKHKKDISGNPRALRRLRTACERAKRTLSSTAQTTIEIDSLYEGIDFYTTITRARFEELNMDLFRKCMEPVEKCLRDAKMDKSTVHDVVLVGGSTRIPKVQQLLQDFFNGKELCKSINPDEAVAYGAAVQAAILSGEGNEKVFSTYSDNQPGVLIQVYEGERARTKDNNLLGKFELSGIPPAPRGVPQITVCFDIDANGILNVSAEDKTTGQKNKITITNDKGRLSKEEIEKMVKEAEKYKAEDEEHKKKVDAKNSLENYAYNMRNTIKDDKIASKLGADDKKRIENAVDGAISWLDSNQLAEVDEFEDKMKELEGICNPIIAKMYQGAGADMGAAAGMDEDAPAAGGSAAGPKIEEVD

SEQ ID NO: 227632 - protein, 414 aa, Zea Mays
MNEDFLLIVLKELLSRRRDLRLILMSATLNAELFSSYFGGAPTIHIPGFTHPVRAHFLEDILERSGYKLTSSNQLDDYGQDKVWKTQRQLLPRKRKNQITTLVEEALKNSSFEIYGSRTRDSLVNWNPDCIGFNLIEAVLCHICRKERPGAVLVFMTGWDDISCLKDQLKAHPLLGDPNRVFLLACHGSMATSEQRLIFEKPPPNVRKVVLATNMAEASITINDIVFVVDCGKAKETTYDALNNTPCLLPSWISKASARQRRGRAGRVQPGECYHLYPRCVYDAFADYQLPELLRTPLNSLCLQIKSLQVGSIGEFLSAALQPPEPRAVENAVEFLKMIGALDGNENLTDLGRYLSMLPVDPKLGKMLIMGAVFRCIDPILTVVAGLSVRDPFLLPQEKKDLAGTAKARFSAII

SEQ ID NO: 227633 - protein, 224 aa, Zea Mays
MRAIGLEGVSTFIAGVWGTGTGSTTLTENIHTLETTKMGSRRALQLGAAVLVIFSFFGKIGALLASIPLALAASVLCFTWALIVALGLSTLRYTQAASSRNMIIVGFTLFISLSIPAYFQQYEPSSNLILPSYLLPYAAASSGPVHTASSGLNYAVNALLSINVVVALLVALILDNTVPGSKQERGVYIWTDPKSLEVDPATLEPYRLPEKVSCWFRWAKCVGI

SEQ ID NO: 227634 - protein, 123 aa, Zea Mays
MIIVGFTLFISLSIPAYFQQYEPSSNLILPSYLLPYAAASSGPVHTASSGLNYAVNALLSINVVVALLVALILDNTVPGSKQERGVYIWTDPKSLEVDPATLEPYRLPEKVSCWFRWAKCVGI

SEQ ID NO: 227635 - protein, 117 aa, Zea Mays
MIIVSLVASVDSLSSYHAASLLVNLSPPTRGVVSRAIGLEGVSTFIAGVWGTGTGSTTLTENIHTLETTKMGSRRALQLGAAVVKWASSHSQQRAELCSERAPIHQRCGGSPCRVDP

SEQ ID NO: 227636 - protein, 78 aa, Zea Mays
MLQGVHNGGLRPTRWRRVQRADILGGIGSEQEGGEGGEGLLVVRRAKNVFSGEACNDLGGEFCDASYHVDVFRELAHT

SEQ ID NO: 227637 - protein, 52 aa, Zea Mays
MPTAANPAAALPLTLDLEDFKGDFSFDALFGGLVDELLPEYRGEDDLLPEYR

SEQ ID NO: 227638 - protein, 125 aa, Zea Mays
MPTAANPAAALPLTLDLEDFKGDFSFDALFGGLVDELLPEYRGEDDAAPAPPPPPPVLGAAPPVFPAVDELLGLFKHSCKELVDLRRQIDKRLQNLKKEVAVQDAKHRKTLGEPTSQQLLVSHHH

SEQ ID NO: 227639 - protein, 416 aa, Zea Mays
MDPFSKKRKPDDNGAVTASPAGGAATLGLTREDVLRLLEPLSRDQLADIAAAAALVSAHALDAVRAAADRDPALRKLFIRGLGWETTSDSLRAIFSAYGDLEEAVVITDKSTGRSKGYGFVTFRHADSAVLALKEPSKKIDGRMTVTQLAAAGSAGGPSVGAPGSGGAPVADVSLRKIFVGNVPADMSSERLLAHFASYGEIEEGPLGFDKQTGKFRGFALFVYKTPEGAQASLVDSVKVIDSHQLVCKLAIDGKKGKQGQSQQSGPGNQQQQQQQQMLPGGPQEIQGGLGLGSQMGAQYGGPGSGGLGSVGGQVPTGLAGAGGFGPGGLGGGSFGGSSQFGAAGMGAYGGLGMGGGSMYRMQQGAGGLPAGAFGEGGNYPLPGSGFRGHDPQGGMSPPGPGGRAPPMYPNVPPYF

SEQ ID NO: 227640 - protein, 327 aa, Zea Mays
MLRLPIASSGAVQMRATRCETTPPIATTNQSITLAAPAPLLEVAQPAMACSKAVLLAALLAVAGALSSAAVWEDYDHHMYHKCYRSCMRKCDDDDADDALKNSISPVVTSVSDDHDHDDDHDHHDDHNHDHDDHHDDHDHDHHHDDHDHDHDDHDHDHNDNHGEHHDDDDEDDDYNYCRVECIEDCIDYVPGICYRHCVSYSCLYLPPSTGEQLASGDAATDAITMTIIVITTITTTTMKMTMTMTITMTTTMAQRQAHLNLNPSRNHQSQGRRPSRRCLVQRQSHRPHTTEAKYTPKLPQKPSSSSTPRTDAAQYSAVTTKTGIVH

SEQ ID NO: 227641 - protein, 87 aa, Zea Mays
MIRVGHFSRLILLWVCRLGDYVTLGGRVAIRDHVSVASKVRLAANSLVTKDIQEPGDYGGFPAVPINEWRRQIANLRLFSKKASVKR

SEQ ID NO: 227642 - protein, 191 aa, Zea Mays
MAQAMASMTGLSQGVLPSRRAANRARTAAVVRASAEAQAVHAETVKTIKIGAPPPPSGGLPGTLNSDQARDFDLPLKERFYLQPLPPAEAVARVKTSAQDIINLKPLIDKKAWPYVQNDLRLRASYLRYDLKTVIASKPKEEKQSLKELTGKLFSTIDDLDHAAKIKSTPEAEKYFAATKDALGDVLAKLA

SEQ ID NO: 227643 - protein, 852 aa, Zea Mays
MTVILRGQIFLNARALSRIAQGSQIADTNSIVSSQTVSVKSSSLQCLVIILKSLADWEQLRRDSSKQGSIVESHEEDASRRLTTDEMKNQEDGRNQFERAKAHKSTMEAAISEFNRKPSKGIEYLLSNKLVENKASSVAQFLKSNPSLDKVMIGEYLGQHEEFPLAVMHSYVDSMKFIGLKFDAAIRAFLKGFRLPGEAQKIDRIMEKFAERYCADNPELFKNADTAYVLAYAVIMLNTDAHNPMVWPKMSKSDFVRMNTASDAEECVPNELLEEIYDSIVKEEIKMKDDSHDTSKSTKRPETEERGRLVNILNLALPRLKSASDTKAESEKIIKQTQALFKNQGQKKGVFHVAQQVELVRPMLEAVGWPLLATFSVTMEEGDSKPRVVSCMEGFRAGIHLTRVLGMDTMRYAFLTSLVRFTFLHAPKEMRSKNVEALRTLLGLADTDMDALQDTWNAVLECVSRLEYITSNPSISATVMLGSNQISRDSVVQSLKELAGKPAEQIFVNSVKLPSDSIVEFFTALCGVSAEELKQTPARVFSLQKLVEISYYNMARIRLVWARIWSVLAQHFIAAGSHNEEKVAMYAIDSLRQLGMKYLERAELNNFTFQSDILKPFVILMRNTHNSKIRGLIVDCIVQLIKSKVGSIKSGWRCVFMIFTAAADDEDESIVESAFENVEQVILEHFDQVVGDCFMDCVNCLIGFANNKCTPRISLKAIALLRICEDRLAEGFIPGGAIKPIDVVPEANFDVTEHYWFPMLAGLSDLTLDSRPEVRHCALEVLFDLLNERGHKFSSPFWESIFHRVLFPIFDHVRHAGRDGLSSSGDDWLRDTSIHSLQLICNLFNTFYKISH

SEQ ID NO: 227644 - protein, 351 aa, Zea Mays
MVRQKAREPKVDGELIFAYAKIDRLSDIEEFILMPNVANLQNVGDRLYDEELYEAAKIIYAFISNWAKLAVTLVKLKQFQGAVDAARKANSAKTWKEVCFACVDAEEFRLAQICGLNIIIQVDDLEEVSEYYQNRGCFSELIALMESGLGLERAHMGIFTELGVLYARYRSEKLMEHIKLFSTRLNIPKLIRACDEQQHWKELTYLYIQYDEFDNAVTTIMNHSPDAWDHMQFKDVCVKVANVELYYKAVHFYLQEHPDLINDMLNVLALRLDHTRVVDIMRKAGQLHLVKPYMVAVQSNNVSAVNEALNELYVEEEDYERLRESVDMHDNFDQIGLAQKVEAIHCSIKER

SEQ ID NO: 227645 - protein, 213 aa, Zea Mays
MAPPAAPTALHHRTPLLLPRRTVALGATATARAARAASLAVRAQPDTTAAAVSTSAPEPAPEFKPPPGFKAPEPKRYEVKSGQVGSVLGASLAIPLRLGTGVFVLGYSPSLVSPSEIPSDQYALEFGAWKVKEESKIGQCKRPEKPIEIYEFEGCPFCRKVREMVTVLDLDVLFYPCPQKGPTFRPKVLEMGGKKQFPYMAMELFQLCYHLVC

SEQ ID NO: 227646 - protein, 536 aa, Zea Mays
MRVPPGSHAYTSAAELNAPLRGKLICCSQVPPATAPSANGDCSDFYAGGVAVYSGLLWSTPCRDLPVLLAQPRSLPVIVTYRPNWEGGQYAGEDEPRFEALLLAMELGAEYVDVEFKVADKFMKYLSGKKPQNCKLIISAYDYKTTPSVHELLNLVAQIRATGADIVKIETTAADIVDTSRMFQVLAHCHEKQVPIIGLVRKEHGFISRIICAKYGGYLTFASLENGKESTTEQPTVADLINKYKIRQIGPDTKVFGIIGNPVSHSKSPIVQNQAFRSVGFDAVFLPFLSDDLVQFLYTFSAPDYAGFSCTMPHKETALRCCDDVDPIARDIGAINTIIRRPDGKLVGYNTDYSGAISAIEDGIRAPCAASQPTDSITSPLAGRLFVVIGAGGAGKALAYGAKEKGARVVIANRTFARAQELAHIIGGTALTLSELESYHPEKGMILANATSVGMHPNVDETPLSKHALKSYAVVFDAVFVPRETRLLREAAVCGATVIDGLEMLIRLVMVQFKLFTGGMTAPERLMREAILTKTH

SEQ ID NO: 227647 - protein, 164 aa, Zea Mays
MAEAPASPGGGGGSHESGSPRGGGGGGSVREQDRFLPIANISRIMKKAIPANGKIAKDAKETVQECVSEFISFITSEASDKCQREKRKTINGDDLLWAMATLGFEDYIEPLKVYLQKYREVQGDSKLTAKSSDGSIKKDALGHVGASSSAAQGVKFSWTVPLFL

SEQ ID NO: 227648 - protein, 127 aa, Zea Mays
MAEAPASPGGGGGSHESGSPRGGGGGGSVREQDRFLPIANISRIMKKAIPANGKIAKDAKETVQECVSEFISFITSEASDKCQREKRKTINGDDLLWAMATLGFEDYIEPLKVYLQKYREMEVCGIK

SEQ ID NO: 227649 - protein, 244 aa, Zea Mays
MDGVPVKSLNAVGSLLRLVEMFTGRISSALPSSYSAVSRITGRARFFIFQPRWLVCWMKLRSLGSPANASIKSATPKIQKQSVHPVDDQQQASKQASQGTVLGDERVVGGAEVDEPVPAAAEAEQHGDGVQRGGQHGGATVGYQVGPAHDPHVARARVHAAPGHQLRQTPVLLRGGLPVQVQQVAVARVVQRRQQPRGAGRVPRRRRDQVRERHGVPRLLLLLLADAGILRRGQGRPPDGPSAR

SEQ ID NO: 227650 - protein, 192 aa, Zea Mays
MAPAALLPLAPLPHHPNPPRRPLCRCGASRRGFTVHTVIAIASVSDSASDPTAAAEATSPSPPPSLPTQTPSSKPGPPALGGIANTRSWSQYYGSGFSIRVPPSFDDILEPDDYNAGMTYYGDKAKPRAYAARFASPDRDELISVVIKPSNQLKITFLELVQKYSRLEQLKLRKRRILGHITSMNSVWTSNT

SEQ ID NO: 227651 - protein, 366 aa, Zea Mays
MKQTEVEVELRGPPVAKAFDEEGNPTKAAEGFCRKNNVSVDHLYRRIDGKTEYIYARVRESARFADEVLTEDLPTIVSGISFPKSMRWNSNIVFSRPIRWILALHGDFVVPFYFAGISSGNQSCGLRNSSLANFKVETAESYLGTVEKAGILINMQERKEKVLHASTVLAQGVGGDFIAPDSLLQEVVNLVEAPVPILGRYDDSFLELPKDVLITVANGAISKEVVRKGNEAVLRARYEDAKFFYKMDTQKKFSEFRGQLSGILFHEKLGTMLDKMTRVENTVAELALILGINERTVPIIKDAAALAMSDLATSIVTEFTSLAGIMARHYALRDSIPEEIAEALFEITLPRSSGDVFPRTDADWIA

SEQ ID NO: 227652 - protein, 414 aa, Zea Mays
MAAPRPSGGMDPRSGFCAATRTFHSLRPSAALPPDSLPATAAAYAFSILSSPLPDRPALVDAATSISVSYPSFLAAVRSLAGGLWSVLGLRPGDVVLVVSPSRIDVPVIDFALMSIGAVVSPANPASTAEEYTHMVALSRPVVALAAPEVAAKLPRNLRCVVIGSNEYKSLSSAGGVAPSPPVAVKQSDTAAVLYSSGTTGRVKAAAVSHRNLIAVISAHRNNRVIAEKEAAEAGEEPLPPTVTLFPLPLFHVFGFMMLLRSVAMGETAVLMDRFDFIAALRAIERYRVTLLPAAPPVLVAMIKSEEARRCDLSSLLFIGIGGAPLGREVAERFAAIFPNIELIQGYGLTETSGSVASTVGPDECKAYGSVGKLASHLEAKIVDPSTGEVLGPGQRGELWVRGPVVMKDDAIVY

SEQ ID NO: 227653 - protein, 74 aa, Zea Mays
MILSSPLVDQRPSTKLSRPDSVTCRSPKFQTWAWRYASRLHPAAAAQCCSQCLQPREWSGCWSRRAASGGRSWT

SEQ ID NO: 227654 - protein, 849 aa, Zea Mays
MLKIQPHSMLHLIEDDDGDNAFHIAADAAKMIRENLTWIAQMLLQPSPAVDVRNHRGWTLRDFLERLPREWIYEELMEMLEDKGVHLSPTIYEVADWVKFRRTVTSPAFGWQGAGPRSIGFVQSVVDNDHLAVSFCTGEAHVLTSEVIKVIPLNRGQHVQLKPDVSEPSIGTVLCVDDDGILRVGFPGASRGWRADPAEIERVEEYKVGNWVRIRPSLTVAVHGMESITPGSVGIVYSIRPDSSLLLGLCYLSNPWLCEPEEVEHVDPFKIGDQVCVKRSVAEPRYAWGGETHHSVGKIIDIESDGLLIIDIPNRAAPWQADPSDMEKIENFKVGDWIRVKVTVPSPKYGWEDVTRNSIGIIHSLQDDGDVGVAFCFRSKLFLCSVADIEKAQPFEVGEKVHVSPSISEPRLGWLNETAATIGAISRIDMDGTLNIKVSGRKSLWKVAPGDAERLSAFEVGDWVRPKPSIGSRPTYDWNSVGRINIAVVHSIQDSGYLELAGCFRHGKWLTHNTDIEKVQTVKIGQHVRFRAGISEPRWGWRDANPDSRGIIAGVHADGEVRVAFFGVPGLWRGDPADLEIENIFEVGEWVRLRNDVEQWRSLKPGSIGVVHGVGYQGDAWDGTIHVAFCGEQERWIGPSSQLEGVSKFVVGQRVRIRGCIRQPRFGWSNHSHSSIGTISSIDADGKLRIHTPAGARAWLTDPAEVEKVEDEEEVCIGDWVKVKDSVGTPVYQWGDVNHSSIGVVHRADDGELWIAFCFCERLWLCKAWEVEKVRPFRQGDKVRIRSGLVSPRWGWGMETYASKGEVVGVDANGKLRIKFRWRDRLWIGDPADVVLDDAHLLTEASNGF

SEQ ID NO: 227655 - protein, 371 aa, Zea Mays
MQLLMQETYSRSECSKFIKIIQERVLDSDSGDIDAGGFALTSARKASRLAVDGYSSFSPHESSPATSSLQMHGCDNSAAVGTIPKLTHTNQSPFINNAKNINPVLKRNYSVREDPYGEIRRVRPKINGNSWDISKFKQVDIIRNHPAANSREELTARNPNASRDGKKLLKDIMGASNLTYPNFISKAETADETSDVPDKPSAVTPQQHDSSFPQAGKKQKGFAATTLNQCSNEDLKKGFALKVEPLNAFIPFEQQMMDLSHRKQENAACDDSCSLSKLMLKEDIEAAPSLPTGIQVQNGSKNRRRRQPNVQKTTATPTRSPARGQRRKNNDAMVKSEMGLIEQSKLVLTEQEPELGDVPVKRPVGRPRKAR

SEQ ID NO: 227656 - protein, 138 aa, Zea Mays
MVHASDDGNVTVVAMLYRFGRPDPLLWQIQDKLAALHAEGCRADKGAPVAAGDVSLWSLRLYSHTYYRYVGSFTTPPCTENVIWSVLAQVREMTVDQAAALMAPLEQAYRRNNRPTQPRNGRVVQVYRNGFINKKTAP

SEQ ID NO: 227657 - protein, 80 aa, Zea Mays
MANIMKDFDERGHRTLPRPACSWEPPSTLSSKASLVLLFVARRDPVCEANSILYLYFSCEILNENSLLDLTLLVSQTYTF

SEQ ID NO: 227658 - protein, 80 aa, Zea Mays; identical to SEQ ID NO: 227657

SEQ ID NO: 227659 - protein, 92 aa, Zea Mays
MANIMKDFDERGHRTLPRPACSWEPPSTLSSKASLVLLFVARRYLTAHRTSQRDCSILFDPIHSQLLLPLLFPGIRSVRPIVSFIYIFHVRS

SEQ ID NO: 227660 - protein, 164 aa, Zea Mays
MAHSEGFSVPDVVPCGGRGLSSPHLHWPMVDVDEVVIQRSLWSLEALQLVEGSVASVVECLLALKDNVTTGLRQNITNNAAKTPLRRKLELEESDEPVISVMTPGRRSGEERWKGHWDSKSQQRSILHSGQKVHDAFQLKRASYTDLPPAKVSEMMHPRSIDSC

SEQ ID NO: 227661 - protein, 167 aa, Zea Mays
MAHSEGFSVPDVVPCGGRGLSSPHLHWPMVDVDEVVIQRSLWSLEALQLVEGSVASVVECLLALKDNVTTGLRQNITNNAAKTPLRRKLELEESDEPVISVMTPGRRSGEERWKGHWDSKSQQRSILHSGQKVHDAFQLKRASYTDLPPAKVSEMMHPRKCPYSITS

SEQ ID NO: 227662 - protein, 218 aa, Zea Mays
MDPRARYPSGMGNGRGGNLNYYGRGPPPQQPHQHHNHQQTSGAHHHQQTSGAHHHQQYAQRQHQHQHHGHNRHQQQQQHHIYQQQQQQWLRRSQIARETSGAAVTSEPKSLAPSTAADGVDSSYTGTVLIHMCSSQDWKAQLKLPPPDTRYRTEDVTATKGNEFEDYFLKRELLMGIYEKGFERPSPIQEESIPIALTGSDILARAKNGTGKTAAFCI

SEQ ID NO: 227663 - protein, 226 aa, Zea Mays
MIKNTVATLMVRLHHLPLPRAAPAPTYRCGRHLALAPPLPRLRASAAVMSTAAEQTIADQKRTLRAEVRRALKALSADQRASEDLAIQTTILDSSWFKASKRLCAYISCQQLREVDTSKILAECLPSNPGQEELAKDLYVPRVEDKNRNMRMLKITTMDDLVKNSMNILEPSPVDATGNNREDVLSSLSPVDLFLLPGQAFDRTGRRLGRGGGYDYIVKLHLPVRN

SEQ ID NO: 227664 - protein, 214 aa, Zea Mays
MIKNTVATLMVRLHHLPLPRAAPAPTYRCGRHLALAPPLPRLRASAAVMSTAAEQTIADQKRTLRAEVRRALKALSADQRASEDLAIQTTILDSSWFKASKRLCAYISCQQLREVDTSKILAECLPSNPGQEELAKDLYVPRVEDKNRNMRMLKITTMDDLVKNSMNILEPSPVDATGNNREDVLSSLSPVDLFLLPELVEDWGVVEGTMTHSC

SEQ ID NO: 227665 - protein, 224 aa, Zea Mays
MIKNTVATLMVRLHHLPLPRAAPAPTYRCGRHLALAPPLPRLRASAAVMSTAAEQTIADQKRTLRAEVRRALKALSADQRASEDLAIQTTILDSSWFKASKRLCAYISCQQLREVDTSKILAECLPSNPEELAKDLYVPRVEDKNRNMRMLKITTMDDLVKNSMNILEPSPVDATGNNREDVLSSLSPVDLFLLPGQAFDRTGRRLGRGGGYDYIVKLHLPVRN

SEQ ID NO: 227666 - protein, 415 aa, Zea Mays
MFGLAKLLTGCKSYDEFLQLSQKGDNFVLDLIVKDICGELVCQKQGLSTSTLASSFGKVITSKKKLTDYKPEDLASTLLSAFTYNIAQSQMQAVFLRHEGYLGALGALMSYGDPSGENLTLEEKEPHHESAPVDGTSADEESDSNIFPYLLVNIGSGVSMIEVIGKGKFERIIGSHLGGGTILGLARLLTGCSSYEEFLELSQRGNNLSVDLTVGDIYGEEGYPKIGLPASTTAASFGKVNSSKLSEYKVEDLAAALLNSFTYNIGQIAYFVANLSGLKRIFFRGAYVCGHEKTMDKISRSLKYWSKGEVQTTFLCHEGFLGTLGAFWSYENMGIDSLAAHEVIREVLLGAPYTGQFPSLPVTQQQENGEHGTLEGEVESLRHDNALLKAEVERLQKENALLRAKLVRSGETSTL

SEQ ID NO: 227667 - protein, 602 aa, Zea Mays
MEQDQSVVVGSADSGAAAFGFATGNPPSLAVTGGSAVAPDGGAQAADASAYQAEHTALNGTVGDMGNYPSTGAAENGEAVPNETGEPVPELSYEEAVLSAEEARLWSVVTANSLDFNAWTALIEETEKNAENNILKIRKVYDSFLAEFPLCFGYWKKYADHEARLDGVSKVIEVYERAVLAVTYSVDIWYNYCQFAISTYDDSDIIRRLFERGLAYVGTDYHSNILWDEYIKYEESLEAWSHLADIYTRVLEHPIQQLDRYFNCLKELASKHSLSEILTAEEASLYVVTSETTAQAPDGEAHPDDVDKLGQPEISSSTDAESLAKYVSMREEMYRKAKEYESKIIGFELAIRRPYFHVKPLDNPELENWHNYLDYIEKEEDINKVIKLYERCVIACASYSEFWIRYVQCMEDKRSLDLANNALARATHVFVKKQPEIHLFSARFKELNGDIFGARAEYQHLYSDLCPGFLEAIVKHSNMEHRLGDKELSCSVYEKVIAAEKGKEQSQLLPTLLIQYSRFLFLAIRDLEKAREILTVLHEQLNLTKPVLEAVIHLESIFPCEKRIEFLDSLVEKFVTPESSQGELASLVDKEEISSIFLEVTQ

SEQ ID NO: 227668 - protein, 387 aa, Zea Mays
MEQDQSVVVGSADSGAAAFGFATGNPPSLAVTGGSAVAPDGGAQAADASAYQAEHTALNGTVGDMGNYPSTGAAENGEAVPNETGEPVPELSYEEAVLSAEEARLWSVVTANSLDFNAWTALIEETEKNAENNILKIRKVYDSFLAEFPLCFGYWKKYADHEARLDGVSKVIEVYERAVLAVTYSVDIWYNYCQFAISTYDDSDIIRRLFERGLAYVGTDYHSNILWDEYIKYEESLEAWSHLADIYTRVLEHPIQQLDRYFNCLKELASKHSLSEILTAEEASLYVVTSETTAQAPDGEAHPDDVDKLGQPEISSSTDAESLAKYVSMREEMYRKAKEYESKIIGFELAIRRPYFHVKPLDNPELENWHNYLDYIEKEEDINKVFA

SEQ ID NO: 227669 - protein, 340 aa, Zea Mays
MEQDQSVVVGSADSGAAAFGFATGNPPSLAVTGGSAVAPDGGAQAADASAYQAEHTALNGTVGDMGNYPSTGAAENGEAVPNETGEPVPELSYEEAVLSAEEARLWSVVTANSLDFNAWTALIEETEKNAENNILKIRKVYDSFLAEFPLCFGYWKKYADHEARLDGVSKVIEVYERAVLAVTYSVDIWYNYCQFAISTYDDSDIIRRLFERGLAYVGTDYHSNILWDEYIKYEESLEAWSHLADIYTRVLEHPIQQLDRYFNCLKELASKHSLSEILTAEEASLYVVTSETTAQAPDGEAHPDDVDKLGQPEISSSTDAESLAKYVSMREEMYRKAKEA

SEQ ID NO: 227670 - protein, 276 aa, Zea Mays
MLVRLSVRSVHKLQLSVQPIMTLINFILQKKSAQIQGRSYRHRIATYQNDFSHAYTCGKSPFPPLDGFIESIASFGNVSGKIRSWFWFSQESLIIYNMLRSRYCENIGREHKGNHVFYIVDFQRAAYYQKCHDPDCRGYRSPLRPVPWDVIPELVESDQIEYQGHAMETNIENSSMSGKSITGAGAEDPEWWEQVVEFADSIENMDHSLATLEVKSDASIENMDHAPSLCASEENGCFEADPEWVMHAERAMEQYEEQSGGSQSHATSQVFDLEDV

SEQ ID NO: 227671 - protein, 206 aa, Zea Mays
MDTAVYSRNRCFRLVFSSKSGKKSFLVPTKRFKCQELNDKDVFMESLICRLDDNCEKLLICKLDLECKKTLHFDSEISMSQIQGRSYRHRIATYQNDFSHAYTCGKSPFPPLDGFIESIASFGNVSGKIRSWFWFSQESLIIYNMLRSRYCENIGREHKGNHVFYIVDFQRAAYYQKCHDPDCRGKRGPSLQRRQIILSHDMNVLE

SEQ ID NO: 227672 - protein, 185 aa, Zea Mays
MEMIDAELRLGPPGSNNSDVVVTVVPPAAARKPAAPAPASAAKRPSSSVVKSDDASGTGDHDDDAAPASKVRAVGWPPVRAYRKNAFHAAAEAARRTNNKGEELQGGGGRLYVKVSMDGAPYLRKVDLRTYGGYRELRDALDALFGCFSSSSASSSSADGGCQFAVAYEDKDGDLMLAGDVPWES

SEQ ID NO: 227673 - protein, 114 aa, Zea Mays
MDQEKKLEVSNTSHTYKHHCSVGVDVHEIFVKRSRLRVVLSYIGIIFLLVNACQPLLTKESLSLGSVWNITFAVLVAKCLQYKPVKRESVVIMPAFGIQLEIHFWRSILETLLA

SEQ ID NO: 227674 - protein, 124 aa, Zea Mays
MEGFHSRFLKIYLELPPIVQPLQMEEDLEQLKVLENSYRMKVIKVEQNARGVDAPEAPRVTDPSSDRRCTSVARIHDNELEAGLRVPGPIEHIYDRTLFMTGSEAVRRMVHQVGTGGHQSPLAS

SEQ ID NO: 227675 - protein, 171 aa, Zea Mays
MSVSLMGTMPALRPSDRNCRSSRFTPCPPGKTESPRTADRPELAGSDRPSHRATTECTPSHPIKTLARITVPSSNPRTTVTDESPAARSVSMETTLDEKRTVPGGSSSASASSSAFLSSALTLTSSPLVVFFKKKMFSSAKKPGISNQNHTKSDEFLELHGSLVAAANVAP

SEQ ID NO: 227676 - protein, 322 aa, Zea Mays
MLVFSAFWTIGTIFEASLAWVVLSRLSWRWLLAFTSLPCFALLVFFVVAPESPRYLCAQNRISDATLVLERMSRTNKAALPPGALAYHHTETQLGLGESTTDDASKSGSGGMAALRRLFSRKLLRSTLLIWFVWFANSFAYYGLVLLTSQLSDANRRCASSSAHKSQAHEGNPNLYKDVFITSLAEFPGLVISAIIVDWLGRKATMWILLFGCCGFLGPLAVHQKESVTTALLFGARACGMGSSTVLCLYAPEVYPTSARSTGVGIATAIGKIGGIVCPLIAVGMLRSCHQMQAVLVFELVLGLAGVACILFPVETKGREMK

SEQ ID NO: 227677 - protein, 58 aa, Zea Mays
MVVALVDMERAFVPPQHFIRLVQRRMERQRREDELRNRSSKKTQEAEQSTSKRSPNRC

SEQ ID NO: 227678 - protein, 63 aa, Zea Mays
MVVALVDMERAFVPPQHFIRLVQRRMERQRREDELRNRSSKKTQEAEQSTSKRLQYILALVVD

SEQ ID NO: 227679 - protein, 74 aa, Zea Mays
MTRSLTLLSSTELMILYTSYKSYKNSLSSCLLVISMSTSQVKDDGALASRKERKKHIYGIHTMIPVSVCVSCRR

SEQ ID NO: 227680 - protein, 222 aa, Zea Mays
MLHLIIEACISRKLIDTSAYLWPGYVVPSGTLKDTALPQESPWLNFMKGSRHSGPLIDALVASPASRCFKLCKMRSVQFGQKGIPYLNTYDGCTILYPDPLIKANDTIKIDLETNKIMDFFKFDVSNVVMVTGGRNTGRVGVIKNWEKHKGSFEQLAGPDAAQHARASGAGAAGETEIQTHRSRSFARQGPAAQPAEPPEDLQGEEEPVVAREQGYATEEAH

SEQ ID NO: 227681 - protein, 311 aa, Zea Mays
MENTKLSSALFAGTHFDRKRFAADFARFRKGPALPSAATPSAPSPEKKRKRKSGKAKAKKNKKRAQDAAAAASSDFVEGFSVFKGLADNNAELRSEKVDMRKDDDSVAVRRRKEIEREFERAAVLRKRFDIHIAGQNAPAPLESFEELISRYGCDSYLVGNLSKLGFQEPTPIQRQAMPILLSGRECFACAPTGSGKTLAFLFPLLMKIKPGSKGGVKAVILCPTRELAAQTVRECKKLVKGRKYYIKLMTKELSKSGNFKDMHCDILVSTPLRLDHAVKKRDLDLMWNTLSWMNLINFLSLDLLKWLIQL

SEQ ID NO: 227682 - protein, 1838 aa, Zea Mays
MGDGGVACAVRSVESFRAGALVRRGGAGEAMPDKGERAHGHRHQHQHWKNQQSATAADLEEGELLNGEAGTNGLPERSMPPKKWRKVLAASAAAVEVEPGEIVSTKQAVPLKKERRNGDVEKVELLPERQRKEKSSGKSTRKSIKDDVEPGEIALPGKRRDAKSQLAHDNSRRPSSSAQKGSLRDSDEEPGEIKPESGISGSVRKNRPTEPHSSNHKHHTDTSDQSGSKHRRKGEGKSSSAARHLSGRIREVSPPTRDRRDKHERSPGILGRFPHDRFRHDRYDRSPSRLERSPHRTRHYDSRDRSPYISPRHRARPPQFRDNTPSRVDNSPRGRVQHEDIRDRSPFRHDRSPSERCRPTDTHEASKKSRSSNNSEKSHHKSKSAKQSSKIKSGSNGKNEEKISKEKHTESSQYTELPPPPPLPLPPPPPPPPPPPPLPPAVPPPLPPSPEPEPPGVLAEDMIEDMDICDTPPHTSAVPEPTEPICDIGRWFYLDHFGIEQGPSKLAELKKLVQDGYLLSDHLIKHADSNRWVTVENAASPLVPSDFPSLYSDTSTQLVNPPEAPGNLLDEALEEASNLASGAEDKQMEETSAEDSEEFCIDDRVEALMDGSILVHGQELEIIGDFTRLNVHTEVNNEINGGTENRATDAYGLVSVEKNFHHNAESSEWFSGRWSCKGGDWRRNDELSQDTPFRKKLVLNEGYPLCQMPKGSCEDPRRPCKDELYYPVRAKKYELPLWAFSLTEEDIDSVNDTTKSGVVPGRPGQTRQPSRGVKGMMLSVVRINSRVVKDQSSVEPHTKPRGTDRPLSRSSRSHSIGAERSSVHEGSSHFRKHHDHDSQSSHKSKPVPNIPKDRVCTVDELSVYRGDWYYLDGTGHEHGPFSYSELQELVKNGTIIEQSSVFRKIDNTWFPVLKDLKPGSSVPSAARSSSFTAALMLPDQYNFGVNQGSGSFNQLHPQFVGYTRGKLHELVMKYFKSRELTLAINEVLDPWISAKQPKKEFEAYFSHNSASRNLLPEDGGSAKKAKLLPDQSDEDIHLSQDILASRKEDICFDELCDAEPSVDNDSLNPGAGNETWGLLNGHVLARIFHFMRADVKALISSAATCRSWNAAVKYYRNMCRFIDLSSVGPLCTDSVFCDIMAGYEKQNIRTLILAGCSNLSSHALGRVLEQLPQISYVDIHGCGHLGDLKNKFQHVKWIRSSLNPEESYRKIKTLKQIGDGNNYASKVARNFTNHLDGSDELDGYFADISNRENANLSFGQGFYKRSKLLDARKSSAVLSRDAEMRRLMQRQAETSYRKMEEFIINRLREIMRSNRFDFFIPKVSKIEGRLKNGYYARHGFRTIKHDIRTMCQDALRYKDGNDSGDIKQIVVSFIQLAKRLGNPRYISDRYGAGAQDSLDINQYSFDTKLKKKQNKIRGANSLAAGADNSSRAFDLEIKRSLSKLKKKDVYSGSETSDDDDGYSEVDETESETTVSDTESDLDVNSGAWDLKGNSLKLIEPGESVTDDRILGARMTKASLVPPVTRKYEVIEEYLIVADLEEVQRKMRVALPDDYSEKLLSQKNGTENLELPEVKDYQPRKVAGDEILEQEVYGIDPYTHNLLSDIMPADLELSPTDKHIFIEELLLNTLNKQVRHFTGSGNTPMTYNLRPVIEEIQRSAEDNGDRRTSKMCLGMLKTMRNRSEQNFVAYRKGLGVVCNKKGGFGVDDFVVEFFGEVYPSWRWYEKQDGIKHIQNNSEDQAPEFYNIMLERPKGDGDGYDLVFVDAMHKANYASRICHSCNPNCEAKVTAVNGKYQIGVYTLRPIAEGEEITFDYNSVTEKSMKHQSASVEVKYAVAAI

SEQ ID NO: 227683 - protein, 113 aa, Zea Mays
MYWQVLKLMYHAPVTSSYHQSTWAKIGRIVNPYIHRYAPFLQTPISAIQRWWFRILEGHYHNKKVFSCRATNAELQNSAKMFRVFFLLGTDACLRRFACNLCFNGGVYIMFVR

SEQ ID NO: 227684 - protein, 124 aa, Zea Mays
MRRPPTSRARSSPPRIRYASTQSRHTSNPRAAAIAVAARRRRHRASLAGAHPATGPLPEWADAATVGWTHDKAASTRPTPSPLAVRATHQLAPAGSWQPPESRGGEAGADHADEQLTVTLAAVP

SEQ ID NO: 227685 - protein, 593 aa, Zea Mays
MDLLFSFIKPDHPHSTLLAGYFSKVVICLMLRKTAPLMNYVQEHPDIVVQLVDLIGITSIMEDSPEVHANAAEILSAVTRCAPPALAAKICSPSFVGRLFHHALDESRPKSVLVHSLSVCISLLDPKRLASVSYQAFRSNLTHGTLVTASPETVDGILESLGDLLKLLDITSSQNVFPTTYGCLCPPLGKHRLKIVEFISVLLTIGSEIAEKKLISQSVIKHCIDLFFQYPYNNFLHHHVENIIVSCLEVKRNQLIDHILNDCGLVGKVLAAEKSSSLAVESNGPTLPSEGKEPPRIGNIGHITRIANKLIQFGNSNSMIQSHLQENSEWAVWQIDVLIKRNEVENVYHWACGRPTSLHDRGRDSDDDDFRDRDYDVAALTNNMSQAFRFGIYRNDDIEEAQGSHERDDEDVYFDDESAEVVISSLCLGDDQDSSSLFTNSNWFTFDGDRGINDRLAASVPPSSPDSEAISLNTENTDEALTGETTGGTESLRESASLANELAEVANDNDADATDGEKILCTEEDSQASEGPVDAKEDKTGGASKAANESVPDNALPESHHTDCRCADSSESGTEEDVEIDDEKKSETAMTNE

SEQ ID NO: 227686 - protein, 128 aa, Zea Mays
MHASGNNAPKAQGNVSAKNRSSSKPPLGKPNRKDHRKRNRPEDDELDPMDPSSYSDAPRGGWVVGLKGVQPRAADTTAAGPLFQQRPYPSPGAVLRKNAEVATHGKKRGGMAPITKRGDGSDGLGEAD

SEQ ID NO: 227687 - protein, 313 aa, Zea Mays
MSIEEADLLIRKRARQSDIAASYVKVVDEEGINSLHKGDDRPSLSPKAYINGYAASFRNGLGFNNGNGIYSGEQGFAIGGEERLSRSNADPFKNGLGFNNGNGIYSGEQGFAIGGEERLSRSNGYLSELVAAAYVCHGGVQRVHIIDGCVDGSLLLELFTRDGAGTMIARDVYEGTRMATAEDLPGIRKIIRPLEDSGVLVRRTDAQLLEALESFYVVERDGSIIACAALFPFPEEQSGEVAAIAVSEECRGRDYVEKMALSLGLKKLFLLTTRTADWFVRRGFSECSIGSIPEQRRKRINLSRGSKYYIKQL

SEQ ID NO: 227688 - protein, 841 aa, Zea Mays
MSRKPLLPTCGSSTPPPLLLLRRFLPRRRATSSPPPPSTRRRTAAMPPRAGDSAAAAAAAASFRLGMVRVVSFLVGGLNLAVLLLGLYIIDAVLPSGCGGGLAFASAPALAGVRVLSMIGAARAQHATADAIAKRHLHESDASVAADAVARHEIRVRYKRWLWWTRFGMAVGALQLVAAIYLMFVIVRDLSNERRSTSCFFGQDKADRVSVRALIALFLILSWVVIIVQCFTGSDILRWRSFYATHDMAWKAHYREVFDHGIREALCCLGRAKYLTVLEEDEVYSVARLLGDLVAYRASGTGHLELLAGLALLQKHGNLSELQTDLVEASHELMQEAAFLHPFAEACYTGPLLDFGRNPILFPCAWVYRQGVLTPWARRRRPALDGDNWWRGHAAAFLRFVNIPPKALLKGRVCQSKREAAYFVVVLHDKRTVVIGVRGTETPEDLITDGLCRECAFTMEDLDGLVNSEQLPATTRERVISTFPHYGHGGIVESARELFMQLNGENTSSGRLGFLSTLLGEGSECHGYKVRLVGHSLGGAVATVLGMMLYGKYPSVHVYAYGPLPCVDFVIAEACSHFVTTIICNDEFSSRLSINSILRLRSAAISALSDNSPADTAMIQKLARRILHVNRYHDNGPDDGIIQGYADHTRTADTTVPNERQISHQIPLCNTELDLHNTQNGFFRYNGSSASIDEHLSYEGISSGHDMQIIPLDGADSGFEGHQTSYREIPVEPPEMFLAGLIVHIVRQRRSLFPLWKCWSIQETEPPYKAVLAKRENFRDIVVTPYMFTDHLPWRCSCFYYTCLTIRTVLDGVLIFFNCAFFSGTSLPLVSSLESPSLVSD

SEQ ID NO: 227689 - protein, 630 aa, Zea Mays
MKEDPLPASLDKADRVSVRALIALFLILSWVVIIVQCFTGSDILRWRSFYATHDMAWKAHYREVFDHGIREALCCLGRAKYLTVLEEDEVYSVARLLGDLVAYRASGTGHLELLAGLALLQKHGNLSELQTDLVEASHELMQEAAFLHPFAEACYTGPLLDFGRNPILFPCAWVYRQGVLTPWARRRRPALDGDNWWRGHAAAFLRFVNIPPKALLKGRVCQSKREAAYFVVVLHDKRTVVIGVRGTETPEDLITDGLCRECAFTMEDLDGLVNSEQLPATTRERVISTFPHYGHGGIVESARELFMQLNGENTSSGRLGFLSTLLGEGSECHGYKVRLVGHSLGGAVATVLGMMLYGKYPSVHVYAYGPLPCVDFVIAEACSHFVTTIICNDEFSSRLSINSILRLRSAAISALSDNSPADTAMIQKLARRILHVNRYHDNGPDDGIIQGYADHTRTADTTVPNERQISHQIPLCNTELDLHNTQNGFFRYNGSSASIDEHLSYEGISSGHDMQIIPLDGADSGFEGHQTSYREIPVEPPEMFLAGLIVHIVRQRRSLFPLWKCWSIQETEPPYKAVLAKRENFRDIVVTPYMFTDHLPWRCSCFYYTCLTIRTVLDGVLIFFNCAFFS

SEQ ID NO: 227690 - protein, 627 aa, Zea Mays
MVYNLGQDKADRVSVRALIALFLILSWVVIIVQCFTGSDILRWRSFYATHDMAWKAHYREVFDHGIREALCCLGRAKYLTVLEEDEVYSVARLLGDLVAYRASGTGHLELLAGLALLQKHGNLSELQTDLVEASHELMQEAAFLHPFAEACYTGPLLDFGRNPILFPCAWVYRQGVLTPWARRRRPALDGDNWWRGHAAAFLRFVNIPPKALLKGRVCQSKREAAYFVVVLHDKRTVVIGVRGTETPEDLITDGLCRECAFTMEDLDGLVNEQLPATTRERVISTFPHYGHGGIVESARELFMQLNGENTSSGRLGFLSTLLGEGSECHGYKVRLVGHSLGGAVATVLGMMLYGKYPSVHVYAYGPLPCVDFVIAEACSHFVTTIICNDEFSSRLSINSILRLRSAAISALSDNSPADTAMIQKLARRILHVNRYHDNGPDDGIIQGYADHTRTADTTVPNERQISHQIPLCNTELDLHNTQNGFFRYNGSSASIDEHLSYEGISSGHDMQIIPLDGADSGFEGHQTSYREIPVEPPEMFLAGLIVHIVRQRRSLFPLWKCWSIQETEPPYKAVLAKRENFRDIVVTPYMFTDHLPWRCHFAMQKIVEAQTPMRRAHSDPPVQQHLV

SEQ ID NO: 227691 - protein, 356 aa, Zea Mays
MVYNLGQDKADRVSVRALIALFLILSWVVIIVQCFTGSDILRWRSFYATHDMAWKAHYREVFDHGIREALCCLGRAKYLTVLEEDEVYSVARLLGDLVAYRASGTGHLELLAGLALLQKHGNLSELQTDLVEASHELMQEAAFLHPFAEACYTGPLLDFGRNPILFPCAWVYRQGVLTPWARRRRPALDGDNWWRGHAAAFLRFVNIPPKALLKGRVCQSKREAAYFVVVLHDKRTVVIGVRGTETPEDLITDGLCRECAFTMEDLDGLVNSEQLPATTRERVISTFPHYGHGGIVESARELFMQLNGENTSSGRLGFLSTLLGEGSECHGYKVRLVGHSLGGAVATVLGMMHYLQ

SEQ ID NO: 227692 - protein, 477 aa, Zea Mays
MQEAAFLHPFAEACYTGPLLDFGRNPILFPCAWVYRQGVLTPWARRRRPALDGDNWWRGHAAAFLRFVNIPPKALLKGRVCQSKREAAYFVVVLHDKRTVVIGVRGTETPEDLITDGLCRECAFTMEDLDGLVNSEQLPATTRERVISTFPHYGHGGIVESARELFMQLNGENTSSGRLGFLSTLLGEGSECHGYKVRLVGHSLGGAVATVLGMMLYGKYPSVHVYAYGPLPCVDFVIAEACSHFVTTIICNDEFSSRLSINSILRLRSAAISALSDNSPADTAMIQKLARRILHVNRYHDNGPDDGIIQGYADHTRTADTTVPNERQISHQIPLCNTELDLHNTQNGFFRYNGSSASIDEHLSYEGISSGHDMQIIPLDGADSGFEGHQTSYREIPVEPPEMFLAGLIVHIVRQRRSLFPLWKCWSIQETEPPYKAVLAKRENFRDIVVTPYMFTDHLPWSSSPSLLAKLLVMIVV

SEQ ID NO: 227693 - protein, 563 aa, Zea Mays
MAWKAHYREVFDHGIREALCCLGRAKYLTVLEEDEVYSVARLLGDLVAYRASGTGHLELLAGLALLQKHGNLSELQTDLVEASHELMQEAAFLHPFAEACYTGPLLDFGRNPILFPCAWVYRQGVLTPWARRRRPALDGDNWWRGHAAAFLRFVNIPPKALLKGRVCQSKREAAYFVVVLHDKRTVVIGVRGTETPEDLITDGLCRECAFTMEDLDGLVNSEQLPATTRERVISTFPHYGHGGIVESARELFMQLNGENTSSGRLGFLSTLLGEGSECHGYKVRLVGHSLGGAVATVLGMMLYGKYPSVHVYAYGPLPCVDFVIAEACSHFVTTIICNDEFSSRLSINSILRLRSAAISALSDNSPADTAMIQKLARRILHVNRYHDNGPDDGIIQGYADHTRTADTTVPNERQISHQIPLCNTELDLHNTQNGFFRYNGSSASIDEHLSYEGISSGHDMQIIPLDGADSGFEGHQTSYREIPVEPPEMFLAGLIVHIVRQRRSLFPLWKCWSIQETEPPYKAVLAKRENFRDIVVTPYMFTDHLPWSSSPSLLAKLLVMIVV

SEQ ID NO: 227694 - protein, 366 aa, Zea Mays
MEDLDGLVNSEQLPATTRERVISTFPHYGHGGIVESARELFMQLNGENTSSGRLGFLSTLLGEGSECHGYKVRLVGHSLGGAVATVLGMMLYGKYPSVHVYAYGPLPCVDFVIAEACSHFVTTIICNDEFSSRLSINSILRLRSAAISALSDNSPADTAMIQKLARRILHVNRYHDNGPDDGIIQGYADHTRTADTTVPNERQISHQIPLCNTELDLHNTQNGFFRYNGSSASIDEHLSYEGISSGHDMQIIPLDGADSGFEGHQTSYREIPVEPPEMFLAGLIVHIVRQRRSLFPLWKCWSIQETEPPYKAVLAKRENFRDIVVTPYMFTDHLPWRCHFAMQKIVEAQTPMRRAHSDPPVQQHLV

SEQ ID NO: 227695 - protein, 314 aa, Zea Mays
MEGDEMLRVKLGRQGLEVSKLGFGCMGLTGVYNAPVPDQAGIDIIKHAFEAGITFFDTADAYGPHTNEVLLGKALKHFPREKVQIATKCGIAGFDASGMRVKGTPDYVRACCEASLQRLATDYIDIYYQHRIDQSVPIEETMGELKKLVEEGKVRYVGLSEASADTIRRAHAVHPITAVQLEWSLWTRDIEEDIIPVCRELGIGIVPYSPLGRGFFAGRAAVERVPSESLLSKHPRYSGENLEKNKVLYTRLEMLSKKYGCTPAQLALSWVLHQGEDVVPIPGTTKAKNLDENIGAVKAIISSSYRKQRCADSE

SEQ ID NO: 227696 - protein, 381 aa, Zea Mays
MKLNDHQIVLLLSSIWSQASLDDNLPANFEAMGLVYSIALLCSKPKSSSHVTRIRCFQLAFSLRRNSLSPESDLKPSRRRCLYTMASAMLIFSAKIADLHQIIPLVKAAAPEKMVDPHLRLMDDCQLVNTSAESSNSEMVYGSEEDESDALAFLSAINKPDTELIETVMCHFREKFENLPEVNGIEEQLLQEFSLDDSFPLGAPLFMEMPHSCSMYAEKDEECFDEDTVPSELDDDDIIFEHSGSQSDRKTSGSMASSDVLTVNQLIESVHETARQVANVPVPANPVPYDQMKSQCEALVMEKQQKMSVLLSLKHSRTDSHGSAGVDGLETNESSLLSEPELQSTRKGRMRRCDSASSESDCSFRLPPASPYDKFLKAAGR

SEQ ID NO: 227697 - protein, 460 aa, Zea Mays
MISIFLAKSCQMRNPKEVEKTEYNEFYKKTFNEFLDPLAYTHFTTEGEVEFRSVLYVPGMAPLSNEEIMNPKTKNIRLYVKRVFISDDFDGELFPRYLSFVKGVVDSNDLPLNVSREILQESRIVRIMRKRLVRKTFDMIQEIAEKDGKEDYNKFWESFGKFMKLGCIEDTGNHKRLAPLLRFYSSKNETDLISLDQYVENMPENQKAIYYIATDSLQSAKTAPFLEKLVQKDIEVLYLIEPIDEVAIQNLQTYKEKKFVDISKEDLELGDEDEDKEKESKQEYTLLCDWIKQQLGDKVAKVQISKRLSSSPCVLVSGKFGWSANMERLMKAQTLGDTSSLEFMRGRRIFEINPDHPIIKDLNAACKNEPESTEAKRAAELLYEAALISSGYTPDSPAELGGKIYEMMTMALGGRWGRLETEEAEVIASIDDADSSEGATTTTEVVEPSEVRTESDPWKD

SEQ ID NO: 227698 - protein, 127 aa, Zea Mays
MASEKKQSNPMREIKVQKLVLNISVGESGDRLTRAAKVLEQLSGQSPVFSKARYTVRSFGIRRNEKIACYVTVRGEKAMQLLESGLKVKEYELLRRNFSDTGCFGFGIQEHIDLGIKSCLVCLLSCE

SEQ ID NO: 227699 - protein, 61 aa, Zea Mays
MSLSYFCCISISKADSTDHSDFLFPPVLSASNKLGCKAYVFDVRSVNFPDIVATLRFHIFI

SEQ ID NO: 227700 - protein, 590 aa, Zea Mays
MPDNTQPMQYGIEEEEVPYTDERITSLCSSVQLLLEQGGNFVVSAPNMAHLCHRFTVGCFVATAQMVTQAQPEFIDLGHGPAPSGFVNHRIRSSGQESCCGCSVRAVEAAACQFGFTTKPLASSLPRPSAQPCPAPSDANSQLRCSFRSSELRNRAKHPSLRRVKPSKLPRFIPFPPPIPRLSPQLRPSVSEAPPPTWPPSAPMALPYLEAVLCFMIFMYIFETYLDIRQHRALKLPTLPKPLLGVISDEKFERSRAYSLDKSYFHFVHEAVTILMDTTILYYRVLPWFWKKSGELVTSVGLSAENEIIHTLAFLAGSMVWSQITDLPFSLYSTFVIEARHGFNKQTIWLFIRDMIKGILLSMILGPPIVAAIIYIVQLPEGVLREKIEKLAASLKFPLKKLFVVDGSTRSSHSNAYMYGFFKNKRIVLYDTLIQQCSNEDEIVSVIAHELGHWKLNHTVYSFVAVQLLMFLQFGGYTLVRSSKDLFGSFGFKDQPVIIGLIIFQHTIIPIQHLLSFCLNLVSRAFEFQADAFAKNLGYAPQLRAALVKLQEENLSAMNTDPWYSAYHYSHPPLVERLQALEDSDSKKED

SEQ ID NO: 227701 - protein, 57 aa, Zea Mays
MASRLLAPRTLSSPLSSLPGCEQCSYLATSMPRAAEGETGQRAVIQAAGAIAADTSS

SEQ ID NO: 227702 - protein, 202 aa, Zea Mays
MMGARPRRADREDSVRRTVYVSDVDQHVTEQKLAEVFSTCGQVVDCRICGDPNSVLRFAFIEFADDVAAQAALALGGTVLGFYPVKVLPSKTAILPVNPKFLPHTDDEKEMVSRTVYCTNIDKKIAEDEVKQFFEGTCGEVSRLRLLGDYVHSTCIAFVEFVQADSAILALNCSGIVLGTLPVRVSPSKTPVRSRSPRVTSY

SEQ ID NO: 227703 - protein, 391 aa, Zea Mays
MDHLISTIVQWFERRSKAFEPTYLYGVEKGYFLLSEGAKTRHGVRTINITISARNPCFGNRWQQLLINSIVGYDTILTNSLVNSPGHGYLYNFQTKELYDLSYGHEPPEGPTRFGDYFVTKCGVLLMSLFVFFTTTMSVSFTLRETQSRMLRFTVQLQHHARHHLPTFQLIFVHVIESLVFVPIMIGILFFLFEFYDDQLLAFLVLTLVWLCELFTMISVRTSISMQFFPRFFLLYFLVFHIYFFSYTYGFSYLAFSATAAFMQHLILYFWNRFEVPALQRFMRSRAHIHQQTDALLVQDESTRSQQEGQQNGISEPAANNALQYQEQNPQRAGSTPAGSGSLNPFGSLLLWLLGGGASDGIVSFFSMFRDVRDHGQDYTDPPRNGNDQVT

SEQ ID NO: 227704 - protein, 514 aa, Zea Mays
MDPEQTFLRVHARLSGTLSQLLTPRIRLVLEYLYLAGAVALFCLLVVMHTNFVQQPGCSSEFSGIEFGEAQLVQIKIISGGLWSSRGASYIMDLQNLGRSAEKILEVNGDKFNILASKFWSTWVGPGARRSLPDLKAAGEGSVHHPLSAKESFKAAVTFLFRKWYLRAVSFWKNIKQLSENTLQLMVRSNWNDFLHIIKDLQLPSMDHLISTIVQWFERRSKAFEPTYLYGVEKGYFLLSEGAKTRHGVRTINITISARNPCFGNRWQQLLINSIVGYDTILTNSLVNSPGHGYLYNFQTKELYDLSYGHEPPEGPTRFGDYFVTKCGVLLMSLFVFFTTTMSVSFTLRETQSRMLRFTVQLQHHARHHLPTFQLIFVHVIESLVFVPIMIGILFFLFEFYDDQLLAFLVLTLVWLCELFTMISVRTSISMQFFPRFFLLYFLVFHIYFFSYTYGFSYLAFSATAAFMQHLILYFWNRFELSRDSCEVEHTFTSKQVSTLHPQLSTLLPYTLLG

SEQ ID NO: 227705 - protein, 277 aa, Zea Mays
MELEEAVPPAAMVGEDNAAAPTQDFGLPAELIAVLPSDPFAQLDVARKITSIALSHRLGLLEAEAARLRSQLAERDAEAEDLREHVEQLDAALAVATGRLRHAEEEKDALQRDNSELSNTVRKLNRDVAKLEVFKKTLVQSLQEDDSSDNTAPRERAAAASNFSSAPSDEDSAFSTSKSSQVSETASSVSEENNQVDPDAPRRPPRPHVFLQSYNSTPRMTPPDSPPRRFASAFLVSIALHLTLQVKQDEQELMERSSFVRSEIDYLMSSLVHSWLM

SEQ ID NO: 227706 - protein, 315 aa, Zea Mays
MELEEAVPPAAMVGEDNAAAPTQDFGLPAELIAVLPSDPFAQLDVARKITSIALSHRLGLLEAEAARLRSQLAERDAEAEDLREHVEQLDAALAVATGRLRHAEEEKDALQRDNSELSNTVRKLNRDVAKLEVFKKTLVQSLQEDDSSDNTAPRERAAAASNFSSAPSDEDSAFSTSKSSQVSETASSVSEENNQVDPDAPRRPPRPHVFLQSYNSTPRMTPPDSPPRRFASVSPPRRHSISVTSMNMFNDRSSGFSGQHSSPFDAPSQTGRTRVDGKEFFRQVRLSYEQFGAFLANVKELNAHRQTREDTLRQA

SEQ ID NO: 227707 - protein, 879 aa, Zea Mays
MQYNHRSRLPPPPLPFGRGGHPRGPKQPCYAPLPPPPFPPAPPPPPPSLERKYEVLMEAGRLATEYLVAQGVLPPAALQRGAGISGAWPDHPLPPPPQLQQQEPRGGYGRRRYKDEYNNNPRRANDTSSSTSSRDDCSRGSYNGRGKMKYGKYRRGYLDSGRDREKERRRPFPNGRRYEEDKDEDGAPGFRRERHGNRGSDEVRPHDTEALREGTPLTAKAVEGFCMEDATSKIMSSFKDTIKDSNDAPKVPEETEEGEVEDDRETQNSETEVVKQGIDTDVNHASCYVITESNPNQLSDGKIQDEIPDEEAEDDKKVMDEATLDHNTCDGEVTNMEVEMHVGKESLIDYCNFTRTPTRPRSARAHRNAASIPGEPAVVETFDLVSSGQASHMVSAESAERFFTKIVSENTEDKFCQENTSSGDVRAPPKELMLLQENGITVVTENMAEDNVDAEPHVVVQQYKEETNLSPLTDALEKSLRQEITLSPFAASHKDSLMQEGGLMQEVDLSPLTANHRESFTEETELPPSTASHKDSLIEGTDLTQTISSYNNNLKLQFKEGTQVCDIDMLPQDVNLIELPDQRKIIGRDVGAKAVTGMEEGKLDQSSSLNLSDVDLVGGTEVAAIHNNPVLVQLSAAGSSTESNNKQQQDPETFTGANASPTDDLCQLPLDNKDVQVVNIECGTPVEVGGFGLSKSIHNNPVLVQMSVAGSSAELINKQQEDPETFTGANANPTDDLCQLPLDNKDVQVIDIECGTPVEVGGFDLSKSNVMAFQLKVIQFDSTRNKMVCSSMDSIMDPGDGIHTDVIPVVQDGYSLAFSDFLSSDIPCYPSMQSDLHAGISANDSEGITVMDDPIYGSLADIGFMDMWGQPTQDYDKFF

SEQ ID NO: 227708 - protein, 165 aa, Zea Mays
MGELGRLLIYEATRDWLPTVTRQIQSPVGTEVVESVSEMEPIMIVPILRAGLALADLATSILPSTRTFHLGMARDETTLMASVYLNKLPDRFPKGCKILIVDPMLATGGTVTAAVDLVMERGAEISQIKISLVCRYQLLLPLLPSRSSIKDSQGFVCIQEPWIKL

SEQ ID NO: 227709 - protein, 818 aa, Zea Mays
MMMAQEQLQSRHGLPNSSSASTLGGADTGLSQNRAVQNSQHMLQLLHKVDNSRNSNVVADIPNNSLGVVSAQQQLNHSSLQGFGLRLAPPSQLQSISGNLWSSQTNADGKQFYQDGDRTQLPSTPSQSLTPQHQNSLSSPFHSSETENTGQPIACFPQLGSGQQYPMADDRSGPAPMLQQQPQQSNSATVFKNVWTNISAQRLTGMQPNKITPNIIQSMMFPNNAAASNLWSSQKADDQGQRASTPSDIATSSANSQNQSPKQAADSDAKLASSQKGNLELTGTTVTGGNESLQKPSSDENSINAVSSFAQLRQQGILGAKHGENPGANFQAMNVSHNNANHSGGIVLHGSPAPTNIQQQNYSLLHQMQTSRHMDVDPGSLSGKTTKPDIGSDAAQIDWNSGQRFAHVTNNSTKSSADNIGSPGVPGSFTSDLKMLSFASRNEERNPNIPSRFPSGECPSPGMITTQDDNQNQVQHMGTGAMSNSDERSERPRINPQMAPSWFGHYGNYRNGQSVATLNAATLNAQKPMALPFNFPKASRNNENNSHAENRVEPSQSVRPGHHLPSARMEALVPSNVKVSSMMRRPKKRKTMDSTLVSWHKIIESPRKLRGISTPEMDWAWAANRLIEKDEAETPDDAPLNYLPRKRLILTSQLIQQLLPAIPATILRAQAVSAYGSATYTLSMLTLRDACSMASSSYNSCSPVEDENNPSEQPSAKKMEDRVSKVVEVFVGRIRKMENDFISLNKRASMLDVQLECQDLERISIVNRLGRFHGRSHAAAVESSSAPEMTPRRIFPERHVMSFAVPGNLPEGVCCLSL

SEQ ID NO: 227710 - protein, 182 aa, Zea Mays
MVISYSLHFKLADKCVLASSGFQGDIKALQKNLAARELLYQHQHNKRMSCPAMAQLLSNTLYYKRFFPYYAFNVLGGLDSEGKGCVFTYDAVGSYERTGYSAQGTGSTLIMPVLDNQLKSPSPLLLPVRDAVTPLSESEAIDLVKDVFASATERDIYTGDKLEIVVINKAGTMREYIDLRKD

SEQ ID NO: 227711 - protein, 279 aa, Zea Mays
MFDEIDYILEGKNAERFATLYSHVDFLAGSSGVNSEASTSIKVPKVYWNYTCKTILTLEWIDGIKLTDAERISKANLNRKRMIDEGLYCSLRQLLEEGFFHADPHPGNLVATEGGSLAYFDFGMMGDIPRHYRVGLIQMLVHYVNRDSLGLANDFHSLGFVPEGTDLLAVADALRFSFGDVRRQSNDFQGVMNHLYDVMYEFSFSLPPDYALVIRALGSLEGTAKALDPEFKVIESAYPFVIGRLLADPSPDMRKILRELLICDDGSIRWNRLERLVHA

SEQ ID NO: 227712 - protein, 305 aa, Zea Mays
MFDEIDYILEGKNAERFATLYSHGSSGVNSEASTSIKVPKVYWNYTCKTILTLEWIDGIKLTDAERISKANLNRKRMIDEGLYCSLRQLLEEGFFHADPHPGNLVATEGGSLAYFDFGMMGDIPRHYRVGLIQMLVHYVNRDSLGLANDFHSLGFVPEGTDLLAVADALRFSFGDVRRQSNDFQGVMNHLYDVMYEFSFSLPPDYALVIRALGSLEGTAKALDPEFKVIESAYPFVIGRLLADPSPDMRKILRELLICDDGSIRWNRLERLLYLNSHQNLQAHQELTPVRTPMEVLSGDHLICIL

SEQ ID NO: 227713 - protein, 228 aa, Zea Mays
MAGPTSRLLILARRADRRRCLPFLVPRALQAAPPTFSPALPLPPCLPASTPVMSYSSAFTSVHGERPSSEYAKIRKESLETQFGRILGSSSRRHFADRGFGPFLALYRAATISFHVVKLTIWHLLLNDMHKRAEKFRETLIRLGPFYIKLGQALSTRPDILPSAYCQELAKLQDQIPPFPTRIALRTIESQLGSRISDLFADISPEPIAAASLGQVYKAYISDLSSPS

SEQ ID NO: 227714 - protein, 809 aa, Zea Mays
MDPEKRGYELQNFVAHDAEVRSLSIGKKSRRVFITGGNDRKVKLWAIGKQTPLLTLSGHTSAVEAVQFDSAEVLVLAGSSNGSIKLWDLEEAKVVRSLTGHRSSCTAVEFHPFGEFFASGSSDTDLKIWDIKKKGYIHTYKGHRGAIKTIRFTPDGRWVVTGGEDNIVKVWDLTAGKLLHDFKFHSGQINCIDFHPQEFLLATGSADRTVKFWDLETFELIGSSGPEGTGVRSMVFHPDGKTLFCGLDQSLKVFSWEPVRCHDVVDMGWSNLADLSIYEGKLLGCSYHECRVGLWAADISLIGPYALGVLPKANFFAELVQSMEDNPVKPVDSTANSRPASAMAHSRSSYKIKESGIAQSRVRGSHLTPASTDKTKKDRSSTIPRRPDSSLKSSVQSTTLMRRMKLVDSPSTNTKNVERNVGQRDISLASRAVMANNSATAKKSNLTESALVKDIYTTSQAVSAPIVVPRDILEDKTVSNVRRGTGETAAVPDDFRIPVHRRKPSLSGSAADSDSSSRSVFTEPDVCSEGLSSLKFSFGLTPYHKKEEFGDVDNEAFESPCSTTETAKVKYVRGVAVPLGKTKSLVERWEKRETSSTDYSPQTGSCGDRASRNDNHPFHLAEPSTTFEKDLSTVDEAMAPVNLVRNHDEFLNAVKLRLTKLEMMRHVFEQSGIKGAIAAVAKLPDNAVQADVVSALKGKLDLFNLEFFSNFLPVLAGLLCSKTERHAMVSLEMLLDLIKIFGPVIHSALSANLGVGVDIQAEQRLQRCSRCFNHLQKIQQSLNPLILRGGQTAQLAQELSLSLQDLVVI

SEQ ID NO: 227715 - protein, 796 aa, Zea Mays
MDPEKRGYELQNFVAHDAEVRSLSIGKKSRRVFITGGNDRKVKLWAIGKQTPLLTLSGHTSAVEAVQFDSAEVLVLAGSSNGSIKLWDLEEAKVVRSLTGHRSSCTAVEFHPFGEFFASGSSDTDLKIWDIKKKGYIHTYKGHRGAIKTIRFTPDGRWVVTGGEDNIVKVWDLTAGKLLHDFKFHSGQINCIDFHPQEFLLATGSADRTVKFWDLETFELIGSSGPEGTGVRSMVFHPDGKTLFCGLDQSLKVFSWEPVRCHDVVDMGWSNLADLSIYEGKLLGCSYHECRVGLWAADISLIGPYALGVLPKANFFAELVQSMEDNPVKPVDSTANSRPASAMAHSRSSYKIKESGIAQSRVRGSHLTPASTDKTKKDRSSTIPRRPDSSLKSSVQSTTLMRRMKLVDSPSTNTKNVERNVGQRDISLASRAVMANNSATAKKSNLTESALVKDIYTTSQAVSAPIVVPRDILEDKTVSNVRRGTGETAAVPDDFRIPVHRRKPSLSGSAADSDSSSRSVFTEPDVCSEGLSSLKFSFGLTPYHKKEEFGDVDNEGIAQIAEKMERTVSLDHSQQLNDDKSFESPCSTTETAKVKYVRGVAVPLGKTKSLVERWEKRETSSTDYSPQTGSCGDRASRNDNHPFHLAEPSTTFEKDLSTVDEAMAPVNLVRNHDEFLNAVKLRLTKLEMMRHVFEQSGIKGAIAAVAKLPDNAVQADVVSALKGKLDLFNLEFFSNFLPVLAGLLCSKTERHAMVSLEMLLDLIKIFGPVIHSALSANLGVGVDIQAEQVATLFTVL

SEQ ID NO: 227716 - protein, 126 aa, Zea Mays
MPHQVATVLLLFTLSGPVKASTYLLMHGVVGLIMGTVWRLETNWIVSIILCSIITVNIHASLTYILTAAGVNTIPSMGTIYLLFGTLLLLNCGFFVFLLHVMYTVFLAKLGIKPSLRSPRWLDRVM

SEQ ID NO: 227717 - protein, 482 aa, Zea Mays
MRIACWMVQSDILAQHRLPSLKKMGDSSRFKGHGMLAPFTAGWQSNDLHPLIIERSEGSYVYDINGNKYLDSLAGLWCTALGGSEPRLVKAATEQLNKLPFYHSFWNRTTKPSLDLAQEILSMFTAREMGKVFFTNSGSEANDSQVKLVWYYNNALGRPNKKKFIARSKAYHGSTLISASLTGLPALHQKFDLPAPFVLHTDCPHYWRYHLPGETEEDFATRLATNLENLILKEGPETIAAFIAEPVMGAGGVIPPPKTYFDKVQAIVKKYDILFIADEVITAFGRLGTMFGCDYYNIKPDLVSLAKALSNAYVPIGATLVSPEISDVIHSQSNKLGSFAHGFTYSGHPVACAVAIEALKLYRERDIPGHVKQIAPKFQDGIRALADSPIIGEIRGLGMIMGTEFTNNKSPTDLFPAEWGVGAIFGEECQKRGMLVRVAGDAIMMSPTLIMTPGEVDELVRIYGEALKATEERVAALQSKKN

SEQ ID NO: 227718 - protein, 194 aa, Zea Mays
MSHARASPLWRCPLPGTHPHKASASPIRREPPTARPQGACACSRCSFLMATACHLAAPLGLAPLPRGCASAGVVAVVRCGSKIPRGVAVRATSGGEGATEEVPEIVKAAQDAWDKVEDKYAVATIGVAAIVALWTVVGAIKAIDKLPLLPGVLEIVGIGYTGWFTYRNLVFQPDREALIGKIKSTYKEITGSSN

SEQ ID NO: 227719 - protein, 135 aa, Zea Mays
MQRVEAAGGRVVNWNGYRVLGVLATSRSIGDYYLKPYVSAEPEVTVVERTERDEFLILASDGLWDVVSNEAACKIARSCLSGRAASRFPGSVAGRTAADAAALLAELALSRGSRDNISVVVVELRRLQTDQMTRV

SEQ ID NO: 227720 - protein, 55 aa, Zea Mays
MTDGCLKRFFVKHSLHLNHINEKIGAFVRSSLELKLGGIISSSFWKPNKHKVQRL

SEQ ID NO: 227721 - protein, 550 aa, Zea Mays
MEVLCGASETNACPSGGVGIYNPGYWGMNIERTNVYRVTIYIRSSESVELMVSLTSSDGLQNLASHTIMGDKEDFVEWTKVEFDLQSNYINTNSRLQLTTTKSGIIWFDQVSLMPSDTYMGHGFRKDLASMLANLKPRFLKFPGGNYVMGNYLINAFRWSETVGPWEERPGHFNDAWAYWTDDGLGFFEFLQLAEDLGACPVWVVNDGASIYEGVPSATIAAFVKDVVNGIEFARGDPETAWGSVRAAMGHPEPFQLYYVSIGNQECSKYYYKDNYVKFYSAIKASYPDIKIISSCDRSAISSDNPADLYDVHVYTSSGDMFSKSRMFDNTARTGPKAIVSEYAVTGNDAGRGTLIAALAEAAFLIGLERNSDVVEMASCAPLFVNDNDQRWNPDAIVFNSWQHYGCPNYWMLHFFKDSSSATLHPSTIQLPNYDQLVTSAITWNNPHDGNTYMKIKVVNFGSKAVSLNISVTGLETDIQTFGSIKTVLTSGWLRDENSFQQPDKVVPAASPITNAGKQMGVILNSYSLTSFDLLLDSESQVRASIQAYD

SEQ ID NO: 227722 - protein, 64 aa, Zea Mays
MNIWLDEMMEESMEQVVLRVEAPLRTGKANRRREGALAGETARDYGRRMTQTWTTKMTTNSSIM

SEQ ID NO: 227723 - protein, 267 aa, Zea Mays
MISLHKQEFKDKHMEWINSVKPAVDARIVSDLSEDGDSDIDGCQNDDGILVIPTALGCPPKLNAKELSSESYNSQTLRLLSLASMSGCCQVSIPLGTHDKCPISVSLIARHGGDRFLLDTTQTMYTTIQEQVEILAKSSVSSKQAMNEEAAEAAKEKGNAAFKEKQWQKAVNFYTEAIKLNGKVATYYSNRAAAFLELTSYRQAEADCTSAIELDSKSVKAYLRRGTAREMLGYYKEAVDDFNHALVLEPMNKTAGVAINRLKKLFP

SEQ ID NO: 227724 - protein, 59 aa, Zea Mays
MYIELPKGVPTKLFHCSIQASHVEVGIRGNPPYLNHDLTHPVKTDSSFWTIVLLTLSGR

SEQ ID NO: 227725 - protein, 220 aa, Zea Mays
MNMYQHIRDAVQEKKVLLEWHPQPGQEKPPVPLLKDAFGAERRKAKMLNFSIAYGKTAVGLSRDWKVSVKEARDTLKLWYRDRKEVLAWQKSQKKLASEKGEVYTLLGRSRHFPYLTQYGPGQRGHIERAAINAPVQGSAADVAMCAMLEIERNVRLKELGWRLLLQVHDEVILEGPSESAEVAKAIVVECMSKPFYGTNILNVDLAVDAKCAKSWYAAK

SEQ ID NO: 227726 - protein, 1011 aa, Zea Mays
MPPSFPSLPLPEAVAATAHAALLALAALLLLLRAARALASRCASCLKAPRRRGGPAVVVGDGAGGALAAATAGAWHRAVLASCAYALLSQVAVLSYEVAVAGSRVSARALLLPAVQAVSWAALLALALQARAVGWARFPALVRLWWVVSFALCVVIAYDDSRRLIGQGARAVDYAHMVANFASVPALGFLCLVGVMGSTGLELEFTEDGNGLHEPLLLGRQRREAEEELGCLRVTPYADAGILSLATLSWLSPLLSVGAQRPLELADIPLLAHKDRAKSCYKAMSAHYERQRLEYPGREPSLTWAILKSFWREAAVNGTFAAVNTIVSYVGPYLISYFVDYLSGNIAFPHEGYILASIFFVAKLLETLTARQWYLGVDIMGIHVKSGLTAMVYRKGLRLSNASRQSHTSGEIVNYMAVDVQRVGDYAWYFHDIWMLPLQIILALAILYKNVGIAMVSTLVATVLSIAASVPVAKLQEHYQDKLMASKDERMRKTSECLKNMRILKLQAWEDRYRLQLEEMRNVECRWLRWALYSQAAVTFVFWSSPIFVAVITFGTCILLGGQLTAGGVLSALATFRILQEPLRNFPDLISMMAQTRVSLDRLSHFLQQEELPDDATINVPQSSTDKAVDIKDGAFSWNPYTLTPTLSDIHLSVVRGMRVAVCGVIGSGKSSLLSSILGEIPKLCGHVRISGTAAYVPQTAWIQSGNIEENILFGSQMDRQRYKRVIAACCLKKDLELLQYGDQTVIGDRGINLSGGQKQRVQLARALYQDADIYLLDDPFSAVDAHTGSELFKVLKDGHITQAGKYDDLLQAGTDFNALVSAHKEAIETMDIFEDSDSDTVSSIPNKRLTPSISNIDNLKNKMCENGQPSNTRGIKEKKKKEERKKKRTVQEEERERGKVSSKVYLSYMGEAYKGTLIPLIILAQTMFQVLQIASNWWMAWANPQTEGDAPKTDSVVLLVVYMSLAFGSSLFVFMRSLLVATFGLAAAQKLFIKMLRCVFRAPMSFFDTI

SEQ ID NO: 227727 - protein, 327 aa, Zea Mays
MVNGLVGSADDWKFAAEQFVRRMPDKVIVHRSQCNSATQTFDGVDLMGERLANEVLSVVEQRRGVKKISFVAHSLGGLVARYAIGRLYEPNSRRKSSGGESRDDVVHLNGHIAGLEPMNFITFASPHLGSSGNKQLPFLCGLPFLERRASEAAHLIVGRTGKHLFLTDNDDGRRPLLLRMVDDSDDLQFRSALRSFKRRVAYANANFDHMVGWRTSSIRRQHELPKHRLLVRDEKYPHIVYVEKEVTDNNETKAHADHYDPEEEMIRGLTQVPWERVDVSFQKSTQRLVAHNTIQNNRLFGQCQVKSYWLNSDGADVINHMMDNFIV

SEQ ID NO: 227728 - protein, 107 aa, Zea Mays
MLLSSAVLQPTKKLQVNAEESSDDLANPPKVEEKLGAVPHGLSTDSEVAQREAESISRKTLRSSAEKFEFQAEVSRLMDIIINSLYSNKDIFLRELISNASDVCTTY

SEQ ID NO: 227729 - protein, 107 aa, Zea Mays; identical to SEQ ID NO: 227728

SEQ ID NO: 227730 - protein, 115 aa, Zea Mays
MNLAVRSLLPPKPTISTLGAAAHLSPLLALPSPQAPTHAASLGVYRRRRRDGAAPHLPKASQLRDKIQSDPGREDPRFAPSGGKLVYQYTKKRASGPKCPVTGKKIQGNYPCFLG

SEQ ID NO: 227731 - protein, 241 aa, Zea Mays
MFVFSTTLLCLYVFAFCWVYVIKIRAAEQSSVWKALLKTPASVALIIYCFLCVWFVGGLSVFHLYLMSTNQTTYENFRYRYDRRDNPYNKGVLNNFLEIFCTAIPPSKNNFRARVTAGQGLQQTRSQSRGFMSPSMGKPIGDLEMDRKPVAPWDEPRTAADIRDLEAGLGVMFDEKEGRVAHASPDLSRDLPAEFVEGRSGMHSRQSSWVQRGDAIEASAVQMANARTTEASNNVAWSGTH

SEQ ID NO: 227732 - protein, 399 aa, Zea Mays
MAVAAPASDAKPRLNVPPSMASALRLDPVGLGAGPSMPSPSRRLAEPPKTPSPSKTTYSDRFIPCRSSSRLQNFALIDSPLSPAKDDTPYSRLLRAELFGPDSPKPTTATSAASASPNTNLFRFKKDHSAPTSPFAKAAAAHHDCTAGSGDAPSPQKPPRKVPKTPHKVLDAPSLQDDFYLNLVDWSSQNVLAVGLGTCVYLWSASNSKVTKLCDLGPRDSVCAVHWSREGSYLSIGTGLGDVQIWDSSRCKRIRNMGGHQTRTGVLAWSSCILSSGSRDKNILQHDIRVPNDYISKFSGHRSEVCNLAWCKNVNELVSTHGYSQNQIMVWKYPSMSKVATLTGHTMRVLYLASSPDGQTIVTGAGDETLRFWNIFPSVRTQTPVRDIGLSSFSRSHIR

SEQ ID NO: 227733 - protein, 161 aa, Zea Mays
MASSEPIECQVVALRVSIHCQGCKKKVKKVLQNISGVYRCEIDARSNKVVATVSTELDPYMLVAKLRKPGPSQGYIDEHYTPSYSSSSNNYYSSNRSPAYEPYYYSAPQPAPYSYQYQYQPASSSEDYYYSAPPQRSAFSPPREGYGDMFNDENANSCTVM

SEQ ID NO: 227734 - protein, 505 aa, Zea Mays
MRRGGGATPARTSGDAAPLLHGHGSNSSRSRSPASCPAPAPPATSGGLQEITRAGNEWYKKGRHADALRHYDRAVALCPDSAACRGNRAAALIGLGRLAEAFRECEEAVRLDPASGRAHGRLAGLCLRLGMVEKAKTHFTLAGSANQSDPAEWQKLHEVEIHQGRCMDARKIGDWKSALREADAAIAVGADSSRLLLALRSEALLWLHKLEEADLTITSLLKLDDASLPSTPTRVSGMSADSYVHIVQAKVNVTFGRFDSAVALAEKAKLIDGVSSEVEVILNNVRLVALARARGNDLFKAGKFAEASLAYGEGLKYEPSNPVLYCNRAACWSKLGRWAKAVEDCSEALRVQPNYTKALLRRAASYAKLERWADCVRDYEVLRKDLPGDTEVAESLFHAQVALKTARGEVVSNMKFGGVVEEIISLEQLQDVIRSPGEFLLYMHLACCRHFTSFLVLVVLRSGQLTRCIRSLLHGYNEQAMCTNYPVCGLPLLRVPCIEFPEGKR

SEQ ID NO: 227735 - protein, 188 aa, Zea Mays
MTFLRQASLLRRRFQPNYTKALLRRAASYAKLERWADCVRDYEVLRKDLPGDTEVAESLFHAQVALKTARGEVVSNMKFGGVVEEIISLEQLQDVIRSPGVSVLYFMATMNKQCAQITPSVDSLCSECPALNFLKVNVDERPLVASAENVRVVPSFKIYKDGTRVKEMVCPSLQVLRYSVRHYAVSSS

SEQ ID NO: 227736 - protein, 200 aa, Zea Mays
MGLHLLDLKIRGHHLGSSPATTVVGQGEGGKGSGNGNAVQLEDVIVQADTPTKMNSNSLAMSAPAAAVSAAADAGGEHEEQQEAGHGEEGDGSPKQAVNLGEDEKTESGPVTAPPIVARGFQESGGVAVEHILPDSPFASTTNKEASAPTAQNGGISNGSPHHVASSPLFPPAPAIELPPYNSCFFQAPRFSPGHEAIGL

SEQ ID NO: 227737 - protein, 566 aa, Zea Mays
MARMSSRVLTWTDGFYNGEVKTRKISNSVELTSDHLVMQRSDQLRELYEALLSGEGDRRAAPARPAGSLSPEDLGDTEWYYVVSMTYAFRPGQGLPGRSFASDEHVWLCNAHLAGSKAFPRALLAKSILCIPVMGGVLELGTTDTVPEAPDLVSRATAAFWEPQCPTYSEEPSSSPSGRANETGEAAADDGTFAFEELDHNNGMDIEAMTAAGGHGQEEELRLREAEALSDDASLEHITKEIEEFYSLCDEMDLQALPLPLEDGWTVDASNFEVPCSSPQPAPPPVDRATANVAADASRAPVYGSRATSFMAWTRSSQQSSCSDDAAPAAVVPAIEEPQRLLKKVVAGGGAWESCGGATGAAQEMSGTGTKNHVMSERKRREKLNEMFLVLKSLLPSIHRVNKASILAETIAYLKELQRRVQELESSREPASRPSETTTRLITRPSRGNNESVRKEVCAGSKRKSPELGRDDVERPPVLIMDAGTSNVTVTVSDKDVLLEVQCRWEELLMTRVFDAIKSLHLDVLSVQASAPDGFMGLKIRAQFAGSGAVVPWMISEALRKAIGKR

SEQ ID NO: 227738 - protein, 65 aa, Zea Mays
MQVPQVTEEAAQAVVELYPTPLLLAKAYSILGGDTSAQEKMLKKKNEMVNAGASRNIFHLIWGDG

SEQ ID NO: 227739 - protein, 129 aa, Zea Mays
MRTTGFADTQKRYVDLTRSVIAYYDASFSIVGKASPVCPTYDDFKRKCYDLKKKTVSDIFGCQLMQVPQVTEEAAQAVVELYPTPLLLAKAYSILGGDTSAQEKMLKKKNEMVNAGASRNIFHLIWGDG

SEQ ID NO: 227740 - protein, 475 aa, Zea Mays
MKSFFEKSSQDLSPAKGKKAKGTKSYLPRKNTAAYAILITLHRAKTSGKDFMMKQELIDAAEASGLSRDAIGPNKSKAKQSYGKDWYTGWSCMKTLLSNRLVTKWSNPAKYMLTQEGEGTARDCLSRSGLDDSARPLTIIGAHNTSAMDPSVARHSPELVSDSSLTKKKSNCYRQVQATNYEGIICCDSDSEEPCGKDIPLKGMEPITSCGPPDISRPFQGTPKLQSSTMGSAKLAMPPRRANENFLEAYEVILILDDREKFGSRSRKVADNICSLSHFAVDVRQLPVGDGIWIARHKEDHTEYVLDFIVERKEVMDLDGSIEDNRYRDQKLRMKKCGLRKLIYLVEGDLNRAPKRVKTACFTTEILDGFDVQRTTGFADTQKRYVDLTRSVIAYYDASFSIVGKASPVCPTYDDFKRKCYDLKKKTVSDIFGCQLMQVPQVTEEAAQAVVELYPTPLLLAKAYSILGGDTSYLG

SEQ ID NO: 227741 - protein, 84 aa, Zea Mays
MANADLGRIINSDEVQSVVKPLNKEVKRREKRKNPLKNMAAVLKLNPYLGTARKMATLAEAARVKARKEKLDSKRTKLTSNVTE

SEQ ID NO: 227742 - protein, 191 aa, Zea Mays
MGSAVSVVEAAAHKGLLQCIDTVMSEVERLLSSEQKATDYRTPDDGAAPDHRPTNACIRIVAYLSRVLEVAFSALEGLNKQSFLTELGNRLHKGLLNHWQKFTFSPSGGLRLKRDITEYGDFVRSFNAPSIDEKFELLGIVANVFIVAPESLASLFEGTPSIRKDALRFIQLRDDYKTAKIASMLNYIMSE

SEQ ID NO: 227743 - protein, 212 aa, Zea Mays
MIAVQRCTSSVAILQQYFSNTISRLLLPVDGAHPSACEDMGSAVSVVEAAAHKGLLQCIDTVMSEVERLLSSEQKATDYRTPDDGAAPDHRPTNACIRIVAYLSRVLEVAFSALEGLNKQSFLTELGNRLHKGLLNHWQKFTFSPSFNAPSIDEKFELLGIVANVFIVAPESLASLFEGTPSIRKDALRFIQLRDDYKTAKIASMLNYIMSE

SEQ ID NO: 227744 - protein, 80 aa, Zea Mays
MIAVQRCTSSVAILQQYFSNTISRLLLPVDGAHPSACEDMGSAVSVVEAAAHKGLLQCIDTVMSEIVVFGTEGYRLSNTR

SEQ ID NO: 227745 - protein, 227 aa, Zea Mays
MIAVQRCTSSVAILQQYFSNTISRLLLPVDGAHPSACEDMGSAVSVVEAAAHKGLLQCIDTVMSEVERLLSSEQKATDYRTPDDGAAPDHRPTNACIRIVAYLSRVLEVAFSALEGLNKQSFLTELGNRLHKGLLNHWQKFTFSPSGGLRLKRDITEYGDFVRSFNAPSIDEKFELLGIVANVFIVAPESLASLFEGTPSIRKDALRLRDDYKTAKIASMLNYIMSE

SEQ ID NO: 227746 - protein, 105 aa, Zea Mays
MDLSDEADLEDYVCRPDKISATDVELVSWHIPRFLCICCFLSIVLLGYLCPVLAKAVKTMRKAEKVLLIAKPHCFQVIIAELRATSPTLARQPGASYLCSEFCIS

SEQ ID NO: 227747 - protein, 124 aa, Zea Mays
MCASPSARISPDPLYSLHHADPDPTPATTRIHCALHGHERERSCADLNQALHGRSAWFPLLHPMIRMPPHHGRWSGPSNPDARALRRVDLLDHAGARPQVRRRDHEVAASTCLSCSPLHTPPRT

SEQ ID NO: 227748 - protein, 550 aa, Zea Mays
MCTVCHNLDRIKCRLLEGTNAQDVRALVLDMQARLLLDMLGKGIESALTNPSTLLPEPWQASSDMLSSIDADKMTVEPALLPNIQGYVDAVLDLASHFITRLRRYASFCRTLASHVGPSSTTGTSRNMVTSPTNSSPSPSNNQGNQGGSTSATGNSQMQEWVQGAIAKISNNSDGAATATQNPMSTRTSFMPISINTGTFPGTPAVRLIGDCHFLHRLCQLLLFCLLFRRRQSPRLLASSQKNQDSAMQKIQHMMNAKTEDNSSTVRSGLGAAKVEEGHSARGGQFVLGGAKGPEENPIGKSVRIGSGNAGQGYTSDEVKVLFLILVDLCRRTSTLPHPLPASQVGSSSIIIRLHYIDGNYTVLPEVVEASLGPHMQNMPRPRGADAAGLLLRELELQPPAEEWHRRNMFGGPWSEPDDFGPLDNMPRLKISGSINSHLSDMEVDAVSSIGIDLWPRKRRLSERDAAFGLKTSVGLGGYLGVMGSRRDVVTAVWRTGLDGDWYKCIRCLRQTCAFAHPGAPNQTNEREAWWISRWSHACPMCGGSWVKVV

SEQ ID NO: 227749 - protein, 348 aa, Zea Mays
MQARLLLDMLGKGIESALTNPSTLLPEPWQASSDMLSSIDADKMTVEPALLPNIQGYVDAVLDLASHFITRLRRYASFCRTLASHVGPSSTTGTSRNMVTSPTNSSPSPSNNQGNQGGSTSATGNSQMQEWVQGAIAKISNNSDGAATATQNPMSTRTSFMPISINTGTFPGTPAVRLIGDCHFLHRLCQLLLFCLLFRRRQSPRLLASSQKNQDSAMQKIQHMMNAKTEDNSSTVRSGLGAAKVEEGHSARGGQFVLGGAKGPEENPIGKSVRIGSGNAGQGYTSDEVKVLFLILVDLCRRTSTLPHPLPASQVGSSSIIIRLHYIDGNYTVLPEVVEASLGPHMQE

SEQ ID NO: 227750 - protein, 128 aa, Zea Mays
MARRSLRIGRTTSWISGCPTRWCIRDPGTRFISLASLLLALLATISIILRRRGENRGCRGGTSASRHPRLQCGPQSLPSVAGRALVASPPGIVAGDFTNWSPDLSYHDRAAAQRGRTSSELNLRGKGS

SEQ ID NO: 227751 - protein, 265 aa, Zea Mays
MFCRLTWCMSCCGHQQSKLCLLFFFGYNSYMILLSISLQGIHLDPSIYLMDEEKSDGNSRTEKTVTDSENPGISVERKVEHQFKNGLAENRMDSTEDNKNFVKSKKSTLEKGRTSEGLSYAQNHETKVHDSARSQEKNPKDESDGHKDLDQQKNNATKKDKPAAEPIIVPIVLRMSDFDHKALLEEWIATRAFRDNCIPQDHRKLINNLKLIQDYLCSFESQGLTIVDISANSFPQTLDWLHSYLLQCIERGLLAACLESCNQGQ

SEQ ID NO: 227752 - protein, 91 aa, Zea Mays
MLSKAWSAAKGTDITKSEAKDIMFHLYMTAVANLQRQMPKDIRILKHLIMIEDPEERSSALNDAFTPGPELQGDNVDTLYTGAAHLGKSYS

SEQ ID NO: 227753 - protein, 570 aa, Zea Mays
MEIHRRRDMVCMHMQMLDQHLHCPTFGTHRFLSQSYPSIAGESVTNLRYSPITYPSVLGEPLHGEDLANSIPKGGLDWERALRCLRHALRTTPSPDWWRRVLLVAPCYRSQSQQSSTPGAVFSPDMIGEAVADRTIELLKLTNSETQCWQDWLLFADIFFFLMKSGCIDFLDFVDKLASRVTNSDQQILRSNHVTWLLAQIIRIEIVMNTLSSDPRKVDTTRKIISFHKEDKSLDANNIGPQSILLDFISSSQTLRIWSFNTSIREHLNSDQLQKGKQIDEWWKQMMKASGERMIDFTNLDERATGMFWVLSFTMAQPACEAVMNWFTSAGMADLIQGPNMQPSERIMMMRETYPLSMSLLSGLSINLCLKLAYQLEETIFLGQAVPSIAMVETYVRLLLIAPHSLFRPHFTALTQRSPSILSKSGVSLLLLEILNYRLLPLYRYHGKSKALMYDVTKIISMIKGKRGEHRLFRLAENLCMNLILSLKDFFFVKKELKGPTEFTETLNRITIISLAITIKTRGIAEVEHMIYLQPLLEQIMATSQHTWQKRLLLTNVISCSHHLLSQTMS

SEQ ID NO: 227754 - protein, 278 aa, Zea Mays
MDMQFFPDRAHLRLRSRWHGMYLHAEEDGVRITLRRRRGTLNEAWVVHHLERNGVNYVLLHSAAYGRYLAIVSMEATPAPSSGQGQGARRTCLAVQRLYDAPGQNDVLWQFRFADDGSDDVVMRNRVYGTWHNYGDERRLMQFIVEAIPPRAEPPELPPVVWPPAVPIGGPIRRQRRRVVQAQPVLRRKIHYVRADDQGNFSPLVWRMLWFDGRSVLHLRRDLAAELGVGEANVLDITMCVRAGSNGRLTPLVIDLPFDEQAMDIVVLATDSPDVAAP

SEQ ID NO: 227755 - protein, 286 aa, Zea Mays
MCIANYEASGSQVQITLERGIPAMIGSFATKQLPYPYLSFDMVHCAKCNIEWYKNDGIFLVEVNRLLRPGGYFVWTSNLNTHRALRDKENQKKWTAIRDYAEGLCWEMLSQQDETIVWKKTNKRECYKSRKFGPELCGHDPESPYYQPLSPCISGTRSQRWIPIEHRTTWPSQARQNSTELDIHGVHSEVFADDNSSWDSMVRNYWSLLSPLIFSDHPKRPGDEDPQPPFNMLRNVLDMNAHFGGFNAALLKSGKSVWVMNVVPTNAPNYLPIIFDRGFIGVQHDC

SEQ ID NO: 227756 - protein, 68 aa, Zea Mays
MSTIIPRALGNRRQPFVVLSGPSFAVELMNKLPTAMVVASKDNKLASSVQQLLASPNLRISTSRSRNR

SEQ ID NO: 227757 - protein, 247 aa, Zea Mays
MAPPAAPTALHHRTPLLLPRRTVALGATATARAARAASLAVRAQPDTTAAAVSTSAPEPAPEFKPPPGFKAPEPKRYEVKSGQVGSVLGASLAIPLRLGTGVFVLGYSPSLVSPSEIPSDQYALEFGAWKVKEESKIGQCKRPEKPIEIYEFEGCPFCRKVREMVTVLDLDVLFYPCPQKAQRSDLKSSKWVERNNSLTWRWNCSNYAITWSVDSNYSRACYSWSYWKGKFLHCFKSPTAAHRDMGM

SEQ ID NO: 227758 - protein, 213 aa, Zea Mays; identical to SEQ ID NO: 227645

SEQ ID NO: 227759 - protein, 270 aa, Zea Mays
MLHASRDHGSGRERKKEREGGGRPAKAPPHHHPTNSSMRPPPPPAATTMRFHDGADIKPPLLGVPSAGLLHQHQTLPAASFFMPLPSFPDHQHQPHLPPPPKRHHSMPDNLFLLQNQLQPPPSQGLPFPPLHTTTPFQLQPPLQPPRGAMKTTPAAQQHQQLLDELAAAAMAAEVGNSIGAREILARLNQQLPPIGKPLLRSASYLREALLLALTDGHQGSTRVTSPLDVALKLVGFLLAGARIPPWNWERSPANVEAHSLRVKCFPPPA

SEQ ID NO: 227760 - protein, 418 aa, Zea Mays
MFGKISFCRECTLVNLLILSVIASRCLSAPTERLGSIFQNQSILDGQTLVSMSRIFVLGFFSPGASSKRYVGIWHNDVSERRVVWVANRNDPLQDTSGILKFDNSSNLIVLDGRGNSFTVAYGRGVQDVEAAMLDNGNFILRSITNQAKIIWQSFDSPTDTWFPGINITLGAKLLTSWKSYDDPAVGDYSFGPGITNASQLIIWWKGIQFWTSLRWNGDTNSLIPELTSLGIIPVLFQCDNLTCTYTANPRDTMTKIVLDPNGSLNIAQFSPVTESWTLLWRQPPSCEVSNICGVFGICNNNMSPICHCPLGFEQQAGDTRKGCTRQIQLQCNGDRFVNMSNMRFPDSRVKLSVMGDGKCQLECMKNCSCTAYTYSVLDGCSLWYGNLTNMQDGYKSGAGTLYLRVANSSVQVTNYFG

SEQ ID NO: 227761 - protein, 800 aa, Zea Mays
MASASTAVRMLPDGGADDEERWLAEGIAGVQQNAFYMHRALDSNNLKDALKYSAQMLSELRTSRLSPHKYYELYMRAFDEMKKLEMFFREETRRGSCSVVDMYELVQHAGNVLPRLYLLCTVGSVYIKSKEAPAKDVLKDLVEMCRGIQHPLRGLFLRSYLSQISRDKLPDIGSEDAETINDAVEFVLQNFIEMNKLWVRMQHLGPAREKEKRGKERNELRDLVGKNLHVLSQIEGVDLDMYKETVLPRILEQVVNCKDDLAQFYLMDCIIQVFPDEYHLQTLETLLNAFPQLQPSVDIKTVLSQLMDRLSNYAASSPEVLPEFLQVEAFAKFSNAIGKVIEAQPDMPVVGAVTLYVSLLTFTLRVHPDRLDYVDQVLGACVKKLSGKAKLEDSRATKQIVALLSAPLEKYSNIVTALELSNYPRVMDYLDNATTKVMAVVIIQSIMKNTTCISTSDKIEALFDLIKGLIKDMDGAQDDELDEEDFKEEQNSVARLIHMLHNDEPEEMLKILCTVQKHILQGGPKRLTFTVPSLVFSALKLVRRLQSQDGDVTGEDVPATPKKIFQILHQTIDALSCVPSPELALRLYLHCAEAANDCDLEPVAYEFFTQAFILYEEEIADSKAQITAIHLIIGTLQRMNIFGVENRDTLTHKTTGYSAKLLKKPDQCRAVYACSHLFWADDQDGIMDGERVLLCLKRALRIANAAQQMASATRGSSGSVTLFIEILNKYLYFFEKGIPQITNTVIQDLIELIRTEKQSDNSVADPSTEAFFSSTLRYIEFQKQKGGSIGEKYEQIKTSS

SEQ ID NO: 227762 - protein, 338 aa, Zea Mays
MFAAKSLALSCTASPGASLGFPPVHTASSPAAHRKSEAANSSISFSSMQQFGIAGSSTVQDKSKAVDSSTPFGFPQKFDTVSSASEDMSKADSPEPTFFSGNHNVQSENCSSLFTQSPGNNLSSKSSENLNSGSSHSFADSPVGSATMCSSPSNSNSLFSWAAGSGARTAPPSSPATSSSFAFSSSPAFSAQPVFASKLTTPASLSYGSPNTGPATSPFSSMPSAVFSFTSATPSIPNPSPTTPIFGDPTVQMNGGNIVIDRNGSPSPATSPFGLPSSSPSTPTFSTPATQFASSTSGSPGVFEIGKYSQASSGGFSMGPSGGNDKSNRRIVRVKRRK

SEQ ID NO: 227763 - protein, 586 aa, Zea Mays
MDQYEVLEQIGKGAFGSALLVRHKLERKKYVLKKIRLARQTDRTRRSAHQEMQLIANVRNPFIVEHKDSWVDKGCYVCIVIGYCEGGDMAEAIKRANDTHFSEEKLCQWLVQLLMALDYLHAHHILHRDVKCSNIFLTRDQNIRLGTPSYMCPELLADIPYGTKSDIWSLGCCMYEMAALKPAFRAFDMQNLINKITKSIVSPLPTRYSGAFRRLVRSMLRRSPEHRPSAAELLKHPHLQPYVLQLHLKSHLSRSIVPVHQSPSEKRMTFAAEPVCRSKGRRNSLGSERMIAAFSKPSPDRSSVSSIRSVKDDYTATQSVRELSVDESMVEVASKPVASRTSDVMRTPKATPWKMMTTLRNRLEAPQASYDRTSHTEFSRTPVDKRNSRVARRASLPLPVFETPKQRSSMSVLERLESPDVSVNSPRIDRIAEFPLASCEDPLFSTVKPPTPASASASATPPFVDRSITKDKCTAQTLRSAAHDGGNGRSEDGGGLSSGRTTTTAASSGGTSGSLQPKGRFDTTSYQQRAEALEGLLEFSAQLLQQERYEELGVLLRPFGPDEMVSPRETAIWLTKSFKEAMATGL

SEQ ID NO: 227764 - protein, 50 aa, Zea Mays
MARPPRCILRGERAGEKQQQQNWSGASTPRSKHFTIEQRRRTTINDRYAS

SEQ ID NO: 227765 - protein, 90 aa, Zea Mays
MAAGSIRVTMEVGADGVALITIANPPVNALHPIIIAGLKDKYAEALRRDDVKAIVLTGAGGKFCGGFDINVFTKGMYHLCRTYPSSLCQT

SEQ ID NO: 227766 - protein, 238 aa, Zea Mays
MGFMHYSPSQSATAVTNFMGTAFLLALLGGFLSDAFFTTYTIYIASAFIELMGLVILTVQARTQSLMPPQCAKPGAPCEPVSGAKKAMLFAGLYLTALGVGGIKGSLPSHGAEQFDEHAARGRKGRSTFFNYFVFCLSCGALVAVTFAVWVEDNKGWQWGFGISTIAILLSIPLFVAGSSRYRNKVPTGSPLTTIAKVLIAAALARRGCAPSSSNGAVIDRAPSPTGSTDMKEYCEPG

SEQ ID NO: 227767 - protein, 224 aa, Zea Mays
MEDVAPGAEPWEGYVDWRNRPATRSRHGGMAAASFVLGAGDPDGPGADAVADAAAVRQAGGSVRARVGRQEGDAVRGAVPHGAGRGRDQGLPPLPRRGAVRRACGAGAQGPLHLLQLLRLLPLLRRPRRRHLRRMGRGQQGLAVGVRHLHHRHPALHPALRRRLQPLPEQGAHGEPAHHHRQGPHRRRARAPRLRAELQQRRRHRPRAQPHGEHRHERVLRARG

SEQ ID NO: 227768 - protein, 1815 aa, Zea Mays
MIPVSADIPVELRFLLECATGSNFDSIRLELCQLVDSGLDGCILVLRVCLNQMLLNAGEVKNLQLQQKLLSDVFRYCLHKTCFTTSFCEALATIALTDDFLESLTNLLELSVAEKIGVGLALSDSEDSEMKQKGQWFSIAQIEKLCTSHIQSLSNGQIHEIVMFLHQSDGLSKHMDTFNNIISLLKVTERPFFVPVTNGDFDSQANPSRHLEMYFGSTNDDFESLLSEIGKEISMADIVAELGYGFTVDSTHCKEILSIVEPLDDIAISKLLGAVVGTHIGLGEAHNTYATFVSAIRNSHTNDSPQPTKWNTDVLVDSINELAPSTNWVRVIEYLDHEGFNIPDEASFYLLMSIYECACKDPFPLHAVCGSLWENTEGQISFLKHAVCAPSDKFTFAHSSRHLAFQDLAGPSQGNHAWFCLDLLEVLCQLAEVGYTASVRSMLEYPLGHCPELLLVGVSHISTVYNLLQNEVLSCVFPALLKDPTKRNVVNYLWHTNSYLTLQGFVDAHNDPDCLLRIVDVCHDLKILSTVLDSTPFAFSIKLAAASLRKDYSNLEKWLTEKLSLYGKGFVEECVNFLKATMSNTDYVLEGTTQPQSIVRNIYWESSYAFIKVYMVLQSHSGQLLSDAILDEIRKLCVSFESRNPSSAVRELANSDGGSDDIEVEANAYFQHMFSGQISVDSMIQMLGRFKESTDKREVSIFNCMISNLFKEYTFFPKYPDKQLKIAAVLFGSLIKHQLVAHSELGIALRGVRDALRKPVDSKMFMFGTSALEQFMDRVIEWPRYCNYILQISHLRGTHLEMVSVIERALAKISSSQNEPNVGNLLSAEQHVSGSSSMEGIEASESSWLMGTIPSQLGRPLSSPLQHRQQGLLSERSEVSMNSLNKSNLSSQPPLASSSADLTINSKTTAPPSLLASPHQSISVSTSVHVGFLRSRSTPGLPRQPSYTTGFGTALNIETLVAAAEQRDIPIETPPPEVQDKILFMINNISISNMEAKAKEFNEVIQEQHYPWFAQYMVMKRASIEPNFHDLYLKFFDKLNSKSLNKEMLKATYENCKVLLRSDLIKSSSEERSLLKNLGSWLGKFTIGRNQALRAKEIDPKSLIVEAYEKGLMIAVIPFTSKILEPCQSSIAYRPPNPWTIGILSLLAEIYNLPNLKMNLKFDIEVLFKNLTVDMKDVKPTSLLKDRLREVEGNPDFSNKDVTTSQTPVVPEVLPGTIPSSTHVELQPEINITSRAMSLPNILNQYVAPVRLPTNSTVEADKVALMMPEQVSSLTQLMAAIPRDEICFKINPKLGSIGPQLQYSKIMDLALDKANREIILPVIQRSVTIASRTTKELILKDYALESDNNMITRSAHLMVGTLAGSLAHVTCKEPLRVALYSNLRNLIQNLMSGSETIEQIIHMLVNDNLDLGCAIIEAVATRQAVELIDAEIAQSFSQQRKQREGGGPTYHETFAYAQGPFARVPEALSSKPGHLSASQQRVYEDFVHVWHPHNQNVGATGSGLSGVATVSSTLGVLRAYSPNSTSASSSNLSTVHMGGLTCITQPTELGSEDTVIAQFLSNPAQVGPSESPVLFSGTVGAASTFSPLASNDLPEISAMVPPPSTSADRLGSILPEPLNTGDALERYKQVAQKLEALIANDGKHVEIQSVIAEVPDMLRRCVSRDEAALVVAQKVFKSLYDNASNSAYVSWLLATLIAIRDVCKLVVKELTSWVIYSDEEKKFNIEIIFGLIHSKLLNLGEYNVHLTKLIDGGRNKVATEFAMSLVQTLITQDPVSISELHNVVDAISKVAVLFSEWCQICSHVNASDAIYSRFV

SEQ ID NO: 227769 - protein, 1809 aa, Zea Mays
MIPVSADIPVELRFLLECATGSNFDSIRLELCQLVDSGLDGCILVLRVCLNQMLLNAGEVKNLQLQQKLLSDVFRYCLHKTCFTTSFCEALATIALTDDFLESLTNLLELSVAEKIGVGLALSDSEDSEMKQKGQWFSIAQIEKLCTSHIQSLSNGQIHEIVMFLHQSDGLSKHMDTFNNIISLLKVTERPFFVPVTNGDFDSQANPSRHLEMYFGSTNDDFESLLSEIGKEISMADIVAELGYGFTVDSTHCKEILSIVEPLDDIAISKLLGAVVGTHIGLGEAHNTYATFVSAIRNSHTNDSPQPTKWNTDVLVDSINELAPSTNWVRVIEYLDHEGFNIPDEASFYLLMSIYECACKDPFPLHAVCGSLWENTEGQISFLKHAVCAPSDKFTFAHSSRHLAFQDLAGPSQGNHAWFCLDLLEVLCQLAEVGYTASVRSMLEYPLGHCPELLLVGVSHISTVYNLLQNEVLSCVFPALLKDPTKRNVVNYLWHTNSYLTLQGFVDAHNDPDCLLRIVDVCHDLKILSTVLDSTPFAFSIKLAAASLRKDYSNLEKWLTEKLSLYGKGFVEECVNFLKATMSNTDYVLEGTTQPQSIVRNIYWESSYAFIKSHSGQLLSDAILDEIRKLCVSFESRNPSSAVRELANSDGGSDDIEVEANAYFQHMFSGQISVDSMIQMLGRFKESTDKREVSIFNCMISNLFKEYTFFPKYPDKQLKIAAVLFGSLIKHQLVAHSELGIALRGVRDALRKPVDSKMFMFGTSALEQFMDRVIEWPRYCNYILQISHLRGTHLEMVSVIERALAKISSSQNEPNVGNLLSAEQHVSGSSSMEGIEASESSWLMGTIPSQLGRPLSSPLQHRQQGLLSERSEVSMNSLNKSNLSSQPPLASSSADLTINSKTTAPPSLLASPHQSISVSTSVHVGFLRSRSTPGLPRQPSYTTGFGTALNIETLVAAAEQRDIPIETPPPEVQDKILFMINNISISNMEAKAKEFNEVIQEQHYPWFAQYMVMKRASIEPNFHDLYLKFFDKLNSKSLNKEMLKATYENCKVLLRSDLIKSSSEERSLLKNLGSWLGKFTIGRNQALRAKEIDPKSLIVEAYEKGLMIAVIPFTSKILEPCQSSIAYRPPNPWTIGILSLLAEIYNLPNLKMNLKFDIEVLFKNLTVDMKDVKPTSLLKDRLREVEGNPDFSNKDVTTSQTPVVPEVLPGTIPSSTHVELQPEINITSRAMSLPNILNQYVAPVRLPTNSTVEADKVALMMPEQVSSLTQVLPAQTQSPSPSPFSVNQLMAAIPRDEICFKINPKLGSIGPQLQYSKIMDLALDKANREIILPVIQRSVTIASRTTKELILKDYALESDNNMITRSAHLMVGTLAGSLAHVTCKEPLRVALYSNLRNLIQNLMSGSETIEQIIHMLVNDNLDLGCAIIEAVATRQAVELIDAEIAQSFSQQRKQREGGGPTYHETFAYAQGPFARVPEALSSKPGHLSASQQRVYEDFVHVWHPHNQNVGATGSGLSGVATVSSTLGVLRAYSPNSTSASSSNLSTVHMGGLTCITQPTELGSEDTVIAQFLSNPAQVGPSESPVLFSGTVGAASTFSPLASNDLPEISAMVPPPSTSADRLGSILPEPLNTGDALERYKQVAQKSVIAEVPDMLRRCVSRDEAALVVAQKVFKSLYDNASNSAYVSWLLATLIAIRDVCKLVVKELTSWVIYSDEEKKFNIEIIFGLIHSKLLNLGEYNVHLTKLIDGGRNKVATEFAMSLVQTLITQDPVSISELHNVVDAISKVLAAQVNKEESIANETTLIDPNQ

SEQ ID NO: 227770 - protein, 1809 aa, Zea Mays
MIPVSADIPVELRFLLECATGSNFDSIRLELCQLVDSGLDGCILVLRVCLNQMLLNAGEVKNLQLQQKLLSDVFRYCLHKTCFTTSFCEALATIALTDDFLESLTNLLELSVAEKIGVGLALSDSEDSEMKQKGSHFCMVIDIASSVPGQWFSIAQIEKLCTSHIQSLSNGQIHEIVMFLHQSDGLSKHMDTFNNIISLLKVTERPFFVPVTNGDFDSQANPSRHLEMYFGSTNDDFESLLSEIGKEISMADIVAELGYGFTVDSTHCKEILSIVEPLDDIAISKLLGAVVGTHIGLGEAHNTYATFVSAIRNSHTNDSPQPTKWNTDVLVDSINELAPSTNWVRVIEYLDHEGFNIPDEASFYLLMSIYECACKDPFPLHAVCGSLWENTEGQISFLKHAVCAPSDKFTFAHSSRHLAFQDLAGPSQGNHAWFCLDLLEVLCQLAEVGYTASVRSMLEYPLGHCPELLLVGVSHISTVYNLLQNEVLSCVFPALLKDPTKRNVVNYLWHTNSYLTLQGFVDAHNDPDCLLRIVDVCHDLKILSTVLDSTPFAFSIKLAAASLRKDYSNLEKWLTEKLSLYGKGFVEECVNFLKATMSNTDYVLEGTTQPQSIVRNIYWESSYAFIKVLQSHSGQLLSDAILDEIRKLCVSFESRNPSSAVRELANSDGGSDDIEVEANAYFQHMFSGQISVDSMIQMLGRFKESTDKREVSIFNCMISNLFKEYTFFPKYPDKQLKIAAVLFGSLIKHQLVAHSELGIALRGVRDALRKPVDSKMFMFGTSALEQFMDRVIEWPRYCNYILQISHLRGTHLEMVSVIERALAKISSSQNEPNVGNLLSAEQHVSGSSSMEGIEASESSWLMGTIPSQLGRPLSSPLQHRQQGLLSERSEVSMNSLNKSNLSSQPPLASSSADLTINSKTTAPPSLLASPHQSISVSTSVHVGFLRSRSTPGLPRQPSYTTGFGTALNIETLVAAAEQRDIPIETPPPEVQDKILFMINNISISNMEAKAKEFNEVIQEQHYPWFAQYMVMKRASIEPNFHDLYLKFFDKLNSKSLNKEMLKATYENCKVLLRSDLIKSSSEERSLLKNLGSWLGKFTIGRNQALRAKEIDPKSLIVEAYEKGLMIAVIPFTSKILEPCQSSIAYRPPNPWTIGILSLLAEIYNLPNLKMNLKFDIEVLFKNLTVDMKDVKPTSLLKDRLREVEGNPDFSNKDVTTSQTPVVPEVLPGTIPSSTHVELQPEINITSRAMSLPNILNQYVAPVRLPTNSTVEADKVALMMPEQVSSLTQLMAAIPRDEICFKINPKLGSIGPQLQYSKIMDLALDKANREIILPVIQRSVTIASRTTKELILKDYALESDNNMITRSAHLMVGTLAGSLAHVTCKEPLRVALYSNLRNLIQNLMSGSETIEQIIHMLVNDNLDLGCAIIEAVATRQAVELIDAEIAQSFSQQRKQREGGGPTYHETFAYAQGPFARVPEALSSKPGHLSASQQRVYEDFVHVWHPHNQNVGATGSGLSGVATVSSTLGVLRAYSPNSTSASSSNLSTVHMGGLTCITQPTELGSEDTVIAQFLSNPAQVGPSESPVLFSGTVGAASTFSPLASNDLPEISAMVPPPSTSADRLGSILPEPLNTGDALERYKQVAQKSVIAEVPDMLRRCVSRDEAALVVAQKVFKSLYDNASNSAYVSWLLATLIAIRDVCKLVVKELTSWVIYSDEEKKFNIEIIFGLIHSKLLNLGEYNVHLTKLIDGGRNKVATEFAMSLVQTLITQDPVSISELHNVVDAISKVLAAQVNKEESIANETTLIDPNQ

SEQ ID NO: 227771 - protein, 1847 aa, Zea Mays
MIPVSADIPVELRFLLECATGSNFDSIRLELCQLVDSGLDGCILVLRVCLNQMLLNAGEVKNLQLQQKLLSDVFRYCLHKTCFTTSFCEALATIALTDDFLESLTNLLELSVAEKIGVGLALSDSEDSEMKQKGSHFCMVIDIASSVPGQWFSIAQIEKLCTSHIQSLSNGQIHEIVMFLHQSDGLSKHMDTFNNIISLLKVTERPFFVPVTNGDFDSQANPSRHLEMYFGSTNDDFESLLSEIGKEISMADIVAELGYGFTVDSTHCKEILSIVEPLDDIAISKLLGAVVGTHIGLGEAHNTYATFVSAIRNSHTNDSPQPTKWNTDVLVDSINELAPSTNWVRVIEYLDHEGFNIPDEASFYLLMSIYECACKDPFPLHAVCGSLWENTEGQISFLKHAVCAPSDKFTFAHSSRHLAFQDLAGPSQGNHAWFCLDLLEVLCQLAEVGYTASVRSMLEYPLGHCPELLLVGVSHISTVYNLLQNEVLSCVFPALLKDPTKRNVVNYLWHTNSYLTLQGFVDAHNDPDCLLRIVDVCHDLKILSTVLDSTPFAFSIKLAAASLRKDYSNLEKWLTEKLSLYGKGFVEECVNFLKATMSNTDYVLEGTTQPQSIVRNIYWESSYAFIKVLQSHSGQLLSDAILDEIRKLCVSFESRNPSSAVRELANSDGGSDDIEVEANAYFQHMFSGQISVDSMIQMLGRFKESTDKREVSIFNCMISNLFKEYTFFPKYPDKQLKIAAVLFGSLIKHQLVAHSELGIALRGVRDALRKPVDSKMFMFGTSALEQFMDRVIEWPRYCNYILQISHLRGTHLEMVSVIERALAKISSSQNEPNVGNLLSAEQHVSGSSSMEGIEASESSWLMGTIPSQLGRPLSSPLQHRQQGLLSERSEVSMNSLNKSNLSSQPPLASSSADLTINSKTTAPPSLLASPHQSISVSTSVHVGFLRSRSTPGLPRQPSYTTGFGTALNIETLVAAAEQRDIPIETPPPEVQDKILFMINNISISNMEAKAKEFNEVIQEQHYPWFAQYMVMKRASIEPNFHDLYLKFFDKLNSKSLNKEMLKATYENCKVLLRSDLIKSSSEERSLLKNLGSWLGKFTIGRNQALRAKEIDPKSLIVEAYEKGLMIAVIPFTSKILEPCQSSIAYRPPNPWTIGILSLLAEIYNLPNLKMNLKFDIEVLFKNLTVDMKDVKPTSLLKDRLREVEGNPDFSNKDVTTSQTPVVPEVLPGTIPSSTHVELQPEINITSRAMSLPNILNQYVAPVRLPTNSTVEADKVALMMPEQVSSLTQLMAAIPRDEICFKINPKLGSIGPQLQYSKIMDLALDKANREIILPVIQRSVTIASRTTKELILKDYALESDNNMITRSAHLMVGTLAGSLAHVTCKEPLRVALYSNLRNLIQNLMSGSETIEQIIHMLVNDNLDLGCAIIEAVATRQAVELIDAEIAQSFSQQRKQREGGGPTYHETFAYAQGPFARVPEALSSKPGHLSASQQRVYEDFVHVWHPHNQNVGATGSGLSGVATVSSTLGVLRAYSPNSTSASSSNLSTVHMGGLTCITQPTELGSEDTVIAQFLSNPAQVGPSESPVLFSGTVGAASTFSPLASNDLPVSEISAMVPPPSTSADRLGSILPEPLNTGDALERYKQVAQKLEALIANDGKHVEIQSVIAEVPDMLRRCVSRDEAALVVAQKVFKSLYDNASNSAYVSWLLATLIAIRDVCKLVVKELTSWVIYSDEEKKFNIEIIFGLIHSKLLNLGEYNVHLTKLIDGGRNKVATEFAMSLVQTLITQDPVSISELHNVVDAISKLAWGPGSPESLQQLIGIARNNVLAAQVNKEESIANETTLIDPNQ

SEQ ID NO: 227772 - protein, 1650 aa, Zea Mays
MIPVSADIPVELRFLLECATGSNFDSIRLELCQLVDSGLDGCILVLRVCLNQMLLNAGEVKNLQLQQKLLSDVFRYCLHKTCFTTSFCEALATIALTDDFLESLTNLLELSVAEKIGVGLALSDSEDSEMKQKGSHFCMVIDIASSVPGQWFSIAQIEKLCTSHIQSLSNGQIHEIVMFLHQSDGLSKHMDTFNNIISLLKVTERPFFVPVTNGDFDSQANPSRHLEMYFGSTNDDFESLLSEIGKEISMADIVAELGYGFTVDSTHCKEILSIVEPLDDIAISKLLGAVVGTHIGLGEAHNTYATFVSAIRNSHTNDSPQPTKWNTDVLVDSINELAPSTNWVRVIEYLDHEGFNIPDEASFYLLMSIYECACKDPFPLHAVCGSLWENTEGQISFLKHAVCAPSDKFTFAHSSRHLAFQDLAGPSQGNHAWFCLDLLEVLCQLAEVGYTASVRSMLEYPLGHCPELLLVGVSHISTVYNLLQNEVLSCVFPALLKDPTKRNVVNYLWHTNSYLTLQGFVDAHNDPDCLLRIVDVCHDLKILSTVLDSTPFAFSIKLAAASLRKDYSNLEKWLTEKLSLYGKGFVEECVNFLKATMSNTDYVLEGTTQPQSIVRNIYWESSYAFIKVLQSHSGQLLSDAILDEIRKLCVSFESRNPSSAVRELANSDGGSDDIEVEANAYFQHMFSGQISVDSMIQMLGRFKESTDKREVSIFNCMISNLFKEYTFFPKYPDKQLKIAAVLFGSLIKHQLVAHSELGIALRGVRDALRKPVDSKMFMFGTSALEQFMDRVIEWPRYCNYILQISHLRGTHLEMVSVIERALAKISSSQNEPNVGNLLSAEQHVSGSSSMEGIEASESSWLMGTIPSQLGRPLSSPLQHRQQGLLSERSEVSMNSLNKSNLSSQPPLASSSADLTINSKTTAPPSLLASPHQSISVSTSVHVGFLRSRSTPGLPRQPSYTTGFGTALNIETLVAAAEQRDIPIETPPPEVQDKILFMINNISISNMEAKAKEFNEVIQEQHYPWFAQYMVMKRASIEPNFHDLYLKFFDKLNSKSLNKEMLKATYENCKVLLRSDLIKSSSEERSLLKNLGSWLGKFTIGRNQALRAKEIDPKSLIVEAYEKGLMIAVIPFTSKILEPCQSSIAYRPPNPWTIGILSLLAEIYNLPNLKMNLKFDIEVLFKNLTVDMKDVKPTSLLKDRLREVEGNPDFSNKDVTTSQTPVVPEVLPGTIPSSTHVELQPEINITSRAMSLPNILNQYVAPVRLPTNSTVEADKVALMMPEQVSSLTQLMAAIPRDEICFKINPKLGSIGPQLQYSKIMDLALDKANREIILPVIQRSVTIASRTTKELILKDYALESDNNMITRSAHLMVGTLAGSLAHVTCKEPLRVALYSNLRNLIQNLMSGSETIEQIIHMLVNDNLDLGCAIIEAVATRQAVELIDAEIAQSFSQQRKQREGGGPTYHETFAYAQGPFARVPEALSSKPGHLSASQQRVYEDFVHVWHPHNQNVGATGSGLSGVATVSSTLGVLRAYSPNSTSASSSNLSTVHMGGLTCITQPTELGSEDTVIAQFLSNPAQVGPSESPVLFSGTVGAASTFSPLASNDLPEISAMVPPPSTSADRLGSILPEPLNTGDALERYKQVAQKYLVIP

SEQ ID NO: 227773 - protein, 177 aa, Zea Mays
MVTPFVASPGTDHVSRSSPGAWLILRPADGTWAPWGRLECWRGRGDTLGYRFELVPGHATGGAGVCVAEASVPASRGGRFAIDLTAAAQPFWCSSSGDMGHGIWPFGGFVMSAAVQGEGRCSRPTVEVGVAHVGCAEDAAAFVALAAAVDLSMDACRLFSCKLRRELSTASRAEFLR

SEQ ID NO: 227774 - protein, 67 aa, Zea Mays
MTFKRRNGGRNKHGRGHVKYIRCSNCAKCCPKDKAIKRFQVRNIVEQAAIRDVQEACVYDGKISLFL

SEQ ID NO: 227775 - protein, 330 aa, Zea Mays
MHMLPTDLMRAVVPIFPPSESKIVREGRLRGERHPGELQCAPSDFFMLFDTNADGVISFAEYIFFVTLLSIPESSFNVAFKMFDLDHNGEIDKDEFRKVMTLMRSYNRQGAAHRDGLRFGRKVGQPVENGGLVEYFFGKDGNEHLHYDKFSSFLKQLHDEIVRLEFSHYDLKSSNTISAKDFALSMVASADMNHIDKLLDRVDDLDDNLDLKDLRITFEEFKAFADLRRRLEPFAMAIFSYGKVNGLLTKQDLKRAASHVCGVDLTDKVVDIIFHVFDANCDGNLSSEEFLRSLQRRENDIRQPATSGFLGVIACWLNCTKCSLQQMLPQ

SEQ ID NO: 227776 - protein, 318 aa, Zea Mays
MSQTNWEADKMLDVYIYDYFMKRNLQATAKAFQAEGKVSSDPVAIDAPGGFLFEWWSVFWDIFIARTNEKHSDVAASYIEVQMSTLFQTQLMKAREQQHQQQQQIPQQRQQQPQHIQMQQMLLQRAVQQQQQQQQQQQQQQQQQQQQQQQQQPQQQQQQQLQQQQLQQQRRDGSHLLNGSANGISGNNPLMRQNQSTANVMATKMYEERLKVPSERDSLEEASLKQRYGENAGQLLDSNEASLLKAASSAQSSGQILHGTVGGLSGTLQQVQARSPQLPGPAQQGIKTEINPILTPRAAGPEGSFIGAQGSNQAGNNL

SEQ ID NO: 227777 - protein, 240 aa, Zea Mays
MSTLFQTQLMKAREQQHQQQQQIPQQRQQQPQHIQMQQMLLQRAVQQQQQQQQQQQQQQQQQQQQQQQQQPQQQQQQQLQQQQLQQQRRDGSHLLNGSANGISGNNPLMRQNQSTANVMATKMYEERLKVPSERDSLEEASLKQRYGENAGQLLDSNEASLLKAASSAQSSGQILHGTVGGLSGTLQQVQARSPQLPGPAQGIKTEINPILTPRAAGPEGSFIGAQVKKCAWRIQPCHMI

SEQ ID NO: 227778 - protein, 422 aa, Zea Mays
MALAPSPPALPPNPALPLPWWGRAGRGALLGARARVRAVRAALRPPSQWSVGSWRGRPAQQQPEYPDKADLEDVLRTVGTFPPIVFAGEARTLEERLAEAAVGRAFLLQGGDCAESFKEFNANNIRDTFRVLLQMSVVLMFGGQMPVVKVGRMAGQFAKPRSDGFEERNGLKLPSYRGDNINGDAFNGESRLPDPHRMIRAYSQSAATLNLLRAFATGGYAAMQRVAQWNLDFTENSEQGDRYMELAHRVDEALGFMSAAGLPLDHPIMTTAEFWTSHECLLLPYEQALTREDSTTGLYYDCSAHFLWVGERTRQLDGAHVEFLRGIANPLGIKVSDKMDPAELVRLIDILNPENRAGRITIITRMGPENMRVKLPHLIRAVRGAGQIVTWVTDPMHGNTMKAPCGLKTRSFDRILVFVRLD

SEQ ID NO: 227779 - protein, 2197 aa, Zea Mays
MHRYSSNSAGFSGGRDGARLEASPFSSSSSGYPVSSRRQQQLVPYKLKCDKDPLNNKLGPPDFYPQTPNCPEETLTKEYAQAGYKETVEGIEEAREIVLSQIPYFCKPDAVIKCKEKRLRAINESRAQKRKAGQVYGVPLSGSLLIKPGVYPEQRPCNEDARRKWIEALAQPNKRLRSLSEHVPHGYRRKSLFEGLIRYNVPLLRATWFIKVTYLNQTRQTPNSISVAGSDNQRSNQWTKDVVEYLQHILDEFCSKEGAFVHPSFREQSSPGPTAGTNQIKMKTEASPAAGDIEEPLVHFKWRYMVRLIQWHLTEELLVPSVLIEWLSNQLQERDSVDVLELLLPIMLGLVDTITLSQTYVRMFVELLVRRLNDASVVDSPKGPSVSSVIAELLRYMVLAVPDTFISLDCFPLPSFVVPDVYGRGALLKITSSGGISSSKRCDAYRYLSCGYAVCSIQKRAYDLATVANPNLQARGAAKVVQALDIALVTGNLSVAYSSLFNDLSDTLMEERWIKEVSPSLQSSLMWIGTVELSLICSIFFLCEWATCDYRDCRASPSRNVKFTGRRDLSQIHMAVSILKNKMDEMNNLSRSKSSTRVTLNNITKGSSLTDACLTAAAVDDTSGLQSNAKNVDEKKDTNDIFESPGPLHDIIVCWLDQHEVSSVAGFTRVDVLIVELIRNGIFFPQAYVRQLIISGITDKNDTMLDVERKRRHHRTLKQLPGSSLFDILEETRTVEEQQLYEMMSTYSSERRLVLSELSCDHSFYASGRGEYTASSCIRKQSDLPLASGGDKHGRVPEQVEDVKALLSSLLGFTYPSPVESEPRQIKTSFQESATSTLSQVETGEAKSGCEVCMRSKGQKLDDTATPFQGFSLIQSDEEDIWWVRKGTKLQESFNIEPVQKSVKQTSRGRAKVVRKTQSLAQLAAARIEGSQGTSTSHVCESKMSCPHHKPNIDGDNVKDFDHTRVANLTEIGKSLKRLRLLERRSVSSWLLKTVRQLIEGNETTAAKATNSISILSLQSDDKTTSKWRLGDEELLSVLYLLDTCCDLVSCARFLVWLLAKIRGGMGSSGQPGRSSMHTRNRDHQVCQVSEALVFSSLLRYENILLAADILPDVLSALVNRNSVSAIVRHPGSTAFAYVRYFLKKYRDVAGVAKWEKSFRTTCDQRLLAELDNGRSIDGELISSSGVSAGEEIDEQVRQKLNGRSSRLVQNMKEIVQRQADEIQRSLKEKKVLATPRNPPTFEKEDSYQIAHDIVSGLVECIRQNGGANPDGDLSTVASAVSAIVANAGHVIAKHLDFAGGNYQGVNSVSNSLNFVRHTLRVHINSLCLLKETLGDRFSRAFEIALAVETSGAVTAAFASPKMHRNQFQPSPEAHDAYGNHTSDLSNSGKGFVGRTAKVSAAVSALVVGAVVHGAVSLERMVAALKIKDGLDILQLLRGLKSSSNGVSRPTGTFRIEHSTDVLVHWFRVLLGNCRTVYDGLIADILGDSYILALSRLQQMLPLSVIFPPAYSIFAMVLWRRYIFNREDPQLYQSLSNAISDITRHQPFREICFRNTHRLYNLLASDVGDSEFAAMLETHSPDRNSKILPFIPLRARLFLDALIDCNTPTIQGDGASEPCDPKDNELKLSERLMQLLDTLQPAKFHWQWVEMRLLLDEQALMEKVAAGKTALESLRSLSPKAEGFTLSDSEKGFTEVILSRLLARPDAAPLYSEAVRLLGKLQESLVMDVKWILQGQDAILGRRSTRQQLVHIAQRKGLSTKAQVWKPWGWSSLLSDVIPNKTAKRKLEVTSIEEGEVVDDTVDAKRPSKTPPHSVDRSFEAIRSINKYLTEKALAELVLPCIDRSSADIRGILSVDLIKQMGTISEHIKAIARNGAKQAGSVPSGNEVPSSKSSGRKGIRGGSPNIGRRAPVGNDPSPPSASALRAALWLRLQFIIRLLPVIMADRSMRQTLASAILGLLATRMIYEDADLPLPPTNATALRREVDSLLEPPLDVLLDRPGESLFERLLCVLHALLGSYKPSWLKSRSASRSTIRIQRDFSAFDNEAAEGLQSALDHMELPETIRRRIQAAMPLLPPSRHPSLQCQPPQLSLAALTPLQSSTSGVGPQQKSCSASWVPTNVSGRSKAALPSHDPEMEVDPWNLLEDGTSCPSTASGSHGASGVTGDHANLKACSWLKGAVRVRRTELTYIGSLDDDT

SEQ ID NO: 227780 - protein, 890 aa, Zea Mays
MEPTPRRRGKKSTKGVQRLKVAKDKVMKLKVTTPSTVKKKKMTEDDIQHIGAHRSNSARRKLDLDLHSSESKTCFSRAELMINLKCIGKSYGLISELTTHKRSKRGKKRKMMVGNKESGQLALLPYNWTTTVAVSRPLTHVKKLRAKVLGLTDETMRVCAVLANWNGSDNESFEGFDIGNGPEWDTTRQMFEQFVDIFINAMFDLIGPRKYSQWGGSLIDSVVGTFLTQNSADNLSSQAFMNIAAKFPKSERHCQDNATQLIDGVDRKMKSKEAFDNFDLVHSHFDEYIKSEEEVDFDKKVKSQYGEDYNRIIGNFAASMKQKNISTWDSDLMNLVKDKYGNPVCDENNLRKILASLRQPVTASNWKELQEEAYKKGYNNKSQTETSDVVDWESVLNAPFSEVAKCIAIRGQHNILAVRILAFLDHVKKAQDGSFDLDWLRFVSREKAKKFLLSIHGIGVKSADCICLLSLRHRAFPVDVNVARIVTRLGWVKLQPLNGADFHLIDLYPILDDVQRYLWPRLCTIDKEKLYELHCLMITFGKVVCRKKNPNCGACPFSASCKYYNSSLAKKSLPLPEKHEQGEQQTSMVAYGSCTPSSQQMYRYQIAISSTTTETPPIHSCEPIVEMPPSPEYEYNETPNEQEDFYEDYACDIEDFAPGVQYDSEINICSNKHTLNNNSWTPNCGKDLAVINPKCSFGQSKKLKNTGRLRTEHNAYVLPDGHVILEEFEDRVPGDRCPYLLVVISCPDDYKVKGTVLIPCRTANRGKFPLNGTYFQENEVFADYSSSRNPITVPRECIGMLERSIVYFGSSIHSITKGQTRQDIQECLKEGYICVRSFHRKTRIPLRLCSTLHATNTKPAREKPMKRTRTSPEGKKNGTSPEGKKNESLF

SEQ ID NO: 227781 - protein, 916 aa, Zea Mays
MAEEKGRSKTDPFFTLTISAANRNTQSRARSWRGLQILPLQDSTAEFAPTTGPAAMAAAADLEPQLGISPATPDIVRKLARPSGTTTAVGYCCTALYTSTAAGPGKVDGDGLASVPLHAHEHSQSAALDNLVQVDCDPVGTQESSTLPALVGESSGKVAQQEQQHKEGVDSARDAGAASPAPTSTPENMEPTPRRRGKKSTKGVQRLKVAKDKVMKLKVTTPSTVKKKKMTEDDIQHIGAHRSNSARRKLDLDLHSSESKTCFSRAELMINLKCIGKSYGLISELTTHKRSKRGKKRKMMVGNKESGQLALLPYNWTTTVAVSRPLTHVKKLRAKVLGLTDETMRVCAVLANWNGSDNESFEGFDIGNGPEWDTTRQMFEQFVDIFINAMFDLIGPRKYSQWGGSLIDSVVGTFLTQNSADNLSSQAFMNIAAKFPKSERHCQDNATQLIDGVDRKMKSKEAFDNFDLVHSHFDEYIKSEEEVDFDKKVKSQYGEDYNRIIGNFAASMKQKNISTWDSDLMNLVKDKYGNPVCDENNLRKILASLRQPVTASNWKELQEEAYKKGYNNKSQTETSDVVDWESVLNAPFSEVAKCIAIRGQHNILAVRILAFLDHVKKAQDGSFDLDWLRFVSREKAKKFLLSIHGIGVKSADCICLLSLRHRAFPVDVNVARIVTRLGWVKLQPLNGADFHLIDLYPILDDVQRYLWPRLCTIDKEKLYELHCLMITFGKVVCRKKNPNCGACPFSASCKYYNSSLAKKSLPLPEKHEQGEQQTSMVAYGSCTPSSQQMYRYQIAISSTTTETPPIHSCEPIVEMPPSPEYEYNETPNEQEDFYEDYACDIEDFAPGVQYDSEINICSNKHTLNNNSWTPNCGKDLAVINPKCSFGQSKKLKNTGRLRTEHNASKTEFREIDVLTY

SEQ ID NO: 227782 - protein, 367 aa, Zea Mays
MGKAARWFRSFLGKKDQATTKGQRRQQDQALPPPASAKRWSFGKSSRDSAEAAAAATAAAAVVSPDAGNAAIARAAEAAWLRSAACAETDRDREQSKHAIAVAAATAAAADAAVAAAQAAVAVVRLTSKGRPPSPVVLAAVRIQTVFRGFLAKKALRALKALVKLQALVRGYLVRRQAAATLQSMQALVRAQAAVRERRAALHHQPVRPRYSLQERYADDTRSEHGVAAYSSRRLSASVESPSYGYDRSPKIVEVDPGRPKSRSSSRRASAPLLDARSSGSGGGEEWCANNPASSPLPCYLPSGPRRIAVPTSRQFPDYDWCVLEKARPATAQSTPRYLQAHAPATPTKSVAGYSPSLNACPNYMSS

SEQ ID NO: 227783 - protein, 146 aa, Zea Mays
MKGGEQISFLYPSGVDRFKLQFAHLEEHYSKGERGSPLQRKHASLPRERVVVSKDGNTEQQINDQERSADSVARTTVSPPRSEDADMDDVKPTSLSSRSYLKSASISASKCVVVRNKHPEPEDDGIPEEMEGTVDGLSEKVSRMHS

SEQ ID NO: 227784 - protein, 164 aa, Zea Mays
MLILDQIFVWTKLTNTIQKRLKVSSTQLLYQSAPYQAAILFASGPFVDQLLTNRSVFAHKYSATVLGFIVLSCLIAVSVNFSTFLVIGTTSPVTYQVLGHLKTCLVLSFGYTLLHDPFTLRNILGILIAIFGMALYSYFSVREGKKKSANDALPVSQIQHCVHF

SEQ ID NO: 227785 - protein, 396 aa, Zea Mays
MPLGKRGNQIIVQILATIPGRATGAYSHSQGIKGLRDAIAAGITSRDGFPANADDIFITDGASPGVHMMMQLLIRNEKDGILCPIPQYPLYSASIALHGGALVPYYLDEKTGWGLEISDLKKQLEDARSKGIDVRALVVINPGNPTGQVLAEDNQYDIVKFCKNEGLVLLADEVYQENIYVDNKKFNSFKKIARSMGYGEDDLPLVSFQSVSKGYYGECGKRGGYMEITGFSAPVREQIYKVASVNLCSNITGQILASLVMNPPKVGDESYASYKAEKDGILQSLARRAKALEDAFNTLEGFSCNKAEGAMYLFPQIHLPHKAIEAAKAAKKAPDAFYALRLLESTGIVVVPGSGFGQVPGTWHVRCTILPQEDKIPAVITRFKAFHEAFMAEYRD

SEQ ID NO: 227786 - protein, 107 aa, Zea Mays
MVSPPAPGSGPPASVAAQLSVEAAARGLAPPEPLGAAALARSGEEGVQALAALARLGEAPQALEALGRPGEEAVRAWAAPALGAAPQVSGAPGRLSAAVAPRAARRR

SEQ ID NO: 227787 - protein, 188 aa, Zea Mays
MVYATLNDQFCWIQVISMKQNMLIEYALRPETSNGEDSDDKIRVFSSTVNVGTNGAGSSDSHPKSVEKESFELRNEAHAIASMADDAEQSALQMSDSFSFLNNSDPANYIKNHSAYDDLIEHINLQMKSLEYEIEQFINSQSVEEVGSEKQRSDKWQRLSDIQMLIKETREKIARILGMIVEETESGT

SEQ ID NO: 227788 - protein, 193 aa, Zea Mays
MHLVDLDLAEADIKKALEIDPDNRDVKMGYKRLKEKVKEYKRRDAKLYGNMISKLSKLEDTEDNGQMSQTVNKKCGLLWPLSEMVRRFFTADGSKGFTLWPALRLLIPDEWRTGLKALRADSISKLKKAFPELVQEVSRPSNFQDFYIYAFRYCLTVLGLQFHPQVDKLNNYLMYQNDYKAITMDQWMGFIRL

SEQ ID NO: 227789 - protein, 644 aa, Zea Mays
MSMDFGAPADDPKAFRNICRDRILKDLLKPDKDKETKSSWKVLIMDKFTVKIMAYACKMAEITDAGISLVEDLFKRREPMPSMDAIYFLQPLKENVIMLLSDMSGRCPLYRKAYIFFSSPIPKDLVTYIKNDSSVIPRIGALREMNLEFFTIDMQGFVTDHDTALIDLYGPSEQNSKKFNDTISTMATRIATTFASLKEFPCVRYRAPKGDASTTTKFDMVPKWLATAVWEIVSKYKSTIPEFPQKETCELLIVDRPIDQIAPVIHEWTYDAMCHDLLEMDGNKYIYEVSKMGSEPEKKESLLEDHDPLWLELRHAHIADASERLYEKMNNFVAKNKAAQLSRDGGEVSTRDLQKIVQALPQYSDQVEKLTLHIEIAGKMNRCIREYGLRDIGQLEQDLVFGDAGAKEVISILRSKQDMSPENKMRLLIIYAIVYPEKFEGDKGEKLMQLAKLPHDDMDIINCLGYLDGSNTKKSSRTGTFSLKFDAQKELIEKLSKGELPLKEYPSMSEPSSASASQDATQTASSTARPAQNPQPMSMRSRRTPTWAKSRNSDDSSSSDSSVLRHASGDFKRLGNRIFVFMIGGATRSELRTVHKLTMKMKREIVLGSSSIDDPPQFISVKTQFLFFRFYYYMFMQQLCKCRS

SEQ ID NO: 227790 - protein, 683 aa, Zea Mays
MSMDFGAPADDPKAFRNICRDRILKDLLKPDKDKETKSSWKVLIMDKFTVKIMAYACKMAEITDAGISLVEDLFKRREPMPSMDAIYFLQPLKENVIMLLSDMSGRCPLYRKAYIFFSSPIPKDLVTYIKNDSSVIPRIGALREMNLEFFTIDMQGFVTDHDTALIDLYGPSEQNSKKFNDTISTMATRIATTFASLKLIISRKFHVFCYAKEFPCVRYRAPKGDASTTTKFDMVPKWLATAVWEIVSKYKSTIPEFPQKETCELLIVDRPIDQIAPVIHEWTYDAMCHDLLEMDGNKYIYEVSKMGSEPEKKESLLEDHDPLWLELRHAHIADASERLYEKMNNFVAKNKAAQLSRDGGEVSTRDLQKIVQALPQYSDQVEKLTLHIEIAGKMNRCIREYGLRDIGQLEQDLVFGDAGAKEVISILRSKQDMSPENKMRLLIIYAIVYPEKFEGDKGEKLMQLAKLPHDDMDIINCLGYLDGSNTKKSSRTGTFSLKFDAQKKKNAARTDKQDGEETWALSRFFPLIEELIEKLSKGELPLKEYPSMSEPSSASASQDATQTASSTARPAQNPQPMSMRSRRTPTWAKSRNSDDSSSDSSVLRHASGDFKRLGNRIFVFMIGGATRSELRTVHKLTMKMKREIVLGSSSIDDPPQFISVKTQFLFFRFYYYMFMQQLCKCRS

SEQ ID NO: 227791 - protein, 684 aa, Zea Mays
MSMDFGAPADDPKAFRNICRDRILKDLLKPDKDKETKSSWKVLIMDKFTVKIMAYACKMAEITDAGISLVEDLFKRREPMPSMDAIYFLQPLKENVIMLLSDMSGRCPLYRKAYIFFSSPIPKDLVTYIKNDSSVIPRIGALREMNLEFFTIDMQGFVTDHDTALIDLYGPSEQNSKKFNDTISTMATRIATTFASLKLIISRKFHVFCYAKEFPCVRYRAPKGDASTTTKFDMVPKWLATAVWEIVSKYKSTIPEFPQKETCELLIVDRPIDQIAPVIHEWTYDAMCHDLLEMDGNKYIYEVSKMGSEPEKKESLLEDHDPLWLELRHAHIADASERLYEKMNNFVAKNKAAQLSRDGGEVSTRDLQKIVQALPQYSDQVEKLTLHIEIAGKMNRCIREYGLRDIGQLEQDLVFGDAGAKEVISILRSKQDMSPENKMRLLIIYAIVYPEKFEGDKGEKLMQLAKLPHDDMDIINCLGYLDGSNTKKSSRTGTFSLKFDAQKKKNAARTDKQDGEETWALSRFFPLIEELIEKLSKGELPLKEYPSMSEPSSASASQDATQTASSTARPAQNPQPMSMRSRRTPTWAKSRNSDDSSSSDSSVLRHASGDFKRLGNRIFVFMIGGATRSELRTVHKLTMKMKREIVLGSSSIDDPPQFISVKTQFLFFRFYYYMFMQQLCKCRS

SEQ ID NO: 227792 - protein, 376 aa, Zea Mays
MPPPTGGEDPEADAAPSCSGSADEADPHEQVLPNGDIYTGQWRGAVPHGAGKYLWADGCMYEGEWRRGKATGRGRFSWPSGATYEGEFLDGFMHGAGTYVGASGDTYRGVWAKNLEHGAGEKRYANGDCYDGEWRAGLPDGCGRYAWRDGTEYAGGWRAGLIHGRGTLVWANGNRYDGGWEGGRPRGQGTFRWADGSLYVGFWGREAPSGAVHQKGVYYPSPAAMGNSPRARDPREVFARDLPECVRSGTEAQSALTSLRSLKWLMRSVSGRGSSSSGWSNGSGGSLVHFWGSDGEVKCDLGDDWRRRSVREGRGLPPPSPALVPYLPNGAPLRLSKKQGVTIAKGHKNYELMLNLQLGISRKARSSFIRSEIISI

SEQ ID NO: 227793 - protein, 200 aa, Zea Mays
MALNELRTHAFLQSDASDICENIQFLLGAFETATGEQWLAFRDDGRYSAADYANVTSARQLKEKSGGTPFWNPFDRAYKLELRRYFVLKLLNGAMSGLVHMHNHDRLHQSLGPSSVILNTALDKEGRYLVPRLRDLAFSVDIGYSSIGAGVLSDGLWRRASAAGASTPLEKRAFGIADDMQVFFFPPSTKNEHHSLHALY

SEQ ID NO: 227794 - protein, 144 aa, Zea Mays
MIHFVLLISRQGKVRLTKWYTPYPQKQRSKIIKEISTLVLTRGPKLCNFVDWQGYRVVYKRYASLYFCMCIDPADNELETLQIIHHYVEILDRYFGNVCELDLIFNFHKAYFILDEILIAGELQESNKKSVLRLVTTQLRIGSD

SEQ ID NO: 227795 - protein, 68 aa, Zea Mays
MIHFVLLISRQGKVRLTKWYTPYPQKQRSKIIKEISTLVLTRGPKLCNFVDWQGYRVVYKRYNLFLHI

SEQ ID NO: 227796 - protein, 231 aa, Zea Mays
MMVARLLNLEEAEKERIYEKDVDMKYVQGEQHVVGREDSGVNAHSTSRFGEGSNGDELDVSRNSTRAGKGRSGGSASAELESFPSKKPKYDPVLPASKWSREDDISDDEDRKGGRGLGLSYSSGSDIADGLGKVDTTEASTDHTSRHHDTIVDEEHRQKLRQIEISVMQYRESLEEQGLRDLDEIERKVASHRRRLQSEYGLSTPADGANSRRSSENIIVVGAEREASRCT

SEQ ID NO: 227797 - protein, 260 aa, Zea Mays
MSVPMAIALSGQLLLGQQVMVKPSEAEKNLVQSNASSGAASGGARKLYVGNLHSNINEDQLRQVFEPFGQVELVQLPLDPLSGLCKGFGFVQFARLEDAKAAQSLNGQLEIAGRVIKVSAVTDQAGMQVSGATGDLDDEEAGGLALNASSRALLMQKLDRSGITTSLTGGTGIAGLTTPVAIPTVSVLGAAPAAAPLLHPTVPGLAIPGATLPITTPSIDLAPPSQCLLLKNMFDPALEILISIWTSEMMFRRNVPSLVN

SEQ ID NO: 227798 - protein, 200 aa, Zea Mays
MVSASAPPPQAQSDAAGSGEEVSKKVRKPYTITKSRESWTEQEHDKFLEALQLFDRDWKKIEAFVGSKTVIQIRSHAQKYLLKVQKNGTSEHVPPPRPKRKAAHPYPQKASKNVMPDFAGVYSFLGSVFDPSTSGHLQKLKEMNPIDVETALLLMRNLSINLTSPDFEDQRKLLSLYSASDGPGLGSSRSSALATSAPFM

SEQ ID NO: 227799 - protein, 435 aa, Zea Mays
MKSGQRRLGACEDMLRRRSAEDNMEDRRRTLSLSCTSQVEIMSFIRSYVVPEGFPDSVTPSYVPYMTWRALKHFFGGAMGVFTTRTLLNSVGVSQSRAASGAVAINWILKDGAGRVGKMLFARQGKKFDYDLKQLRFSGDLLMELGAGIELATAAFPQLFLPMACIANVVKNVAAVTSTSTRTPIYKAYAKGENIGDVTAKGESVGNIADLLGTGMSILISKSNPSLVTSFAFLSCGYLLSSYHEVRSVVLNTLNRARFTVAVDSFIRTGYVPSLKDGNSQETIFNPPWRHEPVAIGSRFGDAFQEPASFLAIKPLFEDERYIVTYNPTKDKVYALLKDQAKPDDILKAAFHAHVLLHFINASHANLNARKRMNSNRSYQYDPLNMDFVPHIEESCKIVMSSYGVFKKKAREQGWIMSESLLNPGRARLCGAVPQ

SEQ ID NO: 227800 - protein, 933 aa, Zea Mays
MPLLKWSFSLLGFFMCPCGLRAVRTRVICRYRLLFGRFVCRLEALLSVDLFVLQNTFADYTARTSFERPLLSGVAYAQRVVHADREGFERHQGWIIKTMKHEPSPAQDEYAPVVYSQETVSYIEGLDMMSGEEDRENILRSRASGKAVLTRPFRLMSNHLGVVLTFPVYHADLPSDAKEEDRVAATAGYLGGAFDVESLVENLLRQLAGNQELVVNVYDVTNISNPLVMYGSEVPLGNPSPSHICMLDFGDPFRKHHMVCRYRNKPHVPWSAISTPSGVFVICMLVGYIAGAAWSRYDNVKEDCRKMEELKKQAEAADVAKSQFLATVSHEIRTPMNGVLGMLDMLLDTDLTSTQRDFAQTAQVCGKALISLINEVLDRAKIEARKLDLESVPFDLRSILDDVISLFSSKSREKGIELDVYVSERVPEILLGDPGRFRQIITNLVGNSIKFTERGHIFVQVHLADHSNLATESKVEPVANGMNGHTDEKTAVATSVSLNTLSGFEAADSRNSWENFKLLLSYEKNEMPYESVSDKVTLVVSVEDTGIGIPLDAQAKVFTPFMQADSSTSRTYGGTGIGLSISKCLVELMGGQINFVSRPHVGSTFTFTAVLKRCDRSAIGDSKPVMLHPLPSSFKGLSALLVDRRPVRATVTKYHLQRLGIACDVVATIELALGVLSGRNGSSLTSMKQPCMLLIESDSWGFNIDVSLRSRLLEMKQNGHTHVLPKIILLAAAESGKLKEHYAVDSVITKPLKASALAACLFQTLGIKQSSNERSDNSGSLYGLLLGKNILVVDDNKVNLRVAAGTLKKFGAKVECVESGKDALALLQVPYKFHLCLMDIQMPEMDGFEATKQIRAMEAKANEQAVACDNSEIDGATRAARWRLPVLAMTADVIQATHEECTKCGMDGYVTKPFEEKQLFQALQKFLDPGMSC

SEQ ID NO: 227801 - protein, 885 aa, Zea Mays
MTGERQATRIRSLYLKSVLRQEIAFFDVEMTTGQIVSRMSGDTVLVQDAIGEKVGKFQQLVATFIGGFVIAFVKGWLLSLVMLACIPPVVIAGGIVSKMLAKISTKGQASYSDAGNIVEQTLGAIKTVVSFNGEKQAIALYNKLIHKSYKAAVEEGITNGFGMGSVFCIFFSSYGLAIWYGGKLVLSKGYSGGDVINILFAIMTGAMSLGNATPCMAAFAEGQSAAYRLFTTIKRKPEIDPDDQTGKQLEDIKGDVDLNDVYFSYPARPEQLIFDGFSLHVSSGTTMAIVGESGSGKSTVISLVERFYDPQAGEVLIDGVNIKSLQLDWIRGKIGLVNQEPLLFMTSIKDNITYGKEDATIEEIKRAAELANAANFIDKLPNGYDTMVGQRGAQLSGGQKQRIAIARAIIKNPRILLLDEATSALDVESERIVQEALNRIMLDRTTLVVAHRLSTVRNADCISVVQQGKIVEQGPHDELVMNPDGAYSQLIRLQESKEEEEQKPERHVSDSRSKSRSLSLKRSISRGSMGNSSQHFLTLPIGMPGSVELLEGNDENWEEDEKEQARDGDREAPKKAPMGRLASLNKPEVPILVLGSLAAGVHGVLFPLFGLMISNAIKTFYEPPHQLKKDASFWGLMCVVLGIVSILSIPVEYFLFGVAGGKLIERIRALSFRSIVHQEVAWFDDPKNSSGALGARLSVDALNVRRLVGDNLALAVQVTSTLIAGFVIAFVADWKLTLIILCVMPLSGVQGYAQVKFLKGFSQDAKILYEDASQVATDAVSSIRTVASFCAEKRVTTIYDDKCEASKKQGVRTGMVGGLGFGFSFLMLYLTYGLCFYVGAQFVRHNKSTFGDVFKVRKNASYHQRCSLSLSLSLSLSLSLSLSLS

SEQ ID NO: 227802 - protein, 499 aa, Zea Mays
MAKKGAKRKQQPPPAAPTAKKGSKAVPPPKAAKRAPKKQELLESSDDSDTEQQLLEEASHLDVPSDSDAEELSGSDAEADELSGSDADSDGSSSSGDDVEDEEEEEEGDGSDDDPLADDFLAGSDEGSEGGDSGLESDESDDLEAKSRAIDEQKIKAEEDAEEELQTNIRSESDEFRLPTAEELEEEAHRPPNLPNLKRRISEIVRVLSNFSKLRQKDVPRKDYIEQLKTDIISYYGYNDFLVEALIEMFPAVELVELLEAFEKRPPECLRTNTLKTRRRDLAAALIPRGFNLDPIGKWSKKQGASSFLPVMALAPQEKERIVDMAAAPGGKTTYIGALMKNTGIIYANEFNEKRLHGLLGNIHRMGVTNTIVCNYDGKELPKVLGMNSVDRVLLDAPCTGTGTIWKDLQIKTSKDIEDIRSCAFVQKQLLLAAIDLVDANSKTGGYIVYSTCSIMIPENEAVIDYALKKRNVKLVPCGLDFGRPGFIRYREHRFHTSL

SEQ ID NO: 227803 - protein, 714 aa, Zea Mays
MAKKGAKRKQQPPPAAPTAKKGSKAVPPPKAAKRAPKKQELLESSDDSDTEQQLLEEASHLDVPSDSDAEELSGSDAEADELSGSDADSDGSSSSGDDVEDEEEEEEGDGSDDDPLADDFLAGSDEGSEGGDSGLESDESDDLEAKSRAIDEQKIKAEEDAEEELQTNIRSESDEFRLPTAELEEEAHRPPNLPNLKRRISEIVRVLSNFSKLRQKDVPRKDYIEQLKTDIISYYGYNDFLVEALIEMFPAVELVELLEAFEKRPPECLRTNTLKTRRRDLAAALIPRGFNLDPIGKWSKVGLVVYDSTISAGATTEYMAGHYMKQGASSFLPVMALAPQEKERIVDMAAAPGGKTTYIGALMKNTGIIYANEFNEKRLHGLLGNIHRMGVTNTIVCNYDGKELPKVLGMNSVDRVLLDAPCTGTGTIWKDLQIKTSKDIEDIRSCAFVQKQLLLAAIDLVDANSKTGGYIVYSTCSIMIPENEAVIDYALKKRNVKLVPCGLDFGRPGFIRYREHRFHTSLEKTRRFYPHVNNMDGFFVAKLKKLSNTIPVTSEPSKASEEAAKADGEDEKAISNEQETGVPDKDEKTVEIKNHKNVTNKRTSVTKETGSHKRESNKPGKHLKINKNNATKEIDGPESSETNRDGKEEHRVQTKKMSHKRKFASDRSKKSGPESFSGVKEKRQVSDKKRKKKWQFKLRRDWEAEKKGDKRRKV

SEQ ID NO: 227804 - protein, 148 aa, Zea Mays
MHPTSFMSPHPTHSLPSPSSALLQTPRTSASHSARPWSTIAVHRNLGPIPRPSSSFRHAHCSGKLRLLASNSRHPLVCPYPLYSPLLTLTGFSPCSRVAPAVDPGPRCVLTIAQALQSCLSRTGGHRICLSATAFPTRSLKSLCRSMH

SEQ ID NO: 227805 - protein, 103 aa, Zea Mays
MFQNGESWKTRLETTTSVEYMSSSRCGLVKGSVRFFHMSHHTPPWPSMVPFSPVMKTSCRPWPWIKLMYLPPGSSRPLPYDGSGSMSGQLDVSWVARTMAPRA

SEQ ID NO: 227806 - protein, 163 aa, Zea Mays
MVIYLSTPKTDKVSEDGENDKLKFGLSSMQGWRATMEDAHSALLDLDNDTASFGVFDGHGGKVVAKFCAKYLHIEVLHTEAYAAGDLGAAVHRAYLRMDEMMRGQRGWQELQALGDKINQFTGITEGLIWSPKASDSNDRHDDWAFEEVELCDDDEFIVLACD

SEQ ID NO: 227807 - protein, 255 aa, Zea Mays
MVRLLSEIRHRNIVTLIGYCQEGGLQMLVYEYLPNGSVCGHLYDNRKGSATRLEFKQRLSIAIGAAKGLNHLHSLDPPLIHKDFKTNNVLVDENFIAKVADAGLVRLIRGSDDAGPSRGFSNSVYQDPEVQSMTQFSESSDVYSFGVFLLELITGREAASLIPTESREYLAHWMEAHFSSNELIDPRLAGNFTAEGMKELVGLAFQCLNPSSRRRPRMRLVATELDRILETEMSMTTFMGDGTTIVTLGSQLFSS

SEQ ID NO: 227808 - protein, 206 aa, Zea Mays
MGGGSGSFLKVLVNNMDVLAGPLVSLAYPLYASVRAIETKSAVDDQQWLTYWVLYSFITLFELTFAPVLEWLPFWSYAKLFFNCWLVLPQFNGAAHVYEHFVRPMIVNQQVVNIWYIPKKDESSRPDDVISAAQRYIEQNGSKAFENLVNKLKRLVEQGCGEGSPRSPIRLQFSSNSWRLEPLASSQRLCVQWEVAEPSKCSHPRW

SEQ ID NO: 227809 - protein, 118 aa, Zea Mays
MLLLASLLLQRTDVSFGLCLKSEKSMHGMVVVVVVQEESMQAADRGGHAVCGYSLSAPPSLVTASTKRSCRSGVHRSRGLGSRDSTTPPIGPAPPPYPALSIPSNMFIARVALCLSYS

SEQ ID NO: 227810 - protein, 89 aa, Zea Mays
MSFVCLEFCEGKNGWRVELSRNSSGRGGRDRYGGSESKCYECGETGHFARECRLRIASGGLGSGRRRSRSRSRSRSGSPRYRRSRSRSR

SEQ ID NO: 227811 - protein, 64 aa, Zea Mays
MAVARVTPTSALLLGGPTRLMVKPSEAEKNLAQANVTSGGAASGGARKLYVGNLHSNITEDQLR

SEQ ID NO: 227812 - protein, 115 aa, Zea Mays
MDCYFLSILKMQVNHGRFSSLVQTNTSTHVPFSGGAREQQVHFTPQPNQHFPSLHYILSASLYLSLPFLLVMVKPSEAEKNLAQANVTSGGAASGGARKLYVGNLHSNITEDQLR

SEQ ID NO: 227813 - protein, 428 aa, Zea Mays
MKIFERSMDGFTGGQGQGKRPGHRRQHPCRVSCRARSRVTPAKKQMMMMMMCHAAGQQETEHHGNPRTSQRPPSSLLYVCAPSLPPSLCHLPIWAAAMTLPCAGGCEIQASGINYRIAVSTRPLKVWSRSDDDVHSQDHHSVVRQVLRDVSCRARPGELLAIVGPSGAGKSTLLEILAGRLSPSPPPHLLRIDGAAAHSADLRRVSAYVTQQDVLFPLLTVRETLLFSARLRLGARLPSKDMHARVEALLDDLTLRRVAATRIKDLSGGERRRVSIGVEAVRDPPVLILDEPTSGLDSASALHIVGALRAMAEARGRTVLLSIHQPGARIVKMFDSVLLLAAGSVLHHGTVDQLRALLGDAGLHLPPHVDDVEFAIDSVDALRRHASSSLQAPSSGDREGRCTLQRLFQLHGKQVADAPVAVTMMASR

SEQ ID NO: 227814 - protein, 364 aa, Zea Mays
MATAARERRLPPALPLATLIGRELRAGGSERPALRYGHAGFAKRGEDYFLVKPDCLRVPGDPASAFSVFAVFDGHNGVSAAVYSKEHLLEHVMSALSPDIGREDWLQALPRALVAGFVKADIDFQRKGEVSGTTATLVVIDGFTVTVASVGDSRCILDTQGGELQLLTVDHRLEENAEERERVTASGGEVGRLNLFGGQEVGPLRCWPGGLCLSRSIGDMDVGEFIVPIPHVKQVKLSNTGGRLIIASDGIWDALSNEAAAKACRGLPAELAAKLVVKQALKTSGLKDDTTCVVVDIIPSDHLTSPQLSPKKNQNKLKSLFRRRSHSSVRKLGGKSASIGSVEELFEEGSAMLEERAIFVEKEG

SEQ ID NO: 227815 - protein, 627 aa, Zea Mays
MTYRAVVPTIQGYEDAGDFTVKERLKTSIHMNLLFYSIVGAIGLIGLILLLIMHKAWDGGIVGFAMACSNTFGLVTGAFLLGFGLSEIPRNIWKNADWSHRQKVAQATSNQMSKRDILRPYMDIIDNMLSQMLREDPAFKPSGGRLGENDMDYDTDDKSMATLRRQLRRAHEEYYRCKSEYMTCVMEALKLEDTIKNYERRDANGWKYVSSFSESRSGTLGSILDTIEFIWCCILRKQLQKAFAVILGCMSAAILLAEATLLPSGVDLSLFSILIKAVGKQEVLVQVAAFVPLMYMCICTYYSLFKIGMLMFYSLTPRQTSSVSLLMICSMVARYAPPISYNFLNLIRLGGNAKTTFEKRMGNIDDAVPFFGRGFNKIYPLIMVVYTLLVASNFFVRVIDFLGRWKRFKFQREEENIDGLDPSGMIILQKERSWIEQGCKVGEQVIPLARNFNGVNADIESQNVPLVENTVEMKVGATSSRNDGRAGQLKYANNRETIASKYTSIREQNRQSGKVVRKEISPNSISLLEERNSEQGSNAGVPPTGVSATWASMKIGFQNFKANMGSKKFLPLRQDPGFVPNLNVSSPESLDDIFQRLKRRPANVPVDYLDDDDDDNIGDTDLHFQDQ

SEQ ID NO: 227816 - protein, 608 aa, Zea Mays
MRRHSRRRRRCCRDGRARQHSSSSSSSWSSASFSIQITCMCLQQQTRRDASIRPSQVISCDDPIPDRPIRTMSSDGPTPSPPSSHAASRRLSTTHSFGSHGKLLPSPGHGATASQIAVAAAAAALLLAVLAACCCCCCCRRRRRKGDAAQRQHRPPPHGGMRFYADSSGFKGNTSGYYWPSGARPPQWQTGGQAVTAAISTMQHGAVLPPPPLPPPPPPPMPADTATFSYEELAAATGGFSEANLLGQGGFGYVHRGVLPGPGGRVKEVAVKQLKAGSGQGEREFQAEVDTISRVQHRHLVALVGYCIDGARRLLVYEFVPNQTLEHHLHGKGLPVMGWATRLRIALGAAKGLAYLHEECDPRIIHRDIKSANILLDNDFEAMVADFGLAKLTNVNHTHVSTRVMGTFGYLAPEYASSGKLTEKSDVFSYGVMLLELLTGRRPGDRSSYGQDGLVDWARQALPRALADGNYDALVDPRLRGDYDPTEAARVVASAAASVRHAARRRPKMSQIVLALQGGMPLEDLSDGAPPGRGASFGPGSGSLSGSDDGGSGSSYTAQMERIRRAAQPSPDYSTDYPVSIPEFGHPSPASSASSVERDDRRHRGGRR

SEQ ID NO: 227817 - protein, 150 aa, Zea Mays
MEGQGWRRRQIPAFGRWNQHTDEAGYLESAVQAGLVRPGHCYHDDGGNEVVLFRSSASPPPHKPAKKVRSTMEGHGHHHQVQVEAGSRKQRPFVAGDGSRSRAAKPRPRVVRAAVDEDLYIVPSDMSRKKKGRKHVRSMWMGCVGLNCVA

SEQ ID NO: 227818 - protein, 357 aa, Zea Mays
MEKGASEASAPCARCGKPAQLQCPKCAELKLPRENAAFCTQDCFRAAWSSHKSVHPKPGALASQQSPEGWKYCLRKGRGRALQLPRFEWTGPLRPYPISKMRVVPDEIEKPDWALDGIPKIEPDSDLQKRVEIKTPELIERMRETCRIAREVLDAAARVIKPGITTDEIDRVVHEETIARGGYPSPLNYHFFPKSCCTSVNEVICHGIPDARKLEDGDIVNVDVTVYYKGVHVKPGVRFREVGEIINRHASMSGLSVVKSYCGHGIGELFHCAPNIPHYSRNKAVGIMKAGQTFTIEPMINAGVWNDRLWPDDWTAVTTDGKRSAQFEHTLLVTDTGCEVLTARLPSSPDVFPWLKP

SEQ ID NO: 227819 - protein, 446 aa, Zea Mays
MKYVLVTGGVVSGLGKGVTASSIGVVLKACGFRITSIKIDPYLNTDAGTMSPFEHGEVFVLDDGGEVDLDLGNYERFLDIKLTRDNNITTGKIYQSVIDKERKGEYLGKTVQVVPHITNAIQEWIERVAMIPVDGMEGPADVCVIELGGTIGDIESMPFIEALGQFSYRVGPGNFCLVHVSLVPVLNVVGEQKTKPTQHSVRGLRGLGLTPNILACRSTKELEDSVKEKLSQFCHVPAANIITLYDVSNIWRIPLLLCDQKAHEAILKVLNLERVDSIAREPKLDEWVARAAIFDTLHDTVRIAMVGKYTGLSDSYLSVLKALLHASVDCRRKLVVDWVASTDLEDSTAIEGADGILVPGGFGDRGVEGKILAAKYAREKNVPYLGICLGMQIAVVEYARHVMNFTDANSTEFDPNTKTPCVIFMPEGSKTHMGATMRLGSRRTFF

SEQ ID NO: 227820 - protein, 511 aa, Zea Mays
MAARQPPPSSASAPAPAAGLSMKDYLKRYVSGPGTDGDQKRAKKKTKKKPKPAGGVLIVDEDPVWQKPVQVDEEPASSGDDKPLVDEDIEVKRMRRLEAIRAARPYNAIAEDGSGWVTVAAPEEQGGGSTHQRRNDTPLPERGRAPTREDLSPVRRRQRRDTPSPVHGDAAAKDFSPPRRPSPVHGDAAAKDFSPPRRRQRRNTPSPVHGDAAAKDFSPPRRRQRRDTPSPVPDGAAAKDFSPPRRRQRRQDTPSPKDSGAADQDDMSPPRKSRQREDLSPPRKGARHITEEPRDISPRKKRDISPSRKSTKEGASKQVKKSGLMTAEEVKEDIRKIKEAEMIKFASQDPSLVGKGAKAVFRDKEGRRISEEEMCKAKEPEKPKEIHIEWGKGLVQKREAESRLKEIEAEKSKPFARTRDDPELDNMLKERIRWGDPMAHLVKRKDPEFILEDLGDDEKMKESGFIVPQSIPTHSWLKRGVDAPPNRYGIKPGRHWDGVDRSNGIDCSSLG

SEQ ID NO: 227821 - protein, 245 aa, Zea Mays
MATRGSPGSTSVSRWLEEATGLAFRFVIGKSNSKNKMAALNREVEEYDDFVLLDLEEEYSRLPYKTLAFFKAAYALFDSDFYVKADDDIYLRPDRLSLLLAKERSHPQTYIGCMKKGPVFTDPKLKWYEPQSFLLGSEYFLHAYGPIYALSADVVASLVALRNNSFRMFSNEDVTIGSWMLAMNVNHENTHALCEPDCTESSVAVWDIPKCSGLCHPEVKMLELHQRKECTGGPTVAAEVSESED

SEQ ID NO: 227822 - protein, 692 aa, Zea Mays
MSIEKAVEFDDYCHSHQPPIAFIKSEVCGLFGSVFCDFGPEFTVLDVDGEEPHTGIVASISNDNPALVSCVDDERLEFQDGDLVVFSEVHGMTELNDGKPRKIKNARPYSFTLEEDTTSYGTYIRGGIVTQVKPPKVLNFKTLKEAIKEPGEFLMSDFSKFDRPPLVHLAFQALDKFRTELTRFPIAGSADDVQKLIDLAISINETLGDSKLEEIDKKVLQHFASGSRAVLNPMAAMFGGIVGQEVVKACSGKFHPLYQFFYFDSVESLPVEPLEPSDLKPENSRYDAQISVFGAKLQKKLEQSKIFMVGSGALGCEFLKNLALMGISCSQNGKLTVTDDDVIEKSNLSRQFLFRDWNIGQPKSTVAATAAMAINPKLHVEALQNRASPETENVFNDAFWESLDAVVNALDNVTARMYIDSRCVYFQKPLLESGTLGAKCNTQMVIPHLTENYGASRDPPEKQAPMCTVHSFPHNIDHCLTWARSEFEGLLEKTPTEVNAFLSNPGGYATAARTAGDAQARDQLERVIECLETDKCETFQDCITWARLKFEDYFSNRVKQLTFTFPEDAMTSSGAPFWSAPKRFPRPLEFSSSDSSHLNFLLAASVLRAETFGIHIPDWAKNPKKLAEAVDKVIVPDFQPKQGVKIETDEKATSLSSASVDDAAVIEELIAKLEEIFKTLPPRFHMNPIQFE

SEQ ID NO: 227823 - protein, 432 aa, Zea Mays
MFREIPSTVPVEPLEPSDLKPENSRYDAQISVFGAKLQKKLEQSKIFMVGSGALGCEFLKNLALMGISCSQNGKLTVTDDDVIEKSNLSRQFLFRDWNIGQPKSTVAATAAMAINPKLHVEALQNRASPETENVFNDAFWESLDAVVNALDNVTARMYIDSRCVYFQKPLLESGTLGAKCNTQMVIPHLTENYGASRDPPEKQAPMCTVHSFPHNIDHCLTWARSEFEGLLEKTPTEVNAFLSNPGGYATAARTAGDAQARDQLERVIECLETDKCETFQDCITWARLKFEDYFSNRVKQLTFTFPEDAMTSSGAPFWSAPKRFPRPLEFSSSDSSHLNFLLAASVLRAETFGIHIPDWAKNPKKLAEAVDKVIVPDFQPKQGVKIETDEKATSLSSASVDDAAVIEELIAKLEEIFKTLPPRFHMNPIQFE

SEQ ID NO: 227824 - protein, 203 aa, Zea Mays
MAITTSSEAIDEAESGTPGPMQQGHEEGQAKGVSARCYGAFHFLLVVSRKLVTNPNMYASLAGLIWALISFRWRIQLPSIVNNSIRILSDGGLGMAMFSLGVFTALQTKIVACGTKRMLLSLGIRFFLGPGLMVISSYLIGMRGTLLKVAIIQAALPQGIVPFVFAKEYNVHADILSTAIILGMMVAVPVALGYYFVMDHPRL

SEQ ID NO: 227825 - protein, 550 aa, Zea Mays
MYAGSNQEVHCEPLEVIRERHSTEPNINAAAILPSRPVSNTFNLLLEGDMNPSHGNGLAEIENIINQRYFSRDETLRLIEIMRSRTSDFTVEDQRPPVSTAKGFETKFFTPAKLIEAQPSWRTDIVPSSNVHDIGSSPVEIAKAFMEAQTSASVHESKKRKFRALSHGVAVDNSTSEVFPTITTDSSVRWPDSVVQGGPNYLTPQSNKGRTLSQPLSRTPYNSSVIRRYIKNSRHGDMHNNGQTQFPTPFSIGSKRILEDTHVSASGGIAQPSSSRGQIDVFGSILREGSTAINNVAFNLQESDGKSMTESRTTFGRASGVDNISRVASVSVHPKSSETAFKILKQLDRTIPSPTSKPLGLRQTLAKKNTFSVATYRQIKEPDIIIGNDNKQSSINESGSASSETTYGKKVQQPQSSPISGESSEKVQRSGANSDVYEAGTSQRPLKSNLTPTSVAEVLDNNNTSKGFSFTFPIPKAPSSLLEPPPTPTMASPPRTLPITNEDVPKFTFGSSSMANKLVFSFNSTSSSPGAGGTDPTFKFGSDNKRELVF

SEQ ID NO: 227826 - protein, 563 aa, Zea Mays
MYAGSNQEVHCEPLEVIRERHSTEPNINAAAILPSRPVSNTFNLLLEGDMNPSHGNGLAEIENIINQRYFSRDETLRLIEIMRSRTSDFTVEDQRPPVSTAKGFETKFFTPAKLIEAQPSWRTDIVPSSNVHDIGSSPVEIAKAFMEAQTSASVHESKKRKFRALSHGVAVDNSTSEVFPTITTDSSVRWPDSVVQGGPNYLTPQSNKGRTLSQPLSRTPYNSSVIRRYIKNSRHGDMHNNGQTQFPTPFSIGSKKPRRYKVELEDHLRILEDTHVSASGGIAQPSSSRGQIDVFGSILREGSTAINNVAFNLQESDGKSMTESRTTFGRASGVDNISRVASVSVHPKSSETAFKILKQLDRTIPSPTSKPLGLRQTLAKKNTFSVATYRQIKEPDIIIGNDNKQSSINESGSASSETTYGKKVQQPQSSPISGESSEKVQRSGANSDVYEAGTSQRPLKSNLTPTSVAEVLDNNNTSKGFSFTFPIPKAPSSLLEPPPTPTMASPPRTLPITNEDVPKFTFGSSSMANKLVFSFNSTSSSPGAGGTDPTFKFGSDNKRELVF

SEQ ID NO: 227827 - protein, 311 aa, Zea Mays
MYAGSNQEVHCEPLEVIRERHSTEPNINAAAILPSRPVSNTFNLLLEGDMNPSHGNGLAEIENIINQRYFSRDETLRLIEIMRSRTSDFTVEDQRPPVSTAKGFETKFFTPAKLIEAQPSWRTDIVPSSNVHDIGSSPVEIAKAFMEAQTSASVHESKKRKFRALSHGVAVDNSTSEVFPTITTDSSVRWPDSVVQGGPNYLTPQSNKGRTLSQPLSRTPYNSSVIRRYIKNSRHGDMHNNGQTQFPTPFSIGKNTRGYTCISKWWYSAAIIFQGTDRCFWFYSKRRCRQYLKGCFSICSSQVKRNSIQNT

SEQ ID NO: 227828 - protein, 363 aa, Zea Mays
MLTFLQLISILSYAMFLICHQLCTSIQISPLGAKMFHAYLVCCYYRTAGMVICTIMDRHNFPLHFLLERILEDTHVSASGGIAQPSSSRGQIDVFGSILREGSTAINNVAFNLQESDGKSMTESRTTFGRASGVDNISRVASVSVHPKSSETAFKILKQLDRTIPSPTSKPLGLRQTLAKKNTFSVATYRQIKEPDIIIGNDNKQSSINESGSASSETTYGKKVQQPQSSPISGESSEKVQRSGANSDVYEAGTSQRPLKSNLTPTSVAEVLDNNNTSKGFSFTFPIPKAPSSLLEPPPTPTMASPPRTLPITNEDVPKFTFGSSSMANKLVFSFNSTSSSPGAGGTDPTFKFGSDNKRELVF

SEQ ID NO: 227829 - protein, 322 aa, Zea Mays
MDGFVDPFVPEQAWPQDAMFIGSSWPCAGAGATSLADPAGTYAYLGAQAAPGQGAGFHLQDGSSTALVPPLELHQQFLSAHLPGDDVTVTQEEGLGFEVNSALVAGMLGPVLSAPCAVSLADSAPVVCSSSNDSSGGSEQSGLPPPPRFLVLGEQPASWPSAFPRISSLAGEETSRSFGFGAVSDNDLVRGSSCVADVNKYPQIGNARLHVEDDVEFNTGKMLSFAPGLDFGDLQLSQKELSGLRHLNSGQQLSSFDATRNPEQSSNEASGGGTGLNAPPFMVPANGAAGNGAPKPRVRARRGQATDPHSIAERCALLVMCL

SEQ ID NO: 227830 - protein, 192 aa, Zea Mays
MDAGCVTGDRVNGIVDGVSGSWYIKFDTFTPAAERGLPVTRVISRMTLQQILARAVGDDAILNGSHVVDFTDDGSKVTAILEDGRIFEGDLLVGADGIWSKVRKTLFGHSDATYSGYTCYTGIADFVPPDIDTVGYRVFLGHKQYFVSSDVGAGKMQWYAFHKEEAGGTDPENGECLEKFSSLTSEIGTASL

SEQ ID NO: 227831 - protein, 112 aa, Zea Mays
MTLQQILARAVGDDAILNGSHVVDFTDDGSKVTAILEDGRIFEGDLLVGADGIWSKVRKTLFGHSDATYSGTGYFWATNSTSSLRMSVPVKCNGMLFTRKRLVALTLRTVSA

SEQ ID NO: 227832 - protein, 112 aa, Zea Mays
MISPEDPRKWLVKRVVGMHGGSVTYLVDPGNNDSSSRTVVINYAYARDNETLFDIISVKMAAAAGPYKEMLEVVNACATRIRWRLSPASKRRLLNGQCPLACCFLLVVVVVF

SEQ ID NO: 227833 - protein, 106 aa, Zea Mays
MATPSSSLCSSFASLRTASIGHPRDITSSTPRLVEHLLILAKRLKFTIKISFPGAIAIQALPEIAQKITWLENEDTLLDSSGEKIIYEMMRPERTLLYLVPGRLVG

SEQ ID NO: 227834 - protein, 124 aa, Zea Mays
MATPSSSLCSSFASLRTASIGHPRDITSSTPRLVEHLLILAKRLKFTIKISFPGAIAIQALPEIAQKITWLENEDTLLDSSGETDLAEHHKLGLDISEPEKKIIYEMMRPERTLLYLVPGRLVG

SEQ ID NO: 227835 - protein, 359 aa, Zea Mays
MEVMGTQQRRDLQANIPALRKLDTMLLDYLDNFKERNEFWYVKRDSCSESENEERSDEKWWIPIVKVPPGGLSKTSRGWLLHQKELVNQVLKAAMAINANCLMEMSIPDTYIDTLPKNGRASLGDALYRIITDVEFDPDDFLSTVDLTSEHKILDLKDRIEASVIIWNRKVHNKDGKSSWGSAVSQEKREQFEERAQTLLLIIKHRFPGIPQSTLDIAKIQENRDVGFALLESYSRVLESLAFNVMSRIEDVIQADNLAREKAKKNAPPAADPAAGRRGPQEAGGDDDDQSKTTLLDFMGWTGDSEGKNDDASPPPPPELPAQDDGRLMKLPNIMTNLKQTYMDKLDFLSGNRSPSGRH

SEQ ID NO: 227836 - protein, 184 aa, Zea Mays
MFYSFALPLNPMGVMVNPPKPGDISYPKFTAESKSILESLRRRARMMTDGFNSCRNVVCNFTEGKHQDFCWFAANRVWFIFVTGCVAAGAMYSFPQIQLPARAIEAAKRAGKAADVFYCLKLLEATGISTVPGSGFGQKEGVFHLRTTILPAEEDFPTIMSSFKKFNDSFHGAIRGLLQDVMST

SEQ ID NO: 227837 - protein, 403 aa, Zea Mays
MDLLCDQGLKGILLMKNLKIVTKNLTIPSMMKEYYEMDESGIDYVITSAAKKWRELKAVLKNKYFDETLSFEELIAKRDERVKESDWEWLITYWMSPEAEAEQQGRPARRDEIYVRTHTRKNKEGDIVPLPGAEIFINSRVHRSDEVAHDYNGNNHSQNMVEDDFQLTRRVASTMGRLRNREDVNTIEEQSHRRDIATMLKPMCIKDFTEHNFMDLLLESLKTLSDLDNCLVLFEVDDHYQVTKTDNIQALKEERTKARASATTNGIEDQEALEERTKARASATTNGIEDQEALEAGAFVSKAQINNLLCFIFLVLFSFCFTASLRSASTFSSSEAHPTTIFGFSRSYVVLLLLEVHQRPPMTVKPFLIHSTVLLHQAVGDNHDIRGLIDCPHQWQCKPDQAL

SEQ ID NO: 227838 - protein, 55 aa, Zea Mays
MAEENHVAAGAGQKLYWSRQTRATAAQRLRFAARCYLHALTHTLHATVVAAQPRS

SEQ ID NO: 227839 - protein, 281 aa, Zea Mays
MAFALKAAAAGSASFSAAGPRRRAAATGRVSFRSAAPVVAVRAAAAAAAAVAEDKRSISGTFAELRQQGKTALIPFITAGDPDLATTAKALRILDACGSDVIELGVPYSDPLADGPVIQASATRALAKGTTFEDVISMVKGVIPDLSCPVALFTYYNPILKRGVPNFMSIVKEAGVHGLVVPDVPLEETDVLRSEAAKNNLELVLLTTPTTPNERMEKIAQASEGFIYLVSTVGVTGTRANVSGKVQSLLQDIKKVTEKPVAVGFGVSTPEHVRQDGAQMV

SEQ ID NO: 227840 - protein, 240 aa, Zea Mays
MEGNEPPFFTRFFTWDSAKSLMHGNSYQRKLAIVKGGGAPALDKPKRRTTVYSGRSTTQDKSQRSRSMSFSPERVRVRGRSPAFTALAANFESSSNRNLSTPPPVVKKLYPKSVTPDPSNTASKSPAIAALAGSLDHPSQTPALEFMKGGSESEKPKQEGDGKEGVDTVATRVESLTINEDVKENEPEDDEGLPIYLYERLKTTAADPVTEIDVTRRETYLSSTEFKEKFGINCSSTFLA

SEQ ID NO: 227841 - protein, 118 aa, Zea Mays
MGRGGGMGNPVNVGIAVQADWENREFISNISLNVRRLFDFLLRFGQLLFHSISPRPALSRSGSPTFGSGPPPSCFIPYHAELNCPCYPHITLPCPSLCLVIVGWQTIAQTTHETGCFN

SEQ ID NO: 227842 - protein, 634 aa, Zea Mays
MADAHHFNNISLGGRGGGHPGQFKLYSGGLAWKKQGGGKIIEVDKGDITNVAWMRIPKSYQLSVGTKEGLCYRFFGFREQDVSNLTNFIEKSTGITPEEKQLSVSGQNWGGIQINGNMLCFNVGSKEAFEVSLADVAQTQMQGKTDVVLEFHVDDTTGANEKDSLMDLSFHVPTSNTQFIGDEHRTSAQAISVEIDGGGSSEMAVVTFDGIAILTPRGRYSVELHQSFLRLQGQANDFKIQYSSILRLFVLPKSHNPHTFVVITLDPPIRKGQTLYPHIVIQFETEAVVERELTLSGEILAEKYKDRLESSYRGLIHEVFSKVLRGLSSAKVTRPSTFRSCLDGYAVKSSLKAEDGLLYPLEKGFFFLPKPPTLIPHEEIEYVEFERHGAGGASISSHYFDLLVKLTNDQELLFRNIQRNEYHNLFNFISGKHLKILNLGDGQGRTSGVTAVLQSTDDDSVDPHLERIKNQAGNEESDEEDEDFVADKDDSGSPTDDSDAEGSDASMSGGEKEKPSKKEASSSKPPVKKKQKSGPDEGSQKKKPKKKKDPNAPKRAIAPFMYFSKAERANIKSSNPELATTEIAKKLGERWQKMTAEERQPYVEQSQVDKQRYAEESAAYRGAAAQQGSGAGSE

SEQ ID NO: 227843 - protein, 284 aa, Zea Mays
MADAHHFNNISLGGRGGGHPGQFKLYSGGLAWKKQGGGKIIEVDKGDITNVAWMRIPKSYQLSVGTKEGLCYRFFGFREQDVSNLTNFIEKSTGITPEEKQLSVSGQNWGGIQINGNMLCFNVGSKEAFEVSLADVAQTQMQGKTDVVLEFHVDDTTGANEKDSLMDLSFHVPTSNTQFIGDEHRTSAQMLWQAISVEIDGGGSSEMAVVTFDGIAILTPRGRYSVELHQSFLRLQGQANDFKIHHTIHIPLWLSHLIHQFAKDKLCILTLLFSLRQRQLLKGN

SEQ ID NO: 227844 - protein, 612 aa, Zea Mays
MCLNLLLMADGLFLVWDLTAGKLMHDFCLHEGPVNCLDVHPYEFLLATGSVDKTVKFWDLETFELIGSSGPENNREYFELASAIRSMKFNSDGKTIFCGLHESLKALSWEPTICHDVIDVGWSTLADLTVDEGKLLGCSYNQNCVGVWVVDLMRNEPYVDSSAGSHLNGSINRPIQSDDSMSSVFGRLSISRSPANEIGSDTLLGCSMSGSKESPVSTSASMRGLSKPPGKGDLRLSRSISTPLLSPRVRLNPNFIDRQKNQAATAVPLPEPIVRFKANLSSDAGMLSRKSHASAAPMYRSRSNSSRYGIMESSSIPVLALRHSSRKDAGPVHSEAATGELADIEPQNIEKEGLVANHGKEDGKLVPVIASRSSKIVEEVGYRRITNDVGCKRVTLESGLRVNSDMDYRSRAPESHEVQQLIHLSEPAGLHGKFIRESSGAGDNNCSGSICTESAEFNEVDIWYRVSGFDKWNPAAARNPEFASIHRNEVIGIRQLMESSGKYVVDDRPSSSNYDNIQYVTTLYSSRLHPSLSGKLSASASYEDDISGLVENHQEFIHVMKSRLTKLEVVYRCWQRNDIKGSIDATWRMLDFAELYHIRCLRFSLTSYHQSS

SEQ ID NO: 227845 - protein, 632 aa, Zea Mays
MKFNSDGKTIFCGLHESLKALSWEPTICHDVIDVGWSTLADLTVDEGKLLGCSYNQNCVGVWVVDLMRNEPYVDSSAGSHLNGSINRPIQSDDSMSSVFGRLSISRSPANEIGSDTLLGCSMSGSKESPVSTSASMRGLSKPPGKGDLRLSRSISTPLLSPRVRLNPNFIDRQKNQAATAVPLPEPIVRFKANLSSDAGMLSRKSHASAAPMYRSRSNSSRYGIMESSSIPVLALRHSSRKDAGPVHSEAATGELADIEPQNIEKEGLVANHGKEDGKLVPVIASRSSKIVEEVGYRRITNDVGCKRVTLESGLRVNSDMDYRSRAPESHEVQQLIHLSEPAGLHGKFIRESSGAGDNNCSGSICTESAEFNEVDIWYRVSGFDKWNPAAARNPEFASIHRNEVIGIRQLMESSGKYVVDDRPSSSNYDNIQYVTTLYSSRLHPSLSGKLSASASYEDDISGLVENHQEFIHVMKSRLTKLEVVYRCWQRNDIKGSIDATWRMLDFAVTNDIVNALMENRNCITLDVCASLLRLTTSLLESTYDRHMSIALRMILSFVKSFGPTISSALLAIPPVGVDLEAEQRMEWCNLCFQELKNVSVSLKFLTRRQGEVGRLAQELSLFLQDLFQLSSV

SEQ ID NO: 227846 - protein, 468 aa, Zea Mays
MKSSLRKLRGFALQRHEQRVDRDRGRGHSTTAAEELLAAAQDMTDMRSCYDNLLSVAAAIANSAYEFSEALQDMGACLLKRITPNKDGINDKVLLLLGKSQFELRKLVDSYRVHVLNTITTPSLSLLNELQTVEEMKRQCDEKRELYEFMLNAQKEKGRSKNAKGDNVASEQLKQAQEDYQEEATLFLFRLKSLKQGQFRSLFTQAARHHAAQDFFNSSKEDYSSVPHERQRIESQSAPLFPGKKVNTEERIKDLRRSATRKLNTYVLPTPNDVRATSQIASGNPISGPLESKGAFHSSPLHPSADIRDLRDNKLPSPARLSNVQSVLKESNTNTAETRKVLPVGDLALPGYYDLKTLDNNKVKRGSFSGPIASRPRPTENNDVISAAPRHSSAHQPVHMRVSPGNSPPPISSPKIKELHELPRPPVNTSKNTTFPSLVAHSAPLVANPASLTPKVQDHFRGENRFRR

SEQ ID NO: 227847 - protein, 502 aa, Zea Mays
MRSCYDNLLSVAAAIANSAYEFSEALQDMGACLLKRITPNKDGINDKVLLLLGKSQFELRKLVDSYRVHVLNTITTPSLSLLNELQTVEEMKRQCDEKRELYEFMLNAQKEKGRSKNAKGDNVASEQLKQAQEDYQEEATLFLFRLKSLKQGQFRSLFTQAARHHAAQLNLFRKGVKSLEAVEPHVRLAAEQQHIDHQFSALEEEDYVVEDENDDEYNDSHDGELSFDYGENKETEKSGIASRNHTEDFFNSSKEDYSSVPHERQRIESQSAPLFPGKKVNTEERIKDLRRSATRKLNTYVLPTPNDVRATSQIASGNPISGPLESKGAFHSSPLHPSADIRDLRDNKLPSPARLSNVQSVLKESNTNTAETRKVLPVGDLALPGYYDLKTLDNNKVKRGSFSGPIASRPRPTENNDVISAAPRHSSAHQPVHMRVSPGNSPPPISSPKIKELHELPRPPVNTSKNTTFPSLVAHSAPLVANPASLTPKVQDHFRGENRFRR

SEQ ID NO: 227848 - protein, 248 aa, Zea Mays
MGSSSGHQRSKTRSRNRKPLGIQLLERVRGSPISFRSCQALVLVLTFLSYASYHATRKTTSVVKSVLDPKTKTNLGTSSAHYWPPSHLFYLHNLKDADNSSAGGSLSSGGGGGWVPFNEAEDGTALLGEIDLAFLGAYAAGMFFAGHLGDRVDLRVLLTVGMVGTGLFTAAFGAGYWLDVHSFYYFLAVQMVAGLFQSSGWPSVVAVVGNWFGKSKRGLIMGVWNAHTSVGNISGSLVAAAMLRRISV

SEQ ID NO: 227849 - protein, 73 aa, Zea Mays
MSAPEFRTSYQQSPENVGQLKVCQCGSGDSNFQITNKSDGGENSPTTCPNCQVLKSGNLLLSSKGPKVAQPTP

SEQ ID NO: 227850 - protein, 792 aa, Zea Mays
MHLHFLRAIGTAMSMRAGIAADTAAALLFRILSQPTLLFPPLRHAEGVDVHHEPLGGYVSSYKKQLEVPASEATIDATAQGIASLLCAHGPDVEWRICTIWEAAYGLLPLSSSAVDLPEIVVAAPLQPPTLSWNLYLPLLKVFEYLPRGSPSEACLMRIFVATVEAILRRAFPSETPEQSRKPRSQSKNLAVAELHTMIHSLFVESCASMDLASRLLFVVLTVCVSHQALPGGSKRPTGSDNHSLEEATEHSRLTNGRSRCKKRQGPVATFDSYVLAAVCALSCELQLFPCISKNGSHSNLKDSMKIIIPGKNNGINNELHSSISSAIIHTRRILAILEALFSLKPSSVGTSWSYSSNEIVAAAMVAAHVSELFRRSRPCLNSLSALMRCKRDAEISTRASSLYHLIDLHGKTVSSIVNKAEPLEAHLTLTPVKKVNQHRCEENNTNSSDSAKLENKNGSTHKKNGFSKPHLKCAEEVLNGNVASTSGKSIASLQVEASDLANFLTMDRNGGYRGSQTLLRSVLSEKQELCFSVVSLLWQKLIASPEMQMSAESTSAHQGWRKVVDALCDVVSASPTKASAAIVLQAEKDLQPWIARDDEQGQKMWRVNQRIVKLIAELMRNHDSPETLVILASASDLLLRATDGILVDGEACTLPQLELLEVTARAVHLIIEWGDPGLSVADGLSNLLKCRLSTTIRCLSHPSAHVRALSMSVLRDILDHGSVSPNKISRGEQQRNGIQSPSYRCVAAGILNWQADVERCIEWEAHSRRATGLTLAFLSTAAKELGCPLPC

SEQ ID NO: 227851 - protein, 302 aa, Zea Mays
MLHNDDPEEMLKILCTVQKHILQGGPKRLTFTVPSLVFSSLKLVRRLQGQDGDVTGEDVPATPKKIFQILHQTIEALSCVPSPELALRLYLQCAEAANDCDLEPVAYEFFTQAFILYEEEITDSKAQITAIHLIIGTLQRMNIFGVENRDTLTHKTTGYSAKLLKKPDQCRAVYACSHLFWTDDQDGIMDGERVLLCLKRALRIANAAQQMASATRGSSGSVTLFIEILNKYLYFFEKGIPQITNTVIQDLIELIRTEKQSDNSVADPSTEAFFSSTLRYIEFQKQKGGTIGEKYEQIKTSS

SEQ ID NO: 227852 - protein, 245 aa, Zea Mays
MSVNGNHLSGGLPDTFDSLNRLVNLDISSNNLTGVLPSSMKSLASLTSLHMQDNQLSGTLNVLQGLPLKDLNIENNIFSGPVPASLLNIPNFKKDGNPFNTTSASPPSTGPDPTLTPAPNTSNSTPPAPAPPSPSRATPPPKTTSNYPEGSTTRDSTSSSRKHNTSTLKIVGFVLAGVVLFIVIVFLVLFCLSKYQGRQSRYDRNRSQLGGVHHRVEPQIKPPPVQQSNDIKEVQARHRTGGSIN

SEQ ID NO: 227853 - protein, 626 aa, Zea Mays
MNAANLGGQLGSLGNFNAITSIFLSANQITGSIPSSLSKLENLSAMSVNGNHLSGGLPDTFDSLNRLVNLDISSNNLTGVLPSSMKSLASLTSLHMQDNQLSGTLNVLQGLPLKDLNIENNIFSGPVPASLLNIPNFKKDGNPFNTTSASPPSTGPDPTLTPAPNTSNSTPPAPAPPSPSRATPPPKTTSNYPEGSTTRDSTSSSRKHNTSTLKIVGFVLAGVVLFIVIVFLVLFCLSKYQGRQSRYDRNRSQLGGVHHRVEPQIKPPPVQQSNDIKEGETPDRRVHQLSSSAAALPKKSPENQKEHIINFDQTDSDLFHVSLPPPPPPPPLTPIERVAANLIVPLEKRYIPPPKTSSSTSSASFSVASLQQYTDSLREENVIRESRLGRVYLAELPDGKLLEVLKIGNANGRISVDDFLEQIECISDIKHPNILELVGYCAEYGQRLLVYEHFSRTTLDDAIHDGKDTESALSWNARLQVALGSGKALEYLHHSFHSPIVHQNFEPANVLLDKKFSVCVAECGLAELMTSSSVTQLSGRMRASLDYEAPEFQDYGVISERGDVYSFGVVMLELLTGRKPYDSSRPRHEQHLVRWASWQLHDIESLSKMVDPPIRGHVLRSIVTFC

SEQ ID NO: 227854 - protein, 198 aa, Zea Mays
MMLGKRSGRPSPAARQHMRRTTSMTEFAAPHVLVDVAEEEEDEELQLLPAHAEATGEAAEQEDPYGWAIGGAAAAGRADWLAAYRARAAPALAGLRRNSADFSAAETAAFLRACGLCNRRLGPGRDTFMYRGDTAFCSLECRQQHITIEEWKEKCALATPPTAPASDPVVPLPPSGAGSDKPDQLSKGTPSFNFPRFL

SEQ ID NO: 227855 - protein, 146 aa, Zea Mays
MEGDRLRCTPALLPRIVVGRGGDIRNTVSGEDPVWPLGRSASLCPESRSSPTLSMEGDSVYRERIMVGRGGGIQSAASGEDLVWPLSRLASMCPGSRSSPTLCPGSRSSPTLSIEGDPVYRKQTVVGRGGGIRSMTRTPEAMGIYA

SEQ ID NO: 227856 - protein, 200 aa, Zea Mays
MEGDRLRCTPALLPRIVVGRGGDIRNTVSGEDPVWPLGRSASLCPESRSSPTLSMEGDSVYRERIMVGRGGGIQSAASGEDLVWPLSRLASMCPGSRSSPTLCPGSRSSPTLSIEGDPVYRKQTVVGRGGGIRSMTRTPVSVRGYGDLRMKGQINGAQGDSGADQLNTTIDDSEEVREICFLCWASRDGSIVAVGYITGS

SEQ ID NO: 227857 - protein, 187 aa, Zea Mays
MLADTLGTTGSLTGVDVAKHRLAACRTMLQKYSLGDRTRLFVADGTLFSLLPVNSRMQRMEGSIGVEENGSIFPEWTSRRSWKDRQKTRKANANGQQHLLAASEPELIYYGKHSGLVGQCKSDVFCPSVDDEACTSGYDKVLVDAECTHDGSIKHIQKFEFWGWKSLDRRVLDAERTENLLQLQMVL

SEQ ID NO: 227858 - protein, 64 aa, Zea Mays
MALDVQYQVHGRRQCHTCLQTSTLLEVLEGLSIPGVRRLVVIEQSTRFVEGIISLRDVFTFLLG

SEQ ID NO: 227859 - protein, 210 aa, Zea Mays
MLTASDFVLILRKLQRNIQVIGNEEPISAWKEAKLQFYGGPDGAAMQRRPLIHVKDSDNLVDVALTIIRNEISSVPIFKCMADSSGVPFLNLATLQGILKFLCSKLQEEAEGCSLLHNQLLSIPIGTWSPHTGRSSSRQLRTLLLSSPLNTCLDILLQDRVSSIPIVDDNGSLRDVYSLSDIMALAKNDVYARIELEQVTVQNHSTQVLC

SEQ ID NO: 227860 - protein, 143 aa, Zea Mays
MIAAGAASMGRAATPAPGAQSSRLPRAVSRLRLVLRSSEAAARSGSKRWIGCFRPSPSPATAAAGAAVVKEAKGKRPEVEVEPARGGGEDVWSADAETEVAQGGAFPEHLVIMVNGLVGSADDWKFAAEQFVRRMPDKVIVHH

SEQ ID NO: 227861 - protein, 346 aa, Zea Mays
MAVVVGEAGAEGVAGAGEAAGAGPGQHRAAAGGGDAAMHARARPRPGARARLPRNSLAACHGASGSADAGEVRAGGCAQARPFRLSEGELFEDTGRREAGQGEVGILREELAGPLGGGEVHGRREERQDSRGGQRQATAPVCFQEARRRRRKPPPPPPVAVLDDDGFRAEQPELRDHGGVAVQGLDDRAAVGAEPGVGGHGRGGPEPAARARARGRGRALRQPPVLLGHVVAARELEAGPVHADGQERVLAQPLRRLLRLPELHGQHGVVPRQGAVAERAQAEAAVREVQLPTQGVGGAEVGGGGGLLPARQVHQQGVPGLWQAGSAWLAGQVLILILILPNSRQG

SEQ ID NO: 227862 - protein, 261 aa, Zea Mays
MARLFFLLLLFPLLYSSVTGLNRSDFPPSFLFGASTSSYQVEGAYLDDSKGLSNWDVFSHVPGNIDDGSNGDVAADHYHRYKDDIEMMHSIGLSSYRFSLSWSRILPKGRFGGVNQAGVKFYNSLINGLLEKGIQPFVTINHYDIPEELQERYNSWLNPEIQEDFTYFVELCFKMFGDRVKHWVTFNEPNLIVKLAYSIGAFPPNRCSEPYGKCDSGNSSTEPYIAAHNMILAHAKTVNIYRKNYKSKQEGEKKLLKNQID

SEQ ID NO: 227863 - protein, 183 aa, Zea Mays
MQYYTKRRDRINQKMKTLQKLVPNSNKTDKASMLDEVIDYLKQLQAQVQLMSRMGSMMMPMAMPQLQMSMMAQMAQMAQMAQMAQMNMGSLGQPGYAGLTPPMMHPPPFVPVSWDTTATATTSLAPQAGSGTVPADAFSAFLACQAQQNGQQPGSMEAYNRMVALYQKMNQTQQSAPSNPSKQ

SEQ ID NO: 227864 - protein, 222 aa, Zea Mays
MAILYALVARGTVVLAEHSAAATNAGAIARQVLERLPDGGADSHVSYTQDRYVFHAKRTDGITALCMADDAAGRRIPFAFLEDIHGRFVKTYGRAALTALAYAMNDEFSRVLSQQMDYYSNDPSADRINRMRGEINQVRSVMIDNIDKVLERGDRLELLVDKTANMQGNTVRFKRQARRFRNTVWWRNVKLTAALILLLLVIIYVVLVFVCHGFTLPTCISS

SEQ ID NO: 227865 - protein, 85 aa, Zea Mays
MFFSGDPSARRRVDLGGRSSKERDRKVLLEQTREERRRRQGLRLQNTSATKIQKFFRGKKALELARSEVRKNFCSTFGEHCERIE

SEQ ID NO: 227866 - protein, 197 aa, Zea Mays
MKAICDKLEEASGKVDCSHIFPIKAMLALVVSDIKVDLDYRMAYGHRAWRNVVIRELIPFLILSKVLHRLIDARLVEIFDVEDDDKVVRCLRLLKNFDPNEFQPKSIASNFKFVKKGQATDQILELPLENCIYDMISSQGTKGITLVEICRGLVVGSMVILDHGHIAQAQIFCKTTLLANILDSTIQKNFINEYHPC

SEQ ID NO: 227867 - protein, 50 aa, Zea Mays
MLLCRSMEAASGHGDPMFNLDDEHWKKHFVLWTGIVCKHHDSNIVLLLIS

SEQ ID NO: 227868 - protein, 254 aa, Zea Mays
MKENLLDSWSMVCRWMDLSDWLAYRATGDDTRSLCTTVCKWTYLGHAHMKQWKESDSRDMEACGWDNVFWEEIGLGDLLEGNCAKIGRSVAFPGHALGSGLTPTAAKELGLLPGTPVGTSLIDAHAGGVGVMESIPDAGSKAVSDEHAICHRMVLVCGTSTCHMAVSKDRLFIPGVWGPFWSAMIPEFWLTEGGQSATGALLDYIIENHVASPLLSNHAASQSISIFELLNKMLLSMSQEQNSPFLSALTQDTQ

SEQ ID NO: 227869 - protein, 108 aa, Zea Mays
MALKHNGSLYAHVYFARSGYPVDPTDPKYEQKSSFGRTHPVVAFLPKSKAGKKKSLLGDSEEPEEKAPHNKENKEYEDKDEGLTEYISYFGMVVSIVELWRLRPLWQL

SEQ ID NO: 227870 - protein, 301 aa, Zea Mays
MPAAAFFSAALPPPSRTLSRRLVVSRAAAAAASASASSSSGWQGGGGVEFQGKVGFLGLGIMGAPMASNLIKAGCDVTVWNRTKSKCDPLLSLGANYVDVSTVDGATSKLIGERITSTGASFLEAPVSGSKKPAEDGLLIFLTAGDESLYKRVAPLLDVMGKSRFYLGDVGNGAAMKLVVNMVMGSMMVSFSEGLLLSEKVGLDPNTLVEVISQGAISAPMFSLKGPSMVKAAYPPAFPLKHQQKDLRLALALAESVSQSIPTVAAANELYKAAKSLGLSDHDFSAVIEALKAKVQSQSSQ

SEQ ID NO: 227871 - protein, 290 aa, Zea Mays
MNLLPVLRRQRYFLIHVDPQQNQCSIENKKRCTPCIPASSRYEPTPAQVASSCDVTFAMLADPQSAAEVACGSSGAAEGLAPGKGYVDVSTVDGATSKLIGERITSTGASFLEAPVSGSKKPAEDGLLIFLTAGDESLYKRVAPLLDVMGKSRFYLGDVGNGAAMKLVVNMVMGSMMVSFSEGLLLSEKVGLDPNTLVEVISQGAISAPMFSLKGPSMVKAAYPPAFPLKHQQKDLRLALALAESVSQSIPTVAAANELYKAAKSLGLSDHDFSAVIEALKAKVQSQSSQ

SEQ ID NO: 227872 - protein, 63 aa, Zea Mays
MAGSAADAEQEQKRAAAAAYDYEGDARWAEYWSNVLVPPNLASRPDVVDHLKRKFYQRYIDQG

SEQ ID NO: 227873 - protein, 899 aa, Zea Mays
MEEPGREGDSPGPPWAPSESSAFRAFVTAVGERAVASPSGSDNGDSVCSSNLRAVRKRPFVARLTTYIIQTFEKCNPEFKYSESLNPKRFLTNPAVPVHNHGLDNANSDLILYVNLELLNKKSSRRYVVQEMLGQGTFGQVAKCWDAETNSYVAVKVIKNQPAFYQQAIMEVSLLRLLNEKFDPDDEHHIVRMLDFFLYQNHLCIAFEMLGNNLYELLKRNSLRGLQMKYVRTFSRQILDALIIMKDAGIIHCDLKPENILIAPTVKTAVGVKVIDFGSVCMEGKTIYSYIQSRYYRSPEVLLGYPGQPPDDLLREAKNTGKFFKHVGSIYPSSEARNGASSAYRILSEDEIEARDSKKPKVGRWYFPRGRLDRLIYTYPWKNLSEGNLPETEKADCLALVDFLRGLVEFDPNKRWSPLQASYHPFITGEAFTGPYEPVQETPRIPVGRAAVVDHNPGGGHLLGAGLSPQVGSINRCLRFNNALQPNMPFSYGSSCGSFGSHGSFNDNAGFSYGSYDFNSVDIYNSPMDPSGFNLRSQLGGSFLGSSPHIRRRPHLSHGGGIRLSPGGPGHMSLGASPSQFTPPNSQMQIPTGPNGRYGASPSRGGHGSSLGKVAVVGQYNRRRNQGYPPMPMPPHEHTSQLIQGHQGDGVSTARFGAYAQGNSTYLHNALPNSSHYSWRSQRGSGSGLPLDPSSSRGSFPPTNYYGFPLHSDASADTLPSTSSVSDPADWDLNSSDKSLLQEDRTLSAGLSDLRLIDASGQTNRSSRLAPFQSHDILSSNPSTMNQRNGHLFHASSLGESTHTPGHVTLDGYEHTTYSQRSFPIYRGQPFQQYNNMTSSYIRPMRAHHNGQPVWSNYRLTEPPPTTMGDGMLWGGRGGHSFAASGLPPTLRKDFGRIF

SEQ ID NO: 227874 - protein, 183 aa, Zea Mays
MGDSQYSFSLTTFSPSGKLVQIEHALTAVGSGQTSLGIKAANGVVIATEKKLPSILVDETSVQKIQALTPNIGVVYSGMGPDFRVLVRKSRKQAQQYYRLYKEHIPVTQLVRETAAVMQEFTQSGYTEDMELDDAIHTAILTLKEGYEGQISSNNIEIGIIRADREFKVLSPSEIKDFLEEVE

SEQ ID NO: 227875 - protein, 183 aa, Zea Mays; identical to SEQ ID NO: 227874

SEQ ID NO: 227876 - protein, 123 aa, Zea Mays
MDTAASCRLLSPASSSPPPCPKQLPKRRPTFAASQQQSPSSSAKFRLLCLLHDKSASPTTSVQMQSSQSQLQRLATVLQCGAVWAAVEAPAALAVTGEEDIDLLGILPPLAVFAFFYFLVAPR

SEQ ID NO: 227877 - protein, 136 aa, Zea Mays
MSSCENGLKDHIKKVKTLLEELECLVENVYGITLTASLSALEVSDSQCLDSMLSTDRCSVEQEDRSADRLDRDVSFATVMVMVRNALKADYTMQEKIVCALSLKTPSSELEGYCLMWNLRPYIDDDVMRLAWKMCP

SEQ ID NO: 227878 - protein, 220 aa, Zea Mays
METNLRAQSPLCSRTRPALAVRPDAAATGLTLSVIRRSRFTRGGLVRCMVSSSDYHKSSPRRTSTSKSKGVPSGGYASRPTAESSTKKIEQSSDDEGDFSRTNGSLYGEAAEQASTAEESSQVYSTGDISSSAERGEAGTEEEADQNQSSALFSVSVDDDSIDRKLDEYRGKISALASSKPKSSSLASVAGQNEPVGGQEEPVTGSKEHDSSIVDAPIRG

SEQ ID NO: 227879 - protein, 210 aa, Zea Mays
MAKTTSAAAAMLLSGPAVSRDAGALFAGHHVAAPLFAQYHPYASAATLSASAPFPTITLDLTHSPPPPAAGLLQHRLPTPPVPAMPFPMPYGFPGAGGHRLAAAPVPAPHPPAGATLLGLDGRNRSALDTMTAAIASDPNFTTALAAALSTIMAGAGGAEPQAPHLSGAADASGDGGNGSAGTGPATAAAAGARETALHALLQRLNDSRQ

SEQ ID NO: 227880 - protein, 439 aa, Zea Mays
MPSELSTSNSRVSFSSNPRCEWQRASAHSRSSSPIGFSRSRPGTSHSHRSPKSSASHPMPPPVLRLFAAAPPRALGGRARAHRGDGGFARLRLRVRAAAGEAAPAPSRTQMIMDKISAGEGVGGAGGAYSYSALKRLDQIWSSICEAQADSKVPEVVTRVEGLLADSDLGSGSEIFDVIVCGGTLGIFVATALSSKGLRIGIIERNIIKGREQEWNISRKELMEIVEIGILSEAELEQIISSDFNPNRCGFEDKGEIWVENILNLGVSPAKLVENMKERFISSGGAIFEEKSLSSIYVYDDLAVLKLSDGDSLSCRLVVDAMGNFSPIVRQIRSGRKPDGMCLVVGACAHGFEKNTTSDIIFSSSSVKRAGNSGVQLFWEAFPAGSGPNDRTTYMFTYVDPTFGGPKLEELLEVFWDLMPAYQFFTTVGPVGFDFTTKV

SEQ ID NO: 227881 - protein, 766 aa, Zea Mays
MDGDHRRQAAAAVTVTQVSPARRLIAWLRLLFRAFVHRYGKVASWNAAGRPVFVVLAVFFLQRSLRRRYLSWKESSRLPLMAAAAVTVQTTVRAMAAQRELSVRKQTRAATRIQAQWRAHRAVWSYLTTKRAAVICQRAWRQSVARKELRKLRLCVQENLEREMLEEVCRLREMVDVLQQAVNDAETRAVNEREAAKDAMAQLEAASAIEETVVMVEDTEKVKSLSAEVDRLKDLLGAEMSETFAAKKALSEAELRNEKLARLLGVEEVKNKRLQDTLKRMEEKASSLDEENRMLRQAVASNPAIVRSPSGENHEAPGIQAAPDNEKSRNGTVKPIAVDREANVHEKGAEQPSSNGQEAGKQQQELLIKCLSEDLGFSVGRPIAAYLIYRCLVHWRSFEEERSVVFDRIIQKITAALEARDNNDALAYWLSNSCALLVLLQRTLKINGVAALARQRRRTSSPLKQENQDPAPDGQLICGLAQVYQVEAKYPAIAFKQQLTALLEKVYGMIRHNLKKELSPLLGLCIQAPRTFVVSPRGSCSQGTDLAQQASMAHWQSIIKILTNSLDVLKSNYVPPFLICKMFTQVFSFINVQLFNSLLLRRECCSFSNGEYVKAGLDELEHWCFWLTEEYAGSAWDELKHIRQAVTLLILDDKHSRSLAEITDDFCPVLSMQQLYRISTMYCDDKFGTLGIPSEVVSSMRTKMIEGSSSSPSAHDDINSFLLDDDFSIPFSVDDFTKLIVHVDVADMDLPPLIQESSGGGSKMGH

SEQ ID NO: 227882 - protein, 768 aa, Zea Mays
MDGDHRRQAAAAVTVTQVSPARRLIAWLRLLFRAFVHRYGKVASWNAAGRPVFVVLAVFFLQRSLRRRYLSWKESSRLPLMAAAAVTVQTTVRAMAAQRELSVRKQTRAATRIQAQWRAHRAVWSYLTTKRAAVICQRAWRQSVARKELRKLRLCVQENLEREMLEEVCRLREMVDVLQQAVNDAETRAVNEREAAKDAMAQLEAASAIEETVVMVEDTEKVKSLSAEVDRLKDLLGAEMSETFAAKKALSEAELRNEKLARLLGVEEVKNKRLQDTLKRMEEKASSLDEENRMLRQAVASNPAIVRSPSGENHEAPGIQAAPDNEKSRNGTVKPIAVDREANVHKGAEQPSSNGQEAGKQQQELLIKCLSEDLGFSVGRPIAAYLIYRCLVHWRSFEEERSVVFDRIIQKITAALEARDNNDALAYWLSNSCALLVLLQRTLKINGVAALARQRRRTSSPLKVPQQENQDPAPDGQLICGLAQVYQVEAKYPAIAFKQQLTALLEKVYGMIRHNLKKELSPLLGLCIQAPRTFVVSPRGSCSQGTDLAQQASMAHWQSIIKILTNSLDVLKSNYVPPFLICKMFTQVFSFINVQLFNSLLLRRECCSFSNGEYVKAGLDELEHWCFWLTEEYAGSAWDELKHIRQAVTLLILDDKHSRSLAEITDDFCPVLSMQQLYRISTMYCDDKFGTLGIPSEVVSSMRTKMIEGSSSSPSAHDDINSFLLDDDFSIPFSVDDFTKLIVHVDVADMDLPPLIQESSGGGSKMGH

SEQ ID NO: 227883 - protein, 386 aa, Zea Mays
MDGDHRRQAAAAVTVTQVSPARRLIAWLRLLFRAFVHRYGKVASWNAAGRPVFVVLAVFFLQRSLRRRYLSWKESSRLPLMAAAAVTVQTTVRAMAAQRELSVRKQTRAATRIQAQWRAHRAVWSYLTTKRAAVICQRAWRQSVARKELRKLRLCVQENLEREMLEEVCRLREMVDVLQQAVNDAETRAVNEREAAKDAMAQLEAASAIEETVVMVEDTEKVKSLSAEVDRLKDLLGAEMSETFAAKKALSEAELRNEKLARLLGVEEVKNKRLQDTLKRMEEKASSLDEENRMLRQAVASNPAIVRSPSGENHEAPGIQAAPDNEKSRNGTVKPIAVDREANVHEKGAEQPSSNGQEAGKQQQVWHRLRTFQLYHHFARGSCHAI

SEQ ID NO: 227884 - protein, 147 aa, Zea Mays
MASSDCFNRASYAGSAWDELKHIRQAVTLLILDDKHSRSLAEITDDFCPVLSMQQLYRISTMYCDDKFGTLGIPSEVVSSMRTKMIEGSSSSPSAHDDINSFLLDDDFSIPFSVDDFTKLIVHVDVADMDLPPLIQESSGGGSKMGH

SEQ ID NO: 227885 - protein, 1307 aa, Zea Mays
MDGAANWRPTQGADPATVAAVGGVDPNAAAPTGSDWRTQLQPEARQRIVNKIMETLKKHLPVSVPEGLTELHKIAVRFEEKIYTAATSQSDYLRKISLKMLSMESQKKTQQNPGNAQVIPNQNPPGPGSNPAQSSAIPLMSQQQTRQPNASTSVQGSLPSVGQNLSSVSQTLTLQNLSGMPQNTMNNGLAQGTPQDMYAAQRQMAGRQQQQQQQQAHNQFMYQQQKLLMNQKLQQNSRMQPHIQQQQTLLQSTQMQSSQQPMVQMSSGLQPGQIAIPQTQSMAMQSATQSGIQQNALNSVQQPVQSLLQQPTPSVVRQQQHPQSMHQQSSLQQTQPTQQPNIPLQQQPQQLMGHQSNLQQNQLVNQQSGAVEMQQQQRLPVQSTNLLNMHQTQQMMNQQSMPLHQPQQLANQGNVSSLNQQQQQLLGTVPNVRMHMLQQQKPIQQPQQQQHAQQTSMGLMQPQSQQNQLQQPQQHMMSQFQSQPNQTQQQLGMQQRLQTSAGMLLQQNNIDQQKQYVQAQKVLQEAPSTSVDSTAQTGHPGTGDSQEELYQMIKSLKDQYFAELNDVYNKISMKIQNIDNHMPAQKSAEQYERLKGFKGMLERILHFLQANKSSIQPGFREKISIFERQILSIMSSQRRKPVQAPGQQTFQQSGGQAPSSNMSQQHQTSQGLQQHDSHTNQMPQASLPSMNTGVPTSGAPGIQHVPAPQASNFGVPTTQQNVTNAPQAASNPENAQGNNFNPVQHGSMGTALQQGSTGPMQGALNAQHQSNSNMISNNAMSTMQTNTNAMQANVNSLQQLKQHQEHQMMQNQQMKQRQQMLQQMQQKKILQQQLPIQQLQKQQQQGPIQVQQLHSGNDVNELKVRQGAAIKSGMYQPLNQRNYYQQIKRGDVFPISSPQNLQASSPQISHYSHVDQHSLLQSQVKTGTPLHSANSPFVPSPSPPVAPSPVPLDSDKPLSNLSSLTSAGQAGHQQTSLAPLTQSIAVNTPGISASPLLAEFTSADGGQVSVPTQVPTKSSAAERPLDRLLKALRTTQPESLSAAVSDIGSVVSMIDRIAGSAPGNGSRAAVGEDLVAMTKCRLQARNFITHDGSGASKRMKRDTGAMPLNVSSAGSLNDSLKQSYTVGTPELQSTATSRVKCQRAEVNHVLLEEIQEINKQLIDTELHVSEDDAESFTTSDMAEGTVIKCTFTAVAVSPSLKSMFASAQMSPILPLRLLVPGSYPKCSPVLLDKFPDEQCRNSDDLSTKAKSKFSVLLRGLAEPMSLREIARTWDACARKVIAEYAQQTGGGSFSSSYGCWESCVGAS

SEQ ID NO: 227886 - protein, 140 aa, Zea Mays
MFESKIYELSDKDFKRNVKSLIDSKLEKFKNLWEESDFYWGEIQAGTLKFDRVESEVTMLRELKKEEFIEYFDQYIKVDAPQRRTLSVQVFGGNHSAEFKTAIAEADPPKMYRITDIFGFKRSRPLYSSLKGGPGRITMD

SEQ ID NO: 227887 - protein, 246 aa, Zea Mays
MSPSEYLTKRVVMLENELKCYYQTEGLNQKNQNSSVIQYIQVHQDDAILNIKLELFSLIASQPAFNQLRTVEQLGYITSLSLRSDYGVLALQDPSYLDGRVDEFFKMFESKIYELSDKDFKRNVKSLIDSKLEKFKNLWEESDFYWGEIQAGTLKFDRVESEVTMLRELKKEEFIEYFDQYIKVDAPQRRTLSVQVFGGNHSAEFKTAIAEADPPKMYRITDIFGFKRSRPLYSSLKGGPGRITMD

SEQ ID NO: 227888 - protein, 360 aa, Zea Mays
MATASSFTAIFFSSAFAACFAEVCTIPLDTAKVRLQLQRKAPLPSPPVAAAAAAGGTLATIMCIAREEGVAALWKGVIPGLHRQFLYGGLRIGLYEPVKAFFVGGAVVGDVSLLSKILAALTTGVIAIVVANPTDLVKVRLQADGKANTIKRSYSGALNAYATIIRQEGIGALWTGLGPNVARNAIINAAELASYDQFKQMFLKLPGFTDNVFTHLLAGLGAGFFAVCIGSPVDVVKSRMMGDSTYRSTLDCFTKTLKNDVWNPFPVFFLISCVYCSILLQIFFHLFKIKKSFHLGLCCQAYMCMCPVCQYPSTMYPCHFKLPYSDVQLVRLVLIRIGFYCLYNIFVSMDYSCSSPNSRL

SEQ ID NO: 227889 - protein, 94 aa, Zea Mays
MATASSFTAIFFSSAFAACFAEVCTIPLDTAKVRLQLQRKAPLPSPPVAAAAAAGGTLATIMCIAREEGVAALWKGVIPGLHRQFLYGGLRIGL

SEQ ID NO: 227890 - protein, 299 aa, Zea Mays
MCIAREEGVAALWKGVIPGLHRQFLYGGLRIGLYEPVKAFFVGGAVVGDVSLLSKILAALTTGVIAIVVANPTDLVKVRLQADGKANTIKRSYSGALNAYATIIRQEGIGALWTGLGPNVARNAIINAAELASYDQFKQMFLKLPGFTDNVFTHLLAGLGAGFFAVCIGSPVDVVKSRMMGDSTYRSTLDCFTKTLKNDVWNPFPVFFLISCVYCSILLQIFFHLFKIKKSFHLGLCCQAYMCMCPVCQYPSTMYPCHFKLPYSDVQLVRLVLIRIGFYCLYNIFVSMDYSCSSPNSRL

SEQ ID NO: 227891 - protein, 173 aa, Zea Mays
MCGLEKEEPTPERSEQLVDIGCQWVILGHSERRHIIGENDEFIGKKAAYALSQNVKVIACIGELLEEREAGKTFEVCFEQMKAFADSISNWADVVIAYEPVWAIGTGKVATPEQAQEVHAAVRDWLTTNISPDVASSTRIIYGGSVNAANCAELAKKEDIDGFLVGGASLKHI

SEQ ID NO: 227892 - protein, 65 aa, Zea Mays
MTQTAYGTIKTCLHETRCYEVKLQMEHVSPNRKRKLNHTNVCYAPLSIPRVEARHVHRELLNQQR

SEQ ID NO: 227893 - protein, 77 aa, Zea Mays
MLDMAYGSCNNEQNSKWQPVEATLFCIQAIARSVSIEEREILPQIMSLLPCLPQHEQLLQTVCLTIGAFSKWIDAAP

SEQ ID NO: 227894 - protein, 256 aa, Zea Mays
MTFNFWHCLKRNLIRRDSDVSYGLDVTVEIEKNRRLQIFRPKFETLVSLAYGSCNNEQNSKWQPVEATLFCIQAIARSVSIEEREILPQIMSLLPCLPQHEQLLQTVDILNKGMSTSEDTAAAASMAFKYICEDCRTKFSGSLDGLFQIYHIAISGVGGYKVSSEDSLHLVEALSVIITTLPPESASRALELICQPVINPLQEFIQQGDQVLQRVPARHLTVHIDRLSSIFSNVKQPEVVAEAVYRYWPTLKSIFD

SEQ ID NO: 227895 - protein, 151 aa, Zea Mays
MVSIVTEVWALAGCGPASKAAAVAVAAQELPAQHPSPAAAGGGKAKKRAVPVSFRGVSSGGGQDHQREAAAVVVGRRRGLASCALAAVAASFSARADRPARALVLEEDDDIELLERVKEDRKKRLQKQGIISSSGAETGPHLQAQQSRAGH

SEQ ID NO: 227896 - protein, 695 aa, Zea Mays
MCGHLLMHRVWKNLAMKWKNVLKEMAPLRSTGRFFQRHPSAICLLIFLLVLYKYFFGWFTLIVTTSPIFLIAGIFLGIVLVYGEPNNPEKDHVYKKNDNTRSLNIHDSSKSIRGVPLPRIPSGEERAPKHKNSVKKIRKQSRGVASSSEPGSSESGGSDTDIAPMLHAFHHLRSGSNSSNSSQDGDSDSSTEDTTENQQGNDGRISREGKQHVKVVAWTADDQKNIIKIGCLEIERNQRLETLIARRRARKYADRNLAEFGSTDSLPTIEELSKFNVQIPAVFAPRKNPFDLPYNEDNFPDSAPSAVLETRYPFDLPSEQANESSSYGANSSHDEPIPVACHLQSALLRRHESFTEGAPFLSDFLQDTQPSRFRPYFMTEKMANEEMTDPVLEGETSEKSNSKASSAQDSDSTSSVADQESQKDVLEDCSNQGQQSSFSQTEEHAHIARHAREVSLSLDMEPPVLISDSSDDDISLSGEHINDWEEAQQSENFSLSQNTWQEDPNVMQHHQEIDITSNGLNQMSPHSNDLELTSSSTETTDDPFEVNDIEPPAKEVVVVDDTHVVDPVYDSSPSGSERPAPTGLVIDGPVLKDGHACTLVVEATIEEGGSSSRMEVSSSEVAGPSLSSVEQSESPEKEASEIREQSMVGHVEAHGGSVSHADPSVSDISSQPSTESSTNGDSGSGVTPSFTNAVL

SEQ ID NO: 227897 - protein, 610 aa, Zea Mays
MQVMLLGFVLLGRSLEESARLKASSDMNELISLLSPQSRLIVTSSSDNPSADSSLNSDAITVEVPVDDVRVGDSILVLPGETIPVDGNVIEGSSFVDESMLTGESLPVAKETGLPVFSGTVNWDGPLKIRATCTGPSSTIAKIVRMVEDAQAREAPVQRLADSIAGPFVYTVMTLAATTFSFWYYIGTHLFPEVLLNDIAGPDGDSLLLSIKLAVDVLVVSCPCALGLATPTAILIGTSLGAKRGLLVRGGDVLERLAGIDTLVLDKTGTLTEGKPVVTSIASLAYEETEVLRLAAAVEKTALHPIANAIMNKAELLKLDIPITSGQLTSPGFGCLAEVDGSLVAVGTLDWVHDRFETKASPTELRDLRNRLEFMLSSEASSSNQSKSIAYVGREGEGIIGAIAISDILREDANLTVERLQQESITTFLLSGDRGEAVTSIGRTIGIRNENIKSSLTPQDKASIISTLQAKGHRVAMVGDGINDAPSLAAADVGIAMRTHSKENAASDAASVVLLGNRLSQVVDALSLSKATMAKVHQNLAWAVAYNIVAIPIAAGVLLPQYDFAMTPSLSGGLMALSSIFVVSNSLLLQLHGSFQNTEKRQGDLSSRLN

SEQ ID NO: 227898 - protein, 643 aa, Zea Mays
MNSLVGFGSAAAFTISAVSLLNPDWEWNSTFFDEPVMLLGFVLLGRSLEESARLKASSDMNELISLLSPQSRLIVTSSSDNPSADSSLNSDAITVEVPVDDVRVGDSILVLPGETIPVDGNVIEGSSFVDESMLTGESLPVAKETGLPVFSGTVNWDGPLKIRATCTGPSSTIAKIVRMVEDAQAREAPVQRLADSIAGPFVYTVMTLAATTFSFWYYIGTHLFPEVLLNDIAGPDGDSLLLSIKLAVDVLVVSCPCALGLATPTAILIGTSLGAKRGLLVRGGDVLERLAGIDTLVLDKTGTLTEGKPVVTSIASLAYEETEVLRLAAAVEKTALHPIANAIMNKAELLKLDIPITSGQLTSPGFGCLAEVDGSLVAVGTLDWVHDRFETKASPTELRDLRNRLEFMLSSEASSSNQSKSIAYVGREGEGIIGAIAISDILREDANLTVERLQQESITTFLLSGDRGEAVTSIGRTIGIRNENIKSSLTPQDKASIISTLQAKGHRVAMVGDGINDAPSLAAADVGIAMRTHSKENAASDAASVVLLGNRLSQVVDALSLSKATMAKVHQNLAWAVAYNIVAIPIAAGVLLPQYDFAMTPSLSGGLMALSSIFVVSNSLLLQLHGSFQNTEKRQGDLSSRLN

SEQ ID NO: 227899 - protein, 196 aa, Zea Mays
MAAVEVCVKAAAGNPDTLGDCPFSQRVLLTLEEKKVPYEVKLVDLGNKPEWFLNISPEGKVPLFNGGDGKCIADSDVITQVIEEKFPTPSLVTPPEYASVGSKIFPAFVKFLKSKDASDGSEKALLDELQALDDHLKAHGPYINGENVSATDLSLGPKLFHLQIALEHFKGWKIPENLTNVHAYTKVHKCSSSFQP

SEQ ID NO: 227900 - protein, 376 aa, Zea Mays
MYHRQDFARKGVHVLSSELKLVLGVSRNASKSEIKSAYRKLARSYHPDVNKDPGAEQKFKDISNAYEVLSDDEKRSIYDKYGEAGLKGAGMGTGDYSNPFDLFESLFEGFGGMGGMGGGRAARNRPMQGDDESYNLVLNFKEAVFGVEKEIEITRLEGCNTCDGSGAKPGTKATTCKTCGGQGQVVSSTRTPLGIFQQVSTCNTCGGTGEFSTPCNTCGGDGRVRRTKRISLKVPAGVDSGSRLRVRSEGNAGRRGGPPGDLYVFIDVLSDPVLKRDGTNILYTCKVSYIDAILGTTVKVPTVDGTVDLKIPSGTQPGTTLVMSKKGVPLLGKSNARGDQLVRVQVEIPKRLSSDEKKLIEELANLNKAQTANSRR

SEQ ID NO: 227901 - protein, 586 aa, Zea Mays
MAMLLRRRLPLLRLLRPLHTGSMASISSSSTPPPPPPPPLQKPHAAFVGPRSRRLRFPNAAPVESGRGAGKSSPAAAYLAMGAAAALASLPVAYADSNEQGAVDTVASADPAVGEDLARKERKRILELVQSRGMQRGSYPKFDVAVKGQKVVVKFNMPSNCNVSHLIVDLVTHIGLEAEQHGGGSEVLVRAWDSPAARQITLNPPKKTSTGDHNEDGLCVLIFEPLIGSDYSEIEFIKPGSFSLKELEALISALKIASEKGSSGKNTPRKGNGQRSKHLPSLEKVVSDLEAMGVRVYGFDETSSVPMDGTVIWENLAGYEPQKREIEDTVLLALQSPEVYDDIARGTRCKFETNRPRAVLFEGPPGKTSSARVIAKQAGIPLLYVPLEVVMSKYYGESERLLGSVFSLANDLPEGGIIFLDEVDSFAIARDSEIHEATRRILSVILRQIDGFEQDRRVVVIAATNRKEDLDPALISRFDSIICFGLPDQQTRVEIAAQYAKHLTRSELVQFSLATQEMSGRDIRDVCQQAERHWASKLIRGQVPKDEKGEPSLPPIDEYLSCAEQRRKSLPGRTSQTSRSPALKLA

SEQ ID NO: 227902 - protein, 137 aa, Zea Mays
MSKYYGESERLLGSVFSLANDLPEGGIIFLDEVDSFAIARDSEIHEATRRILSVILRQIDGFEQDRRVVVIAATNRKEDLDPALISRFDSIICFGLPDQQTRVEIAAQYAKHLTRSELVQFSLATQELVYPYSWLAS

SEQ ID NO: 227903 - protein, 125 aa, Zea Mays
MEAKKSGPAAAGAAAPPPANGYFSTVFSASPAGSANDAKQADLYTMLNKQSSRGQNGSGITDGKSHGRPTYKDGKHAYPNDSSESPYFGSSVHYGGREFYSSTLQKQPANEPQTIQGGQVGWLCY

SEQ ID NO: 227904 - protein, 114 aa, Zea Mays
MIATVILIIAKHLESANTMFSFIWWIIGFYWISAGGEEVIQDAPQLYWLCIVFLAFDVFFVVFCVALACIIGIAVCCCLPCIIAILYAVSDQVWLFKSCVMYYITQMVELTRHS

SEQ ID NO: 227905 - protein, 143 aa, Zea Mays
MPRPANRLGSGFIRGQVGSQTTTSSTPSLNHNHRQGRPPLLPRRHFLIASAINEAQRDLRVAAARALYRRRGPESGMWAGMSLGPPAADLGNPVWSHRPGQDEIARRNRTPAARPPFNVGRSFGASNEGSGLVASPASARRLS

SEQ ID NO: 227906 - protein, 143 aa, Zea Mays; identical to SEQ ID NO: 227905

SEQ ID NO: 227907 - protein, 414 aa, Zea Mays
MAGHLRNTDEHGLFYALDLGGTNFRVIRVQLGGRDRRVVKQQYEEVSIPPHLMVGTSTELFDFIAAELEKFVRTEGEDFHLPDSKQRELGFTFSFPVHQTSISSGTLIKWTKGFCINGTVGEDVVAELSRAMERQGLDMKVAALVNDTVGTLAGGRYADNDVVAAVILGTGTNAAYVEHANVIPKWTGLLPRSGNMVINMEWGNFRSDKLPRSEYDKSLDFESLNPGEQIYEKMISGMYLGEIVRRILLKLAHDASLFGDVVPPKLEQLFILRTPDMSAMHHDTSHDLKHLGAKLKDILGVPDTSLEARYITLHVCDLVAERGARLAAAGIYGILKKLGKDKLLGDFSQQRTVVAIDGGLYEHYKKFSACLEATLTDLLGEEVASSVVVKLANDGSGIGAALLAASHSQYAEAA

SEQ ID NO: 227908 - protein, 409 aa, Zea Mays
MRDPFDAPVDLINPDHNGGNKLSRTGAVSAGDYGLQNGPKSFAPNSDTLVRHQVQVASLHKDLVLEDPNTRIMDPETKELYFRSQSQGDEILLLRKKIAEASLKELRLLGEKHILERRLTDLRMAVDEKQEEAISGALQQLNQKKTHLEDNMRLANELKVEEEELYFFTSSLLSMLAEYNIRPPQINASIITTVTKRLYQQMHLKLRSLNDNLGDMTQPGNIYNPNLQQVTLSRNEPSPSYNLDSNRNTLQQYAQGPSDRHMDQMYHGSNFQQDTGGTTPSNYFEGDRRVDGDSQLYQPDGDALPGIEGFQIAGEPRPGFQLTACGFPTNGTTLCNFQWVRHLENGTRQSIEGATMYDYVVTADDVGTFLAVDCTPMDDNGRQGDLVTEFANNGNKITCEGMLGFLVGN

SEQ ID NO: 227909 - protein, 212 aa, Zea Mays
MDPTAPSPAPPAGDGAQPSDQNRQRPRSALRGALGVAFPIAVSFLFSFLVGLAGLALGGLSSTASVSMPSTCRILSSGVDLRSSKVCELGLLNYRAKHVFYPSSKRRFRCHDDYYWASVLQVEYTEYFSGQLSYAVAEAPKEALPHNCRPDFGAAWSTTLKFKVNESYSCRYMLGSNKADIHSNKLFNCTAEEPSTGELFKRILILIMQTSI

SEQ ID NO: 227910 - protein, 302 aa, Zea Mays
MDPTAPSPAPPAGDGAQPSDQNRQRPRSALRGALGVAFPIAVSFLFSFLVGLAGLALGGLSSTASVSMPSTCRILSSVCELGLLNYRAKHVFYPSSKRRFRCHDDYYWASVLQVEYTEYFSGQLSYAVAEAPKEALPHNCRPDFGAAWSTTLKFKVNESYSCRYMLGSNKADIHSNKLFNCTAEEPSTGELFKRILILFSEMYVSEDFSSGRMLVYVAAGVVLGMLSSMFITALFRGMYGLLLAAARWAVRKHCIRVFASRLKRACLLVAYVSAVGWITLQYSKFIGLKELLSDSEVMERFF

SEQ ID NO: 227911 - protein, 104 aa, Zea Mays
MGDRPAPIEKVAVPEKMALFLHAAVTSPGHQQQHGASSHEAPAAANITPRTTTARNKQQHLPVSPGACLCSPTVHEGSFRCRLHRGSGSGSGLHEMKMSKKAGV

SEQ ID NO: 227912 - protein, 132 aa, Zea Mays
MESVGLWTEAGESIKNATSPRLGRVGPAMGDRPAPIEKVAVPEKMALFLHAAVTSPGHQQQHGASSHEAPAAANITPRTTTARNKQQHLPVSPGACLCSPTVHEGSFRCRLHRGSGSGSGLHEMKMSKKAGV

SEQ ID NO: 227913 - protein, 226 aa, Zea Mays
MEEDSSAMEPNRLREAEAAAGELKRLREAGQSQYMYRSIADARVVGGRVCLFAVVSEIGATVHSRGTDFTVTLRVIDESYKSGISVTFFADSTALLPCVKSCGDVISLHNVVIKKYRDFFVQFDKKYSSFALFEGKTYTECSPYQTSIRYHDSEHDKDFLNQMRTWLPQGLKDFTSNNSELYLMNLKSDSTFDLVCKVFHVHVENNNSIFYVWDGTDTPAAEFPAM

SEQ ID NO: 227914 - protein, 783 aa, Zea Mays
MDYQGDNLRDFFQTNGRKVLQRAENNYSLKYFTENEIRNITDGYKSVLGRGAFGEVYKGTLEDQSSVAVKRYIHGTHKEVFAKEVIVHSQINHKNVVRLLGCCTEENALMIVMEFISNGNLDSILHGNRGNGRVPFPLKKRIEIAIEVAEVLWCMHSMYSPVLHGDIKPANILLDENFQPKISDFGIARLLSANGPQQATTVIGSIGYLDPAYCESGILTPKSDVYSFGVVLLEIITRNKAVDGTVTLAQSFNEALTKGEDVQHMFDEEISVAENKKFLRRIGQLAAKCLQRDVKTRPEMVEVANSLRMIRKAMQRDQDEDVLLAAYQFGDLKIFNETEMKEMTKNYSMAFRKSMCECLYNGVIGMNRPIIVRLLETSSETGREIFLNTMSILSQKNHKNVVNIVGFHIGKSSLECVYESCCDLSKTMLGSISLSNRNLYDTICSMKKLHLQQRLSIAVQCAEGLVHIHSLAAESPESCGTSLLGNFRSANIFLDENFVPKIFNVNLSTFLGLSGAQKHTVFSIHYNGPEKYYSDPRDVSGQLLNKKSDVYSFGVVLLELITWKTVRYMYNLRARVLTTDFLDSYRRDRDAIGMFGKVCDEHEGYFVHEALSIAIDCLQLDIQMRPEMEHVLFRLRIIVARSKLAGQGPYAECFLGVLKDGQNLAVKRLRTSEEIQVEVPTILRMCYHDNVVQFLGCFLEGGTRVLAYEYAPRGSLHDILHGKMGIKGARPGPPLSWLQRVKIAVSAAKGIEFLHEKVTLVFQYMMPIAGFIIGPSTILSGNI

SEQ ID NO: 227915 - protein, 821 aa, Zea Mays
MDYQGDNLRDFFQTNGRKVLQRAENNYSLKYFTENEIRNITDGYKSVLGRGAFGEVYKGTLEDQSSVAVKRYIHGTHKEVFAKEVIVHSQINHKNVVRLLGCCTEENALMIVMEFISNGNLDSILHGNRGNGRVPFPLKKRIEIAIEVAEVLWCMHSMYSPVLHGDIKPANILLDENFQPKISDFGIARLLSANGPQQATTVIGSIGYLDPAYCESGILTPKSDVYSFGVVLLEIITRNKAVDGTVTLAQSFNEALTKGEDVQHMFDEEISVAENKKFLRRIGQLAAKCLQRDVKTRPEMVEVANSLRMIRKAMQRDQDEDVLLAAYQFGDLKIFNETEMKEMTKNYSMAFRKSMCECLYNGVIGMNRPIIVRLLETSSETGREIFLNTMSILSQKNHKNVVNIVGFHIGKSSLECVYESCCDLSKTMLGSISLSNRNLYDTICSMKKLHLQQRLSIAVQCAEGLVHIHSLAAESPESCGTSLLGNFRSANIFLDENFVPKIFNVNLSTFLGLSGAQKHTVFSIHYNGPEKYYSDPRDVSGQLLNKKSDVYSFGVVLLELITWKTVRYMYNLRARVLTTDFLDSYRRDRDAIGMFGKVCDEHEGYFVHEALSIAIDCLQLDIQMRPEMEHVLFRLRIIVARSKLAAGSNNKPSQHIGRALVNNIDKLHPTLISTISMEELNEATGNFSNDVLIGQGPYAECFLGVLKDGQNLAVKRLRTSEEIQVEVMHVPTILRMCYHDNVVQFLGCFLEGGTRVLAYEYAPRGSLHDILHGKMGIKGARPGPPLSWLQRVKIAVTLVFQYMMPIAGFIIGPSTILSGNI

SEQ ID NO: 227916 - protein, 242 aa, Zea Mays
MASSRVMPSSSPSHTASDLARLAQAASRPGGGGSGLGSMNVEELLRGIYSDMPTPAPPASEPERPRSPAPAPEVATRRTAEEVWKEITGGGGSGEPVPPVAAQAAVPAGGGGAGGPEMTLEDFLAREEGAVKEDGVRVSGPSAPAMGFLGGAEGVGVPGGGGGRGRKRQLMDPVDRAAMQRQKRMIKNRESAARSRERKQAYIAELESLVTHLEEENAELLREQIPVPHECSSLSICKHLTF

SEQ ID NO: 227917 - protein, 149 aa, Zea Mays
MGGPLWSYPIHDKELLEAPLFVSLHNLCAILKCTTPTMVMLQCAIRNAGYQVSGSHVDPLALKTDAPMSVIWDIMRCWVKLHPVKHRPGNHPGNVILSQEPKFQAKFSRVLGASVTRKRARFMPNPEKYWGPGTKAGRNPRTFQMDNRN

SEQ ID NO: 227918 - protein, 356 aa, Zea Mays
MELVKLLLLTIMKVDLDPYGSPAAFLDSAVQCVADGGILMCSATDMAVLAGGNAEVCFSKYGSYPLRGKHCHEMALRILLACIESHAIRHKRYIVPIISVHMDFYIRVFVRIFTSASTVKSSPLKLAHVYQCTGCNSFYLQNIGRIHSKDKENIAVPNFRLTLPEVCSECGHQFVMGGPLWSYPIHDKVWAASILSDIHAMREAYPAYPKISAILSSVSEELLEAPLFVSLHNLCAILKCTTPTMVMLQCAIRNAGYQVSGSHVDPLALKTDAPMSVIWDIMRCWVKLHPVKHRPGNHPGNVILSQEPKFQAKFSRVLGASVTRKRARFMPNPEKYWGPGTKAGRNPRTFQMDNRN

SEQ ID NO: 227919 - protein, 150 aa, Zea Mays
MEYTVGGTLCKGLNRASGTLVAGFIAVGAHKVAYMCGDKAEPVLLAIFVFLLCTYLLADHFYRTARMHMQCCVACTSCSVGGDVLAVHPGGEGAVRLRRDHLHPHLQPGGRVELPRRRAHPPRAPPLLHHRRRRRHLPLHHHLRLPGLGR

SEQ ID NO: 227920 - protein, 173 aa, Zea Mays
MEKALLRYCASFLTPDDKRMILGIKDQAKQMIQSEVLQAMVQMGVLVPTGDMTVVRRTAQFFLNSFQECLIAQRKEREMATAELGFKKQLTKEEKFEKRKQRLAAIGEDLLAIAADQPFRFPATFTFVVRAFSVLDGTGKGLHPRNAKELLRFNDAGVEIVVKVCGETCVFLL

SEQ ID NO: 227921 - protein, 245 aa, Zea Mays
MTRVQILKNAREEVKVHKFINDSTSSKRQKKALEYDTDEDESMKSDSEENRDEDSDEAGDKQEGDYVSGKEKAGKFSEVKESSGKKKANTGSGHQSGPPKKIIRSPVKKVSSKIHEEKESPNNSAKVFSRKKKPTAEKEIKEKKSSGKKVTKGKGESVEAVLPSKDDLRKTITEILKKVDFNTATFSDILKKLDNHYKMDLAPKKEAIKVMIQDELTKLSEEDEGEGAGDTEKKQQQPQAKEIEA

SEQ ID NO: 227922 - protein, 411 aa, Zea Mays
MASSSSAATTSGDSQGLKARDACIVGVARTPIGALLGSLSSLPATKLGSIAIQGALKRAKVDPALVQEVFMGNVLSANLGQAPARQAALGAGLPNSVPCTTVNKVCSSGMKAVMFAAQSIQLGINDVVVAGGMESMSNAPKYVAEARRGSRFGHDVLVDGMLKDGLWDVYNDFPMGMCAELCSDQHSISREEQDSYAILSNERGIAAQDSGAFSWEIVPVEISSGRGKPPVVVDKDESLAKFDPVKLKKLGPTFKTNGSVTAGNSSSISGEKAKNLGLEVIARITGYADAAQAPELFTTAPALAIPKAISNAALQTSQIDYYEVNEAFSVVAIANQRLLGIPSGKLNLSGGAVSLGHPIGCSGARIIVTLLGILRQKNGKFGVAGVCNGGGGASALVLELMQPSSHIHSSL

SEQ ID NO: 227923 - protein, 418 aa, Zea Mays
MASSSSAATTSGDSQGLKARDACIVGVARTPIGALLGSLSSLPATKLGSIAIQGALKRAKVDPALVQEVFMGNVLSANLGQAPARQAALGAGLPNSVPCTTVNKVCSSGMKAVMFAAQSIQLGINDVVVAGGMESMSNAPKYVAEARRGSRFGHDVLVDGMLKDGLWDVYNDFPMGMCAELCSDQHSISREEQDSYAILSNERGIAAQDSGAFSWEIVPVEISSGRGKPPVVVDKDESLAKFDPVKLKKLGPTFKTNGSVTAGNSSSISDGAAAIVLVSGEKAKNLGLEVIARITGYADAAQAPELFTTAPALAIPKAISNAALQTSQIDYYEVNEAFSVVAIANQRLLGIPSGKLNLSGGAVSLGHPIGCSGARIIVTLLGILRQKNGKFGVAGVCNGGGGASALVLELISMSPSDL

SEQ ID NO: 227924 - protein, 438 aa, Zea Mays
MGNAGSNGGGAAAGHRRRSSGHGHHHQAPPPHQPQETAANRYVFAAATPYPPQYPNPNPPQYYPQYGNYYPPPPPSVPVPLPAPYDHHHRPPTAAPGEFPPPPLTHPHHYPGWAGRYPSYGQHLPMPTPYVEHQKAVTIRNDVNLKKETLRIEPDEECPGHFLVAFTFDATVAGSMTVYLFAKEELNCNLTAVKEDLMKPVTVSFKEGLGQKFRQPSGTGIDFSVFEESDLLKQGDMDVYPLAVKAETTLLVDHPPEGDDQKMKTPNSQITQAVFEKKENGDYHVRVVCQILWVNGTRYELQEIYGIGNSVEGDADANDPGKECVICLSEPRDTTVLPCRHMCMCSECAKVLRYQTTRCPICRQPVERLLEIKVNNKSEDQQQMPQSPPLPALDPQQEEVLAWLCRPLLYLPIWRWETKMPRRVCTIYTPCMRVPWLP

SEQ ID NO: 227925 - protein, 56 aa, Zea Mays
MFPRPRPARHRRQSDASDRPTTLGGRMACWRSSPKSPPPREIRALLLLLLVGNHSL

SEQ ID NO: 227926 - protein, 284 aa, Zea Mays
MAGRTEEARRSGERETVCVTGAGGYIASWLVKLLLSRGYAVHATVRDPRDPKNAHLGQLEWAAENLRLFKADVLDSDALAAAVSGCRGVFHVACPVPTDRVLDPESEVLAPAVQGTLNILQACSANNIQKVVVVSSTAAVHFDPNWPPHRPKDEDCWSDINFCKKNEDWYMVAKVIAEKTALEYGERNGLNVVTVCPTMALGPLLRPMLNVSHEFLMYIIKGGPTMMKNIPWHIVDVRDVVDALLMVYKKEESTGRYICAPNCISAKDLVNMLKRDYPNYNYRQ

SEQ ID NO: 227927 - protein, 778 aa, Zea Mays
MTGITEHTAADIYDYIGKHEERAFVLKFSAIEIYNEVVRDLLSAENTSLRLWDDAEKGTYIENLTEVILRDLDHLKELISVCEAQRRTGETYLNGNSSRSHQILKLTIESSAREFSGKDKSTTLVASVNFVDLAGSERASQALSVGARLKEGCHINRSLLTLGTVIRKLSKVRNGHIPYRDSKLTRILQISLGGNARTAIICTMSPARSHMEQSRNTLLFASCAKEVVTNAQVNVVMSDKALIKQLQKELARLESELRCPASYPGLEALVKEKDNQILEMEKEIKELKLQRDVAESRLQDLLKVVGDNHGSKHPLASSGRNFDVPQPCEDEQSTTSEVVSSGQNFRLQGRQTTQRDYRLQQSENDVQFATSLSCSVSSPPFSGMPPTNGRDDNSQISNEDSGDLCKEVRCIETNETEENKCLESSAVGSTSLQDSNVASSMHGNNNTNRSVNSRQHDESPITLEQHLENANNSLANLGMDLGSSTGNSPSSKVIDRSRSCRSLMGSTLLEDLEKQDCTPPSRSFVDYPGRPETCQRRVPALNYDVESETLSRTGSMLSEIITARDGLKENSSIAGDTESVAGIGEFVAELKEMVQAQYQKQRGNQGDDGELAEGTIRSVGLDPIMDDLQSPSRWPLDFEKKQQEIIDLWHGCNVSLVHRTYFFLLFKGDPADAIYMEVELRRLSFLKNTYSNGSMGRNVVAGSVSASLVLRQRNCNVRGRCSVGRCRSGWRSRNGRACTPSGESHCPPRGGGCRSLGAFGRRPRIWSMLGRARPSWPD

SEQ ID NO: 227928 - protein, 65 aa, Zea Mays
MTAALRAPQTMNLHKRKLRILHLLVLQRLPLMFQRKKAAVMKMMKVQKKALMMRIQNKLKLRKLL

SEQ ID NO: 227929 - protein, 281 aa, Zea Mays
MPTTHSLYHRCSAPLKAKASRNQPSLLSLLFPLTLLPRSSLIVTQSHYRAQSPSVLPSPPHGPSPPPPASTAPRRRHDHRPVPDPVTSRRAIHLTLLYRRRRPKPLILLLPAALQGHPHLHLARRVPVLLLAAARIAAPGRGAGAGARGRERPSARRVLPAGPSADARPRAVVVPSGPGARPRGARARAQQEADADEEEARASTARGRVPGHRHRHRRGPRPRPWPLHRRHDERSGAGLRRVGGDGDGGAGSSGRVADGGSDGGVMDGRATCQGRESGGLM

SEQ ID NO: 227930 - protein, 708 aa, Zea Mays
MLTGGLKFVTKCYGIVGFVKFLGPYYMVIITSRRKIGTICGHEIYSVGKSEMIAISSVTVWPNVAYSRDENRYKRLLCSVDLSKDFFFSYSYNIMRSLQKNITQKNTGQAVYEPMCVWNEFLTRAIRNHLKNTCWTVALVHGFFKQSKLSVSGKDFWLTLIARRSRHFAGTRFLKRGVNEKGRVANDVETEQIVFEDTSDGIPTQMASAVQHRGSIPLVWFQETSRLNIRPDIILKPDVDYKATRLHFENLALRYGNPVIILNLIKTREKKPRESLLRAEFAKAIHYINKSLPDDKRLKFLHMDLSKLSRRKGTNVLALLTKVASDVLDLTEFLHCEISTSTKPDDTSSGERTAAKPHDDRSSSDQTECAAKLAPLLLQKGVLRTNCIDCLDRTNVAQFAYGLAALGRQLHALGLTEAQKIELHDPLADDLMDFYEWMGDTLAIQYGGSAAHNKIFCEQRGQWKAATQSQEFLRTIQRYYNNAYTDHDKQDAINMFLGHFQPQQGKPALWKLDSDQHYNIGRQGTLKEEIGRSFIKRSLSDGNILLENNLPVTSCNNETNNTELLPMQQLDDIREPTDSAPEISICEPNPCSSVNYGRVPGRHSISEERQSYLKRLGYPELHSSNFLDLDLLSSSGNSCDEEVFERSSLINSPMDVVSVESSTSYSEQGHTDEGRDDMDLSRSSSQVSDVRDYSDRFAHWVADGGMLW

SEQ ID NO: 227931 - protein, 438 aa, Zea Mays
MEPPAAAAADSSPDPTPQDQFPAPSPSPSASPAKRSAWKHPSPNGPAVMDANHWPALSDAAKGIKLPDSSSSSPAPVAAPSAVANSSSSQKHGAHHVRHKSARRGGGGEHSPRDHPDRTTATGWDHAGGGGGRGAQRNHNNGGGRRGNAAAASAAGPSHHGAGGSGGGGGFGARRRGAYEPPFYRGPPPPVGMGHYMRGAPPPPPPPPPMTVAPPFMGPPPPPVSPMRPFAGPMVFHDMSSPVSPIYFYGPPPPEALRGLAIAPPMVGPPAYPYFQAQPEPQPEPQPDAEPDVEEERVKLLKQIEFYFSKENLCSDVYLRQQMDDQGWVDISLIAGFKKVQGLKKDLQYIKETVQSSSILEMKDNKIRKHDDWVKWVIPRESNPDVPSSSASVPRPDVNNLTAHLGGMDLQDSASSAGAVEPKHNDVVQNGSPSGHKW

SEQ ID NO: 227932 - protein, 290 aa, Zea Mays
MVLDLNVASPADSGTSSSSVLNSADGGFRFGLLGSPVDDDDCSGEMAPGASTGFMTRQLFPSPTPPAEPEPEPVAAPVPVWQPQRAEDLGMAQRPVAPAKKTRRGPRSRSSQYRGVTFYRRTGRWESHIWDCGKQVYLGGFDTAHAAARAYDRAAIKFRGLDADINFSLSDYEDDLKQMRNWTKEEFVHILRRQSTGFARGSSKYRGVTLHKCGRWEARMGQLLGKKYIYLGLFDSEVEAARAYDRAALRFNGREAVTNFEPSSYNAGDNNLRDTETEGITLGLVIRSFF

SEQ ID NO: 227933 - protein, 375 aa, Zea Mays
MAQAAGTADATDEAPLLLASSAAGSTPSPPGSAPRRNRFAFVCATLASVTTMLHGYNLTLMSGAELFMREDVGLTDGEVEVLAGSMNVFMLASILAAGWVADHLGRRRTLVLANAFLMAGALAMSLGTSFAALMAARFVTSVGSGFARVVAPVYNAEISQAATRGVLSSMLDVRTYSSTSASCSATCPTTRSRASRCTSGGVSCTPSASSRPCSSPPGCSSSCQSHRGGSRCRAATPTRARCCCARRTARQTPTSGSGRSSEPPTRRRPLLRRATVAAVSGGSSSSGHPPQPRACGASSAASSGCSSSCRRPASTPSSSTARWSSRRSAWRPPPPCSAPPCPSEPSRRASSSSPCSSPTASAGARSSSPAPPASP

SEQ ID NO: 227934 - protein, 154 aa, Zea Mays
MEQDHVSELFCRLLIVVYGILWGFSAPGPGADPKVDYACTPEEVQQHFQACGTVNRVTILTDKFGQPKGFAYVEFLEQEGVQEALNLNESELHGRQIKVAPKRTNVPGMKQRPPRGYNPYHGYPYRSYGAPYFPPYGYGRAPRFRRPMRYRPYF

SEQ ID NO: 227935 - protein, 91 aa, Zea Mays
MDEEEHEVYGQEIPEDGDMDGADVDMAASGDDAAKELDEMKRRLKEMEEEAAALRDMQAKVAKEMQGGDPSASTAEAKEQVDARSVYVGNG

SEQ ID NO: 227936 - protein, 182 aa, Zea Mays
MPACEDDFFEYLRSIDCSDVEVYAIPEGYAVFPKVPLMRIEGPVAVVQLLETPFLSLVNYASLVTTNAARHRLVAGKSKNLLEFGLRRAQGPDGGISASRYCYMGGFDATSNVAAGRLFGIPIRGTHSHAFVSSFMGLDEITDKTLTSSDGSNTCEDFISLVQNWLIRIQFIAWHLWRNEPK

SEQ ID NO: 227937 - protein, 985 aa, Zea Mays
MDEGLSASEGKILVEASSTVTTRMYQDGRRAESARCPRWELGPEAWPIGGGGGRVMRAPQERSMRDLYDRTRHKDMAAPEESVEGCGGGCAEGWEQRALASKMEDKTVVRKRLISSNNTRVKAESGTCNVCYAPCSSCLHPRSRFEDSNVECASSQTCSTRSEVKNNLLVHREKGLCSKGDNDDEFSATSDHALYSVTGRNKLVATSSIADDLSEVDMPSKRRRLLNQDTRLSRAEYLDDNNSCVTGISAEGKLLVDKKKLSISASSRDLTAKANSMANHNKLRNQCVDESKKGSDGCEMHPSSSGRFSPVDSLVMTKKLLRTQSSVSALSRLSPNRQVHEFGKAVDNLSHQPCEKASLLKNNEEPRAGQLNPCIAGENNHGTLAGYSNRHADKNDFSLNDLDNGTLCSKDEIQEHGDITSNDNDKKNVCVKQDSDQDCSMDISNDRKLNTQHDVMTDCGNSEGLIDVNVCDICGDVGREYLLATCTRCLEGAEHTGSFEVSGHGNSPEMFNGFQAYLSTCASSKVREVGEQLPDKIQLAEVPRHSSWPLQFNEVNPTEDNIALFFFAKDVESYERAYGKLLDNMLLGDLSLKANIDNMELLIFPSDKLPERIQRWNGLLFFWGIFYARKASSPLELPTNNCPLEQTNGPVIQHDMGSSKALQPLGIDLNECPNDDISDPALSLGSESEKFGASVDYNVLSESKHEDRNLNASEVHHEETAGTRQIIWGQPSVAPTVTNLPTISTGVHDIVPDYSAAAKDSTGTAGGNKMEKADQNEALFCFSQQPGAIGSISHEIKLKKHGLLPSHCHFSGSKICDDQTKSTPSSDMGSLDSHLTNKRQKTYGKHSTCIFGDEMPPIKCLSKIHPLPAGQDNPVDVLHCHRCPSDPVSLKKTVPDHIINVLSSDDEDSPEPSTSLNKASLKADEGSSALLLLSLSMVATKHNLSGSDIVDDEPLSLSLGFPSVVDGSEDQEMKQFLPEKPGINT

SEQ ID NO: 227938 - protein, 1552 aa, Zea Mays
MDEGLSASEGKILVEASSTVTTRMYQDGRRAESARCPRWELGPEAWPIGGGGGRVMRAPQERSMRDLYDRTRHKDMAAPEESVEGCGGGCAEGWEQRALASKMEDKTVVRKRLISSNNTRVKAESGTCNTCSTRSEVKNNLLVHREKGLCSKGDNDDEFSATSDHALYSVTGRNKLVATSSIADDLSEVDMPSKRRRLLNQDTRLSRAEYLDDNNSCVTGISAEGKLLVDKKKLSISASSRDLTAKANSMANHNKLRNQCVDESKKGSDGCEMHPSSSGRFSPVDSLVMTKKLLRTQSSVSALSRLSPNRQVHEFGKAVDNLSHQPCEKASLLKNNEEPRAGQLNPCIAGENNHGTLAGYSNRHADKNDFSLNDLDNGTLCSKDEIQEHGDITSNDNDKKNVCVKQDSDQDCSMDISNDRKLNTQHDVMTDCGNSEGLIDVNVCDICGDVGREYLLATCTRCLEGAEHTYCMRVKMEKVPVGEWFCEECQLKEDQNNTRSNYGNTAVNVTEGKNQRTESQSKLKALQIVVPDLDAPQVTHSALTADQCDGSKSLHLTSADTQTRLKDTTTAAERLDMKNKKTLSVARCNKLQVLTSDLDTRPHSYGKPTSGVYNKKSRSSDFLLNHKKLQVSTDMESPLSSEGLQSPPISSKRHVESMSSPKPRLFKTGSLGKHDVISRDNSFKKSNKGGLTSVDNVPVRTTQAAKSSETLSRSYSMGNMVNAKAPIPSARGLLSKQLSFNSTNNGPKVKQLADKMSSKLRPAEHSPRDPRDKEPIKKIVQSGSFKREGSDSVDVGSSKQKQTFHLSRDEKPGVLKPIKEKNLTERRASFSLKKPNIPSSPRSDSCMKSGERKNDQHISGTNILKSSKRPGYAEKNLRYDLSRTDNGNQDVTVHPKPMEVSGKDAYGVKTSNPLFRSQCAKKYRSNDVEDDDLPISVNNVNIAPNEHAEVVPTMSTAMTRESNLQDVPRESTSDDLAPKVVCCQQKLLENTGDDSCKTLEVVQDSGDILSATPRGLQMAHNLYPYDNKLDKPDLKKEAFADQSSALGNPLKDFVIPEQSYIWQGSFEVSGHGNSPEMFNGFQAYLSTCASSKVREVGEQLPDKIQLAEVPRHSSWPLQFNEVNPTEDNIALFFFAKDVESYERAYGKLLDNMLLGDLSLKANIDNMELLIFPSDKLPERIQRWNGLLFFWGIFYARKASSPLELPTNNCPLEQTNGPVIQHDMGSSKALQPLGIDLNECPNDDISDPALSLGSESEKFGASVDYNVLSESKHEDRNLNASEVHHEETAGTRQIIWGQPSVAPTVTNLPTISTGVHDIVPDYSAAAKDSTGTAGGNKMEKADQNEALFCFSQQPGAIGSISHEIKLKKHGLLPSHCHFSGSKICDDQTKSTPSSDMGSLDSHLTNKRQKTYGKHSTCIFGDEMPPIKCLSKIHPLPAGQDNPVDVLHCHRCPSDPVSLKKTVPDHIINVLSSDDEDSPEPSTSLNKASLKADEGSSALLLLSLSMVATKHNLSGSDIVDDEPLSLSLGFPSVVDGSEDQEMKQFLPEKPGINT

SEQ ID NO: 227939 - protein, 334 aa, Zea Mays
MESTAAPAACEIARLPDDLLSAALGRTGPLDACRAAAVSPAFRAAADADAVWSSFLPPDLPPLADGELPADATATKKQLFMRLSDPARPVLLADGLTHVAGQGHRGQVLHAVRQEADHHLGRYAAVLALDPPHRLQFDGISSLVWIHGRANSCASVQMSSGDYCFEAVWFSECAELQHVCWLEIRGKIPCDMLSRNTTYAAYMVFKMSDESYGLDYPLQEAEVSIGATRSTRQVCLGYVDDDEDGEEVPQNYRSFGAVGTVFRPRIGRRNRRQPPGVHVLHPQTRAGGWMEMEMGEFRNEEGEDGEVSVSLMETRGGNWKRGLTVQGIEIRVKK

SEQ ID NO: 227940 - protein, 418 aa, Zea Mays
MNIHQGWLQQFGHSVGISGSKMVLHMTHNVFSFRCFAANGRGFSADSTNKRKIKSKKRRKDVALESSEVISGNPRNRDQWVPELRTESENKSGKKVMDKKFLEKVEAVRRSALEKKKAEENKDYQAIDYDAPIESDKSTIGFGTRVGIGVAVVIFGLVFAFGDFLPYGSVSPSKESAVVKQKLSQEEEEKFKNALQGFQATLSKSPNDPTALEGAAVSLSELGEYEKASTFLEKLIKVIPDKAEAYRLLGEVKFELKDYEGSSSSYRSALSVSKSSSDNIDFEVLRGLTNSLLAAKKPDEAVDIILLCRRKLNEKSQTGLADLEATNDNGRQKPQDIDPIQVDLLLGKAYSDWGHISDAISVYDKLITDHPEDFRGYLAKGIILKENGKAGDAERMFIQAKFFAPEAAKALVDRYAQR

SEQ ID NO: 227941 - protein, 143 aa, Zea Mays
MTSASELFIARRAARGARLSDPDPDPDPHPVALRDQHGLGGRRQRRGCRPRRQLDAAGDVRQHLHTGAPPPRRRGSYTILSYIDNNNFGDSASRRNRLDRLMFRTNERLPGAVLQAQARVLERLRETGKRGMRQTGPTHRRST

SEQ ID NO: 227942 - protein, 541 aa, Zea Mays
MRPPGSVAIKDYAIETPLEILPNSEGQPLYEMQIKFDKDIPIAAVNFVLKEEETGAWFQHKGRDFRIPLNGSFNDGGKQDIDIWPGDLGHVLKKSEGSSSQPQNTSPEDTGLSGKHISGFYEEYPILKSEYVQNLVTVTVRRDIEAHKRLVEFDTDIPGEVIIHWGVCRDNTMTWEIPPEPHPPKTKIFRHKALQTLLQQKADGAGNSISFSLDAEYSCLFFVLKLDEYTWLRNLENGSDFYVPLTRVGQYGSTQDPDKAEAQKIEDKSSQADGLISDIRNLVVGLSSRRGQKAKNKVLQEDILQEIERLAAEAYSIFRSPTIDSVDESVQLDDTLSAKPACSGTGSGFEILCQGFNWESHKSGKWYVELGTKAKELSSLGFTIVWSPPPTDSVSPEGYMPRDLYNLNSRYGSMDELKELVKIFHEAGIKVLGDAVLNHRCAQFQNNNGVWNIFGGRMNWDDRAVVADDPHFQGRGNKSSGDNFHAAPNIDHSQEFVRNDLKEWLCWMRKSATMDGDLTLFVVSGVDMSRTIWKQVNHTLQ

SEQ ID NO: 227943 - protein, 255 aa, Zea Mays
MRGALVVVMHGLNEHSGRYDHLARRLNGIGIKVYGMDWTGHGGSDGLHGYVQSLDHAVSDLKMYLKKVLAENPGLPCFCFGHSTGGGIILKAALDPEVETLLRGIVLTSPAVRVQPTHPIIAVMAPIFALIAPRYQFTASHRNGPPVSRDPEALRAKYTDPLVFTGAIRVRTGYEILRLTSYLQQHLHRIAVPLLVLHGADDLVTDPRGSRALYERASSADKSLKLYDGLLHDLLIEPEKDRVMDDIVAWLSPRV

SEQ ID NO: 227944 - protein, 197 aa, Zea Mays
MGNPLEKLRPDHSLEHIRPLIFPAKRRKVVTMKKRKERVSSESTLPSVVGTTAEESTALIPAASESKAQKDLTPVGRDALSRIRGRDFDSACGLTEDTGALIVWQAPPILEETAAHNQLDSKQDPDSFRPPATSDIEYQRQGPTAQMTNISFMVGNSSHARPTDQDDENMRGDILTLINEVLVKRSFKISCRRAQSC

SEQ ID NO: 227945 - protein, 287 aa, Zea Mays
MLHGAQQASASSTAGPRPKSTAILQSDQPPRAAAAREGGRGGTGPESLVRGSVVAPCVSCGICGGLLRDATAFTECLHAFCRKCIYDKVAKDNIKCCPKCGIFMGNPLEKLRPDHSLEHIRPLIFPAKRRKVVTMKKRKERVSSESTLPSVVGTTAEESTALIPAASESKAQKDLTPVGRDALSRIRGRDFDSACGLTEDTGALIVWQAPPILEETAAHNQLDSKQDPDSFRPPATSDIEYQRQGPTAQMTNISFMVGNSSHARPTDQDDENMRGDILTLINEATGK

SEQ ID NO: 227946 - protein, 214 aa, Zea Mays
MAASALHLRLHPSPPAGVKLQQRKLRSRQGGLSRRFSKVVSYYGLTTPPYKLDALEPYMSKRTVELHWGKHHQDYVDGLNKQLATSPLYGYTLEDLIKEAYNNGNPLPEYNNAAQVWNHHFFWESMQPEGGGLPEGGVLQQIEKDFGSFTNFREEFIRSALQLLGSGWVWLVLKRNERKLSVVHTRNAISPLAFGDIPIISLDLWEVRTWTMSF

SEQ ID NO: 227947 - protein, 594 aa, Zea Mays
MASRHRNASPVTAGKDSPQPASAATSLRLVAEFPLDAPEAKESVTVTVRFRPLSSQEVRLGEEIAWYADGDTIVRSEQNHSIAYAYDRVFGPTTTTRHVYDAAALHVISGAMEGINGTIFAYGVTSSGKTHTMHGDQRSPGIIPLAVKDAFSIIQETPKREFLLRVSYLEIYNECPFAQEVCNQILNWEGLTMPQQANPSNFDSISEWWESAASHISRDRSREFNGSVIYTMWNIWKERNRRIFEHNSLSVVNDLLNPSGQNLRIREDLQGTFVEGIKEEVVLSPAHALSLIAAGEEHRHVGSTNFNLLSSRSHTIFTLNLIDLAGSESSRAETTGVRRKEGSYINKSLLTLGTVISKLTDGKATHVPFRDSKLTRLLQSSLSGQGRVSLICTVTPASSNSEETRNTLKFAHRAKHIEIQVSQNKIMDEKSLIKKYQNEICQLKEELDQLKRGILSGTPSKDATEDNVILWKQKLEDGNVKLQSRLEQEEAAKAALLARIQRLTKLILVSTKATQTPRLSQCPRPRRRHSFGEEELACLPHRRRDIVLDGESNDLFVAMEGFDETFEVSSKGENKNRKGLLNWFKLRVYKSDTV

SEQ ID NO: 227948 - protein, 336 aa, Zea Mays
MEGINGTIFAYGVTSSGKTHTMHGDQRSPGIIPLAVKDAFSIIQETPKREFLLRVSYLEIYNEVVNDLLNPSGQNLRIREDLQGTFVEGIKEEVVLSPAHALSLIAAGEEHRHVGSTNFNLLSSRSHTIFTLTIESSGPCSESSEEEAVTFSQLNLIDLAGSESSRAETTGVRRKEGSYINKSLLTLGTVISKLTDGKATHVPFRDSKLTRLLQSSLSGQGRVSLICTVTPASSNSEETRNTLKFAHRAKHIEIQVSQNKIMDEKSLIKKYQNEICQLKEELDQLKRGILSGTPSKDATEDNVILWKQKKMVMSSSSLDWNKKRQLKLLCLQGYNV

SEQ ID NO: 227949 - protein, 919 aa, Zea Mays
MSGMSARIKEMVRVATARLGGEQAGGGGASSSGFARRESTARLGGGGTSLRRQPQPMAPSVRTVCCNDREANAPVGYKGNSVSTTKYNILTFLPKGLFEQFRRVANLYFLMISIMSTTPISPVHPVTNVVPLSLVLLVSLIKEAFEDWKRFQNDMSINNAHVDVLQGQCWESTPWKRLQVGDIVRIKQDGYFPADLLFLSSTNPDGVCYIETANLDGETNLKIRKALEKTWDYVIPEKASEFKGEVQCEQPNNSLYTFTGNLIMDKQTIPLSPNQLLLRGCSLRNTEYIVGVVIFTGHETKVMMNSMNVPSKRSTLEKKLDKLILALFATLFTMCVIGAIGSGVFINEKYFYLGLRGHVEDQFNPQNKFVVTILTMFTLITLYSTIIPISLYVSIEMIKFIQCTKFINNDLHMYHAESNTPALARTSNLNEELGQVEYIFSDKTGTLTRNLMEFFKCSIGGEMYGTGITEIEKGGAERAGIKIDDDEGKRSANAVHEKGFNFDDARIMRGAWRNEPNLEACKEFFRCLAICHTVLPEGEETPEKISYQAASPDEAALVAAAKNFGFFFYRRTPTTVMVRESHVERMGSIQDVPYEILNVLEFNSTRKRQSVVCRFPNGRLVLYCKGADNVVYERLADGNHDMKKTSREHLEQFGSAGLRTLCLAYRDLSREQYESWNEKFVQAKSSLRDRDKKLDEVAELIEKDLILVGCTAIEDKLQEGVPTCIETLSAAGIKIWVLTGDKMETAINIAYACSLVNNDTKQFIISSETDTIREAEDRGDPVEIARVIKDSVKQSLKSFHEEARHSLISTPERKLALIIDGRCLMYALDPTLRVDLLGLSLSCHSVVCCRVSPLQKAQVTSLVRKGAQKITLSIGDGANDVSMIQAAHVGIGISGQEGMQAVMASDFAIAQFRFLTDLH

SEQ ID NO: 227950 - protein, 348 aa, Zea Mays
MSGMSARIKEMVRVATARLGGEQAGGGGASSSGFARRESTARLGGGGTSLRRQPQPMAPSVRTVCCNDREANAPVGYKGNSVSTTKYNILTFLPKGLFEQFRRVANLYFLMISIMSTTPISPVHPVTNVVPLSLVLLVSLIKEAFEDWKRFQNDMSINNAHVDVLQGQCWESTPWKRLQVGDIVRIKQDGYFPADLLFLSSTNPDGVCYIETANLDGETNLKIRKALEKTWDYVIPEKASEFKGEVQCEQPNNSLYTFTGNLIMDKQTIPLSPNQLLLRGCSLRNTEYIVGVVIFTGHETKVMMNSMNVPSKRSTLEKKLDKLILALFATLFTMCVIGAIGRRIRLVG

SEQ ID NO: 227951 - protein, 517 aa, Zea Mays
MDKQTIPLSPNQLLLRGCSLRNTEYIVGVVIFTGHETKVMMNSMNVPSKRSTLEKKLDKLILALFATLFTMCVIGAIGSGVFINEKYFYLGLRGHVEDQFNPQNKFVVTILTMFTLITLYSTIIPISLYVSIEMIKFIQCTKFINNDLHMYHAESNTPALARTSNLNEELGQVEYIFSDKTGTLTRNLMEFFKCSIGGEMYGTGITEIEKGGAERAGIKIDDDEGKRSANAVHEKGFNFDDARIMRGAWRNEPNLEACKEFFRCLAICHTVLPEGEETPEKISYQAASPDEAALVAAAKNFGFFFYRRTPTTVMVRESHVERMGSIQDVPYEILNVLEFNSTRKRQSVVCRFPNGRLVLYCKGADNVVYERLADGNHDMKKTSREHLEQFGSAGLRTLCLAYRDLSREQYESWNEKFVQAKSSLRDRDKKLDEVAELIEKDLILVGCTAIEDKLQEGVPTCIETLSAAGIKIWVLTGDKMETAINIAYACSLVNNDTKQFIISSETDTIREAEDRIQ

SEQ ID NO: 227952 - protein, 169 aa, Zea Mays
MAGYKAQGGALGVVLAVAALFAAAAMAMAVDDEHMYHWKCFKSCTGNCRDEDAFDDVVARHSEGSSHVVVAAVSGGKCKDRCLSECFEDLPALCYHQCVATNCLCYPPFSNEKVMCLKSCCNKCFHHGPPAPKPRPPAPKPPTPRAPPPPKKPCPCPPGSDEVEASENN

SEQ ID NO: 227953 - protein, 146 aa, Zea Mays
MPGIQEEMWGGNASDQRSNVKKFLYFVAEMGLPGFSVKDLEEVRFQMTDSSLETSTGAASIGLCVVYYVKVCKYAYKLVHAQSGSSTRHECKRMDYIAHGQTTNTATLQKMGKMEKTIGEKEVGGLIGHSTSDTSRRVEQESVGNA

SEQ ID NO: 227954 - protein, 204 aa, Zea Mays
MADCFYLYDTFDIGFITTDEFGNADILEATYPAVAKRLHGDWIQDPAIPVVTGFLGKGWKSGAVTTLGRGGSDLTATTIGKALGLREIQVWKDVDGVLTCDPNIYPHAKTVPYLTFEEATELAYFGAQIVLTSIVLKSNVTMLDIVSTRMLGQYGFLARVFAIFEDLCISVDCVATSEVSVSVSLDPSKIWSRELIQQLKSLRK

SEQ ID NO: 227955 - protein, 133 aa, Zea Mays
MADCFYLYDTFDIGFITTDEFGNADILEATYPAVAKRLHGDWIQDPAIPVVTGFLGKGWKSGAVTTLGRGGSDLTATTIGKALGLREIQVWKDVDGVLTCDPNIYPHAKTVPYLTFEEATELAYFGAQDLNRV

SEQ ID NO: 227956 - protein, 340 aa, Zea Mays; identical to SEQ ID NO: 227669

SEQ ID NO: 227957 - protein, 426 aa, Zea Mays
MSASTEPEKDAAAAAATEGDEKTEAKDSGSGWELLYCGGTSFDAMGRKVVGGAQGNLVSPTRLRPLVGVDIRFVASGCTACHCVALDAGGKCYTWGRNEKGQLGHGDTLLRNLPTVVSQLSKYKIIKACVGRNHTVVVTDDGKSLSFGHNKHGQLGTGSLRNEIESSPVSCIVAEATNVACGADFTAWLSSVEGSSILTAGLPQYGQLGHGTDNEYNAKESSVKLTYEPQPRPRAIAAFSGKTVVKVACGTNHTVAVDSNGFVYTWGFGGYGRLGHREQKDEWQPRLVEVFQKHNVLPPNAIVSAGSVSSACTAGGGQLYMWGKMKNTGDDWMYPKPVMDLSGWNIRCMASGNMHHIVGADDSCISWGVAQNGELGYGPNGQKSSANPKKVDILEGMHVTSVGCGFGLSLIVVDRANVGDRLAGNL

SEQ ID NO: 227958 - protein, 176 aa, Zea Mays
MGSGGFAAAVAACPSAAEAFLKYYGIVSGGTSAESRQALVELSLAIDGIEGMRDVIFADIPKLIPFIDLEDMSLFSCFYDFVFFICREKGQKSVTIQRAVAAWRIVLSGRFRLLDRWCNFVEYQRHNISEDTWQQLLAFSRCVNEDLEGYDPRGAWPVLIDDFVEQMHRPRVAPIE

SEQ ID NO: 227959 - protein, 449 aa, Zea Mays
MNSNIIVVLRSLQLVSNTFAHTLEEHDMLKVELGNKDAHNRAQESEVLSLQKDLRAMSSKCIYCVQQIEIVFDDMVDLGYAIDLATGSSSIGSELEVTVSDLKNEDTSDYSKVADTLLATIDTLKSKSEKLSTIKGLVITSLDDFKMKLKQAEAAAETASHEHQLSVERVCMLEKELKILQDECNKMELNIQEYKEREGALKARELELLSVEHTQISADRGLTDNAISKDQTEALVEKISKLNMLSGESNVQREEATSPLDKLFVVIDEFSALQHEVETLRYENEDLQLNIESYTREIEQLREVSRNSDLTNRELESKGSELLEVAVSMERMIQRLGYLGGKDVLEDNKPASTQALLSKLEKLIIASSTESGNSKSIIQELGAKLQSREKAVDELSTKVKMLEDLCHAQLSQPEPSKDRSFEASSSTIGSDMSDIEDADVRTRVTEVIR

SEQ ID NO: 227960 - protein, 1034 aa, Zea Mays
MESQRYNYGSGAGTGGKIRRYPPSRAVAASPYARPATAPTHAPGTATAAVSHEGGWLSRIIAAGTSRFLPSLFSFSTSQPQQAAPAPSPTRDQLPVVEPPSPLPPPLVDDRPECEENGGVAANNLCTENPQSCTKEEEENMLRNSDDHGGTALEELLKQRTFTRSEFEYLANLLWSKTIGANSLKLEDGNVRKMIVYDKENASEYSNLPLNFSTTTFSADDQVATPAEIAKAYMGLKSSKGSPLRLRLHDPSSMPITSMEVSMSQKAKPPTIPLAQGSRLHTSKTSDCLESNYTTPNGVICKMSSSPYFKSGVSSKELFGSVSSHYQTSNSVHTFGRQVLKRKSTVSNEFVSAGPIRRIHQRYNRTSPLLETQLGYRRYPVGYGSKLEGSEQLARTQKRRCLDKVGDASLGSVEDKTNVNYPGQVPEKSAEMATKILKQLDTLVPSQKENTSETKQKHESAIYFEEDVSRQKKVQAERDLLEPSPSEVPDGIASNKSISQITLNKEKPPAFSSRGNAPNLVLSDEIGRSKMSTPGNGFTFPAPTVNNAYSQGPPTPTLTSPILTVEKQPSVFCSASVTSAQSDPRISKSVLGGPVTQKLESKLNGDNQRVPSKNSGQVASFTSNPVFKVDGPGHASNSVLSAVQSYNTSTGSVSFQSAGSSTISTNLTSNITQSCSTGGSFTFSNTRFGSLSATSNMFAAKSLALSCTASPGASLGFPPVHTASSPAAHRKSEAANSSISFSSMQQFGIAGSSTVQDKSKAVDSSTPFGFPQKFDTVSSASEDMSKADSPEPTFFSGNHNVQSENCSSLFTQSPGNNLSSKSSENLNSGSSHSFADSPVGSATMCSSPSNSNSLFSWAAGSGARTAPPSSPATSSSFAFSSSPAFSAQPVFASKLTTPASLSYGSPNTGPATSPFSSMPSAVFSFTSATPSIPNPSPTTPIFGDPTVQMNGGNIVIDRNGSPSPATSPFGLPSSSPSTPTFSTPATQFASSTSGSPGVFEIGKYSQASSGGFSMGPSGGNDKSNRRIVRVKRRK

SEQ ID NO: 227961 - protein, 478 aa, Zea Mays
MTDNLYRDLSHNYLTGNIPSSFSNLLSLSDINLAYNNIRGAIPQHLLQVAQYNYAGNHLNCGQNLSACERGSTLTGGSKNFKLNVVIGSIAGAVTFSVTVVLVLLWWQRMRYRPEIFIDVSGQNDHMLEFGQIKRFSWRELQIATSNFSEQNVLGKGGFGKVYKGVLPGPNSIKIAVKRLLNVDSRDGEMAFLREVELISIAVHKNILRLIGFCTTPTERLLVYPFMENLSVASRLRDIKLNEPALDWSTRMRIALGAACGLEYLHEHCNPKIIHRDVKAANVLLDGNFEAVVGDFGLAKMVDIGRNTVTTGVRGTMGHVAPEYIKTGRPSVKTDIFGYGVMLLEIVTGERAIAFHPDRIEEAGEILLTDQVKLWMEEGRLLDLVDRNLGGVYNLEELEKVTQIALLCTHMDPEQRPTMSEVVQMLEGEIVPAERWEEWQLAELQRRQQHEMRQQGKLFNFSEESQNIQEAIELSAGR

SEQ ID NO: 227962 - protein, 106 aa, Zea Mays
MSSDSSSWARALVQISPYTFSAIGIAVSIGVSVLGAAWGIFITGSSLIGAAIKAPRITSKNLIRQSLKVCQHPKCTIRSLFELAMRSLHLVLSLASLILFAGYVWG

SEQ ID NO: 227963 - protein, 133 aa, Zea Mays
MQAQRDAPPDMHCKDKFLVQSAIVAKETMPKEVTGDMFTKDSGNIVDEVKLKVVYTAPSSSQSEGFEDGNLGSLSYQEETKEPKESEKIISEPFALISKLMEEKNSAVELNNKLRQELVHMIPPSTFIKCIFI

SEQ ID NO: 227964 - protein, 153 aa, Zea Mays
MQAQRDAPPDMHCKDKFLVQSAIVAKETMPKEVTGDMFTKDSGNIVDEVKLKVVYTAPSSSQSEGFEDGNLGSLSYQEETKEPKESEKIISEPFALISKLMEEKNSAVELNNKLRQELDLLRRDISRQHGGFSLVLVLVVAILGILLGFLMKR

SEQ ID NO: 227965 - protein, 74 aa, Zea Mays
MAPLQQTSRSWHPNPCGSPAIRVPCVLGWSSRVVAVEIAICSRASRNRRTSFSDQEIELFEFYEAEDSEHLFGE

SEQ ID NO: 227966 - protein, 149 aa, Zea Mays
MESAVNPKAYPLADAQLTIGIIDIIQQAANYKQLKKGANEATKTLNRGISEFVVMAADTEPLEILLHLPLLAEDKNVPYVFVPSKQALGRACGVTRPVIACSVTSNEGSQLKQQIQGLKGDGPQRHIFSEAWTGDGVLFTRFYVFPNYV

SEQ ID NO: 227967 - protein, 890 aa, Zea Mays
MDDFQGLLARDFGLRPQGKAAPMSAARSSSPSGSAWTNTRSAVGSAAPSAPSYDELFGSAPPPPPKATPSLDNIFNSFKEPASTAPPPKPKHSSAPVFDKPVYDDDIFIGVPGVKSSSVPYDDVFGGSQSREAPPAFDDLLGGFGKSSQVREEVDDKRKPEAPTAVAATGFDYLIPSFGGRSSPRQRDAIGAKQKKVSMSTSKQSASLSDPFVVLETTSSSAHPFADPLDESGKAAKYQGKNRESTSVGSSLFEDSSTFNQAPKFEPFFTPEVDNGSKDRNESSRAQNSNPVQDFSKRNSSQQPSVEDFENIFPKSQSARYSDVHVDIGSEKYSGNGINDQSPRSDESEDEIWLTASEIPLFTQPTSAPPPSRPPPPLAVKQKHGSRSTRKDEHLRRSRKNNDHQRSFSNQAGVSTVDGLEDFTMGKSQNVHTFNEEEFERSTAAAAMKEAMDKAEAKFKHAKEVRERERDAKLRNREQQERDNVIRSYAQDREDKERNERLEQEREMKQKEEKEREQRRLEEERELERHRERERARQAVERATKEARERAASEARAKAEREARKRSERAAVQRAQQEARERAAADAKDRAERATAEANERAATEAKEKAASQARDRAAAEKAAVERAQQEVRKRAERAAVERAAAEARERQAAAAAAAREKTSKPDDLESLFGMGARANSAPKQRAPTVDSMFDSQTQNRGTSTSTSMKKASSTANVADDLSALFGGAPTSSNEFQEVDGESEERRRARLERHQRTRERAAKALAEKNERDMQQQRDQAERHRLAETLDFEIKRWAAGKEGNLRALLSTLQYVLWPECGWQPVSLTDLITAAAVKKVYRKATLCIHPDKVQQKGANLQQKYIAEKVFDLLKLKYPTKSIYKSFQNPLLI

SEQ ID NO: 227968 - protein, 900 aa, Zea Mays
MDDFQGLLARDFGLRPQGKAAPMSAARSSSPSGSAWTNTRSAVGSAAPSAPSYDELFGSAPPPPPKATPSLDNIFNSFKEPASTAPPPKPKHSSAPVFDKPVYDDDIFIGVPGVKSSSVPYDDVFGGSQSREAPPAFDDLLGGFGKSSQVREEVDDKRKPEAPTAVAATGFDYLIPSFGGRSSPRQRDAIGAKQKKVSMSTSKQSASLSDPFVVLETTSSSAHPFADPLDESGKAAKYQGKNRESTSVGSSLFEDSSTFNQAPKFEPFFTPEVDNGSKDRNESSRAQNSNPVQDFSKRNSSQQPSVEDFENIFPKSQSARYSDVHVDIGSEKYSGNGINDQSPRSDESEDEIWLTASEIPLFTQPTSAPPPSRPPPPLAVKQKHGSRSTRKDEHLRRSRKNNDHQRSFSNQAGVSTVDGLEDFTMGKSQNVHTFNEEEFERSTAAAAMKEAMDKAEAKFKHAKEVRERERDAKLRNREQQERDNVIRSYAQDREDKERNERLEQEREMKQKEEKEREQRRLEEERELERHRERERARQAVERATKEARERAASEARAKAEREARKRSERAAVQRAQQEARERAAADAKDRAERATAEANERAATEAKEKAASQARDRAAAEKAAVERAQQEVRKRAERAAVERAAAEARERQAAAAAAAREKTSKPDDLESLFGMGARANSAPKQRAPTVDSMFDSQTQNRGTSTSTSMKKASSTANVADDLSALFGGAPTSSNEFQEVDGESEERRRARLERHQRTRERAAKALAEKNERDMQQQRDQAERHRLAETLDFEIKRWAAGKEGNLRALLSTLQYVLWPECGWQPVSLTDLITAAAVKKVYRKATLCIHPDKVQQKGANLQQKYIAEKVFDLLKVCIALKTFVAAYCLHANMVSRQQKLLFF

SEQ ID NO: 227969 - protein, 269 aa, Zea Mays
MFWRMTGLSAASPVDTILDKENFTLEELLDEDEIIQECKALNTRLINFLRDKAQVSQLLRYIVEEVPEDSEKKQSFKFPFIACEIFACEIDIILRTLVEDVELMDLLFSFIKPDHPHSTLLAGYFSKVVICLMLRKTAPLMNYVQEHPDIVVQLVDLIGITSIMEVLVRLIGADETIYLNFADTLHWLENTYVLEMIVDKFSSSDSPEVHANAAEILSAVTRCAPPALAAKICSPRCEEILGKRKPIGKISSKMETPNQDPILRARLAA

SEQ ID NO: 227970 - protein, 230 aa, Zea Mays
MTSEEHPSSASSDGSTTIGSDEHLDPSPSPSTSFDSPPESDDSAASSLLSDGSSESEPIIFKKPRPPVRSWPASDEIAILETVASHRQKHGRLPLADDLAAAVRGRLSVGDRLSAAQITRRLCALRNRYDNTVIRLKRGTIPAKDSDVTIYRLSKLIWEGTRRGRIEKKTRVPDARNDPRGFDDLAELYPCLSAEVEAKLKRQRMAETRASGKLDRLRSRVANALQGFNK

SEQ ID NO: 227971 - protein, 813 aa, Zea Mays
MIYLILLAKICVCGRMHRGTYVEGIKEEVVLSPGHALSFIAAGEEHRHVGSNNFNLFSSRSHTIFTLMIESSARGDEYDGAMYSQLNLIDLAGSESSKTETTGLRRREGSYINKSLLTLGTVIGKLSEGRATHIPYRDSKLTRLLQSSLSGHGHVSLICTITPASSNMEETHNTLKFASRAKRVEIYASRNRIIDEKSLIKKYQKEISSLKQELDQLRRGMIGGASREEILSLRQQLEAGQVKMQSRLEEEEEAKAALMSRIQRLTKLILVSTKNNIPALTDGHQSHNSLSEQDKLITSQDSSTLVQTEGTTKDPLSSALPDSLDEINQLRSGTGEQSSVTGSATDSMQVGFTASDHMDLLIEQIKMLAGEVAFGTSSLKRLIEQSIDDPEATKDQIENLEREIQQKRRHMRALEKQIMESGEASVANASMMDMQQTITKLTAQCSEKAFDLELKSADNRVLQEQLHQKNLEIYDLQEKVLRVEQQLSAKVDISPEKETDCAQQETIDLKSKLQSKEAEIEKLKYEHLKISEEHCDLINQNHKLSEEAAYAKELASSAAVELKNLAEEVTKLSVLNAKQAKELLVAQEMAHSRVHGRKGRTASRGRDEVGTWSLDLEDMKMELQARRQREAALEAALAEKELLEEEYKKKFDEAKKKELSLENDLAGMWVLVAKLKRGALGISDLNVDDRTVNLADITNSTKENKGGKNFALVEKQASEDSVKSLSSEEHTSPEFEPLLVRLKAKIQEMKEKDIDPLTDKDGNSHVCKVCFESAAAAVLLPCRHFCLCKPCSLACSECPLCRTRIADRIITFT

SEQ ID NO: 227972 - protein, 630 aa, Zea Mays
MKDIMILTAQIIDEKSLIKKYQKEISSLKQELDQLRRGMIGGASREEILSLRQQLEAGQVKMQSRLEEEEEAKAALMSRIQRLTKLILVSTKNNIPALTDGHQSHNSLSEQDLITSQDSSTLVQTEGTTKDPLSSALPDSLDEINQLRSGTGEQSSVTGSATDSMQVGFTASDHMDLLIEQIKMLAGEVAFGTSSLKRLIEQSIDDPEATKDQIENLEREIQQKRRHMRALEKQIMESGEASVANASMMDMQQTITKLTAQCSEKAFDLELKSADNRVLQEQLHQKNLEIYDLQEKVLRVEQQLSAKVDISPEKETDCAQQETIDLKSKLQSKEAEIEKLKYEHLKISEEHCDLINQNHKLSEEAAYAKELASSAAVELKNLAEEVTKLSVLNAKQAKELLVAQEMAHSRVHGRKGRTASRGRDEVGTWSLDLEDMKMELQARRQREAALEAALAEKELLEEEYKKKFDEAKKKELSLENDLAGMWVLVAKLKRGALGISDLNVDDRTVNLADITNSTKENKGGKNFALVEKQASEDSVKSLSSEEHTSPEFEPLLVRLKAKIQEMKEKDIDPLTDKDGNSHVCKVCFESAAAAVLLPCRHFCLCKPCSLACSECPLCRTRIADRIITFT

SEQ ID NO: 227973 - protein, 523 aa, Zea Mays
MQSRLEEEEEAKAALMSRIQRLTKLILVSTKNNIPALTDGHQSHNSLSEQDKLITSQDSSTLVQTEGTTKDPLSSALPDSLDEINQLRSGTGEQSSVTGSATDSMQIENLEREIQQKRRHMRALEKQIMESGEASVANASMMDMQQTITKLTAQCSEKAFDLELKSADNRVLQEQLHQKNLEIYDLQEKVLRVEQQLSAKVDISPEKETDCAQQETIDLKSKLQSKEAEIEKLKYEHLKISEEHCDLINQNHKLSEEAAYAKELASSAAVELKNLAEEVTKLSVLNAKQAKELLVAQEMAHSRVHGRKGRTASRGRDEVGTWSLDLEDMKMELQARRQREAALEAALAEKELLEEEYKKKFDEAKKKELSLENDLAGMWVLVAKLKRGALGISDLNVDDRTVNLADITNSTKENKGGKNFALVEKQASEDSVKSLSSEEHTSPEFEPLLVRLKAKIQEMKEKDIDPLTDKDGNSHVCKVCFESAAAAVLLPCRHFCLCKPCSLACSECPLCRTRIADRIITFT

SEQ ID NO: 227974 - protein, 337 aa, Zea Mays
MASSSASSRHQVVKRRAMSDDINDGELPLLGKKRSVRDRLGSNVSDSDFYESQQRNKRRQLESNSSHGDDGSDRLVGKGDLRLKLMRKGLLPRSNGSAEQNDIDLREKLSRNHKLPNYDSRGHAAESRASYDMRDEPPELSSRYSSREDVLGSRHSSVVSRVPYARSVDDLLKLDYSRKSYPSWTDDGLRHRSPERMLKVRSDMYPRIAYDQIRPMPPLRSAGSSRPQSFITRDAPDTSRSQPYAGKSTISIDTVQRTNGITPSTAALPKAPVMDEAPLTVTGLLNSLGLEKYVVLFQAEEVDLSALRQMGESDLKDMGVPMGPRKKILLAVGPQSK

SEQ ID NO: 227975 - protein, 240 aa, Zea Mays
MPLPVHGPACNSSGHLIGWHTFNSLPFSGKTATVVGEAAPVLPRDLEWAGFVLNSRMLWKEADGKPDWVKDLDAVGENGEEIENPLTLLNDPSSVEPLGNYGKKVLLWWLCVEARADSKFPEGFILLTPADIGLLIHTKIDSYLALNLKMLIRFCQKLQKSWYVSWPGGMYLYKFLSLFLTSKLIFMRPYRLKEEMVIQRSSTATLRHLTFFLTSNLKLRSLTLDLQSALLIITPMFRQE

SEQ ID NO: 227976 - protein, 300 aa, Zea Mays
MEILGNTLGEITREKAGILKKGVPAYTVPQPEEAMSVLMKRATELGVSLQVVHPLDPQKLEDQPLGLHGEHQYMNAGLAIALANTWLERQGHLNRLHVKHSGTLPDQFIKGLSSACLQGRGQIIPNSQVNSENDRDSSLVFYLDGAHSSESMEMCARWFAHATNSDGIQPGPSEQPHTDRDSRKFLLFNCMTVRDPQRLLPRLLDTCAQNGLHFEHALFVPNQSQYNKLGSLASPPSEREQIDLSWQLSLQKVWGNLPHHNKGLNDVNSSGATSVFESLPLAIKWLRETAQQNQSIQFQV

SEQ ID NO: 227977 - protein, 570 aa, Zea Mays
MVHIIAAIVKVRQVTGVSQETQELIDAELSARVLQLISVTDTGAHTQRYQELSKQRLDRAILIFVQSFRRSYVGDQAMHSSKQLYGRLSELLGLNDHLILLNVIVGKIATNMKCYAESEDVIDHTLSLFLDLATGYMTGKLLLKLESVKFIIANHSPENFPFLAEYKCSRSRTTFYYILGSLVFMEDSPVKFRTFMEPLQQVALNLEATPDAAFRTDVAKRAFVGWMRDLRGIAMATNSRKTYGLLFDWLYPSRMPLLLRAISLCTDEPEVTTPLLKFTYEFVLNKAQRLTFDSSSPNGILLFREVSKIIVAYGSRILLLPNGTDIYGSKYKGIWISLTVLSRALCGNYVNFGVFELYGDRALADALDISLKMTLSVPLSDILAFKKLSKAYFGYMEVLFNNHIKFVLNLDTNTFIHIVSSLESGLKGLDAGISSQCASAIDNLAAFYFNNITSGDSPPSPASVNLARHIGECPNLFPQILKTLFEIMLFEDAGNQWSLSRPILSLIMTSEQMFSELRAHILASQTVDQQQRLSQCFDKLMTDVNRNLEPKNRDRFTQNLTAFRRDFRLK

SEQ ID NO: 227978 - protein, 206 aa, Zea Mays
MVLVVPPSLMLYHMYGGTFCRYFIASILLWRLRLHVDLLPPSFKHLQFGRFLKNGFLLLARVIAATCCVTLSASMAARLGSTPMAAFQICLQTWLACSLLADGLAFAGQAILASAFARKDYPKATATASRILQLALVLGLLLSILLGVGLRIGSRLFTSDQGVLHHIYIGIPFVCLTQPINALAFVFDGINYGASDFGYAAYSMAS

SEQ ID NO: 227979 - protein, 212 aa, Zea Mays
MDELIPPEGASASTSISSFETDSCEVSVEQKRKNIPSVSTALLLGGVLGLLETLLLVLSAKPILGYMGVKPDSAMMKPALQYLVLRSLGAPAVLLSLAIQGVFRGFKDTKTPLYATVAGDAINIVLDPIFMFVFQYGVSGAAIAHVISQFSATCTSYCRNLLCDTIRFNGRTARFNSNGCIPDLLANLVGLLTSCRWIGFCWTSHTCKCICS

SEQ ID NO: 227980 - protein, 261 aa, Zea Mays
MDEHTFLTNRERAVDYLNSLDKVFVNDQFLNWDPENRIKVRIISARAYHSLFMHNMCIRPTDEELESFGTPDFTIYNAGQFPCNRYTHYMTSSTSVDINLARREMVILGTQYAGEMKKGLFGVMHYLMPKRGILSLHSGCNMGKDGDVALFFGLSGTGKTTLSTDHNRLLIGDDEHCWSENGVSNIEGGCYAKCIDLSQEKEPDIWNAIKFGAVLENVVFDEHTREVDYTDKSVTGTLGLPTRSSTSPTPRYHASVHTPRT

SEQ ID NO: 227981 - protein, 69 aa, Zea Mays
MYMHAADYIGLFCTVYYLLYSMINMFQFQHHWFERSAGSSTAQSTKVLMRQLLRFETMIAHDVCFEFVS

SEQ ID NO: 227982 - protein, 885 aa, Zea Mays
MAAEADDPSLAATLEKFRLYETRARFYVIGSSREKRWFRVLKIDRSEPSELNVSEDPVWYSLQEVKSLLQRIDEGNRSTGGLAFVTKAYGIAGCIKFLESYYLILVTKRRQIGCICGHAIYCIDESQMITIPHSSVQTDVATSKNELRYKKLLASVDLTKDFFYSYTYPIMQSLQQSVTSAGMKEMPYENLFVWNTFLTEPVRSRCHNTLWTVALVHGHFKQVKLSIFGREINVVLSSRRSRHFAGTRYLKRGVNDHGKVANDVETEQIVFEEEAGSWKGRMSAVVQMRGSIPLFWSQEASRLSPKPDIFVQRYDPTYEATKLHFDDLARRYGHPIIILNLIKTVEKRPREMMLRREYCRAVEYLNQNVPEEKKLRFIHWDFHKFAKSKSANVLGVLGKVAGEALDLTGFYYSGKPKVQKKRDGSLDIRASSGDLSRLSSNAEALSSTGFQDMRNQANKQEFLGDTPCYQTGVLRTNCIDCLDRTNVAQYAYGLAALGRQLHAMGLTDVLKIHPDSSIASALMEMYQSMGDALAHQYGGSAAHNTVFPERQGKWKATTQSREFLKSIKRYYSNAYTDGEKQDAINLFLGYFQPQEGKPALWELDTDYYLHVTTAGDDLMSDSYHLSSAPGNNVFVGSGAALNPGTILSPVPACKEDFSRKKLTSFDKLIERTCSSIRNVRLHCDADLKPSGGVGTSGMAPDAAEIQLKSPNWLFGQRKHTETISTARVAPVENVNEGNRDESNVSLCGELIWLSSSVESCEEDIFRRYLAFTTADVENGWYGGTLLYDRDENSGAYRHYSELCQGAVMDPFEHDPEKERHYAEALSVDLGDARVEAEMQAALDDYQVIGSDLSIIPSCGALAEDPSQLTRWIIGDERLLVGAAAQ

SEQ ID NO: 227983 - protein, 312 aa, Zea Mays
MAAEADDPSLAATLEKFRLYETRARFYVIGSSREKRWFRVLKIDRSEPSELNVSEDPVWYSLQEVKSLLQRIDEGNRSTGGLAFVTKAYGIAGCIKFLESYYLILVTKRRQIGCICGHAIYCIDESQMITIPHSSVQTDVATSKNELRYKKLLASVDLTKDFFYSYTYPIMQSLQQSVTSAGMKEMPYENLFVWNTFLTEPVRSRCHNTLWTVALVHGHFKQVKLSIFGREINVVLSSRRSRHFAGTRYLKRGVNDHGKVANDVETEQIVFEEEAGSWKGRMSAVVQMRGSIPLFWSQEASRLSPKPDIFEI

SEQ ID NO: 227984 - protein, 497 aa, Zea Mays
MGDFNVALVIVAAVVSVLVLLVSVYLLVNYQHPDDVNQAYFPKLVVVLGLTVAVLSILMLPADVANRQACRKAVYNGACSLTLPMRTLWLVVYIVDAVLVFLVIPFAMFYYEGDQDKSVGKRLRTALIWVVASAVVCGLVLGILYGLVGKVDFTVRHLSSSVQTFPNSFSGFSSGQPCISPLTRQCAASTAPANSQTTWTMRATFPEYVVALTTIVGSVLFTIFGGVGIACLPLGLIFSFVRRPKAVITRSQYIKEATELGKKARELKKAAEALHQEERSGNKGRKWRKNVKAVEKELLLLEDDMKALEEMYPQGEQAEATWAFTVLGYIGKLIFGVVGLIVSIAWVAHIVIYLLIDPPLSSFLNEVFIKLDGVWGLLGTAAFAFFCFYLLIAVIAGEMMLGLKLVFITIHPMKWGGTLMNSFLFNVGLILLCSISVIQFCATAFAYYAQATAAQEIFGHTLQSLRGIKYLYKYNVFQYGFVALAILTLFYYAIFKS

SEQ ID NO: 227985 - protein, 552 aa, Zea Mays
MQYAYGATRLVLMDYDKSRRSNSKKRTHSNSDDGKRKRLNTRHDDTSMFSEPIETIYRILCPVKKIGSVLGRGGDIVKALREETKAKIRVADSIPGADERVIIIFNYQNEPEPTDEAAEEKNSDGLGNFKSHCFAQDALLKIHDKIVSDEIHDEVANDEKSESADDVTARILVQGNQVGCLLGKGGSIIQQLRSNTGAGIRVLPSENLPQCALKSDELVQISGAPSLVRKALYEISTRLHQHPRKENRPLEEIIDASTQRKRESPTLQHEYSMLPHLHSDHTPPIPLLDPYRSGPQYPVTETEEFSIRILCASELIGSVIGKSGANVRRVEQQTGARIKVQEIDKDASGERLIIISSNEIPAEPISPAIEALILLHDKVSAPSEKHHSSTRLVVPSSKVGCIIGEGGKVITDMRRRTGAEIRVYSKADKPKYLSFDDELVQAAGQIHGREDYREPTSATGFLSTIELRIPNSSLGSIVGAGGVNLAEIRQVSGARLRLHEAHAGSSESVVEIQGTLDQAKAAQSLLQGFISANSRQQQQPYSSRMPLYPSWG

SEQ ID NO: 227986 - protein, 218 aa, Zea Mays
MAKTKQGNKDVDSYTIGGTNKVVYVGDCVLMRASDSDNQPYVARVEKMEGDGRGSVRVQVRWYYRPEESKGGRRQFHGAKELFLSDHFDLQSAHTIEGKCVVHSFKNYTRLDNVGPEDFFCRFEYKAATGSFTPDRVAVYCKCEMPYNPDDLMVQCDACKHWFHPSCVAMTIEQAKKLDHFVCSDCFKENGSKRLSNAYATSPNFEPKDFMDWLEHYS

SEQ ID NO: 227987 - protein, 185 aa, Zea Mays
MWRGWRRWRATGVAACGCRCGGTTAPRSPRAAAGSSTAPRSYSSPTISTCRAPTQLRGSVLSTLSRTIPGLTMLGLRTSSADSSTRRPPVRSPLTAWQCMKLLNPSIAGCPFYCACIFSLLVMIGLSIFSQGIANVRCRTTPMTSWCSAMLASTGQKARSLCLLRLFQRKWFKETFKCICHFTKF

SEQ ID NO: 227988 - protein, 252 aa, Zea Mays
MVQIAAPPRRRDGRAPSPSPGVMHATPPPRCHGALAFAPVNHGRQCRRRPQPRPHLPPPTLSHDLCRHVSAFGGPSSSSSALGGPSSSSGQICVWRPVLILIRAPPPAISAAASSPPSPVISVAVRTWVRSDLRLVAIPVLILFLAPTPTLHPISDLGEDDKVIVERCARERSRPPAAPHHRREATRGDAQAVTLFLLHPRPPLGPRGRAIQRGTVLPIKDTCGGEEGLLALALWATHWLKVRGSFCDLVET

SEQ ID NO: 227989 - protein, 317 aa, Zea Mays
MMIPWGGVGCCLSAAALYLLGRSSGRDAEVLRSVARAGSMKDLAAILDTASKVLPLVVAVSGRVGSDTPLICQQSGMRGVIVEETAEQHFLKHNDAGSWIQDSAVMLSVSKEVPCEVFEESGRTLVRGTLDYLQGLKMLGVKRTERVLPTGISLTVVGEAIKDDVGTIRIQRPHKGPFYVSPKSIDQLIMNLGKWAKLYRLASMGFATFGAFLLAKRAIQHFLERKRRHELQKRVLNAAAQRQAREAEGSIGSSDTEPNSKKDQLVLDICVICLEQEYNAVFVPCGHMCCCMACSSHLTNCPLCRRRIDQAVRTFRH

SEQ ID NO: 227990 - protein, 139 aa, Zea Mays
MASIIVQAVVILLDVIAFGLGVAAEQRRSRATVTPDAAKEYDYCVYDSDIATGVAFLIAEACLLAGSVRNAYHTRYRGIFYGDSLSCETVRKGVFAAGAAFTFFTAILGEVYYLSYSKSRDAAGGAPYGGSSIGMGPYN

SEQ ID NO: 227991 - protein, 722 aa, Zea Mays
MLNDRLLNFVDIDLHDVKDAHKRFDKASLSYDQIREKYLSLKKGTRPDITTAIEDELHSARSSFEQARFNLVTSLSHVEAKKRFEFLEAVSATMDSHLRYFKQGYELLHQMEPYINQILAYAQQSRERANKEQASLVERMHEYKRQIDRESRSSINGLNDSYNGDRMQTIGRSSHKQIEAVMQSTSKGKVETIRQGYLSKRSSNLRADWKRRFFVLDSRGMLYYYRKQITRPPAGCSMQRNVNPPEHGSGLLSRLFSSHYHIHDEKSVARHTVNLLTSTIKVDAEQSDLRFCFRIISPTKIYTLQAESAVDQMDWIEKITGVIASLLSSQSPEQCFMSSPKGSGHDRSTSDGSSFTSSVEFEPSVIDDLVLEKYSGNGQHDVIRGTHHHRTSMKPEKPIDLLRKVDGNNMCADCGALEPDWASLNLGALLCIECSGVHRNLGVHISKVRSLTLDVRVWEPSVINLFQSLGNMFVNNIWEDMLPDDNSSADGSDTSQYLSVSKPKHKDVFSAKEKFIHAKYVDKEFIRKRSMDENQLAEQMWNSVAANDKKTAYSLIVRSRANVNLVYGEMPSSPFLTLGKALQQEQPVSPPDGSPKFFDCNSHDKISPREPLSPASTSSRTDDMEDGCEGLSLLHLACRVADVGMVELLLQYGASVNMNDSRGRTPLHHCILKGRHRHAKLLLSRGADSQAMDRDGRTALQYAIDGGTSDEDILALLEDHSR

SEQ ID NO: 227992 - protein, 485 aa, Zea Mays
MQRNVNPPEHGSGLLSRLFSSHYHIHDEKSVARHTVNLLTSTIKVDAEQSDLRFCFRIISPTKIYTLQAESAVDQMDWIEKITGVIASLLSSQSPEQCFMSSPKGSGHDRSTSDGSSFTSSVEFEPSVIDDLVLEKYSGNGQHDVIRGTHHHRTSMKPEKPIDLLRKVDGNNMCADCGALEPDWASLNLGALLCIECSGVHRNLGVHISKVRSLTLDVRVWEPSVINLFQSLGNMFVNNIWEDMLPDDNSSADGSDTSQYLSVSKPKHKDVFSAKEKFIHAKYVDKEFIRKRSMDENQLAEQMWNSVAANDKKTAYSLIVRSRANVNLVYGEMPSSPFLTLGKALQQEQPVSPPDGSPKFFDCNSHDKISPREPLSPASTSSRTDDMEDGCEGLSLLHLACRVADVGMVELLLQYGASVNMNDSRGRTPLHHCILKGRHRHAKLLLSRGADSQAMDRDGRTALQYAIDGGTSDEDILALLEDHSR

SEQ ID NO: 227993 - protein, 373 aa, Zea Mays
MGKRKQRGGGDGEPAAEGGAGGGHSPSTVFVSNLPYTFKSSDLEAVFSEVGPVRRCFMVAEKGSEKSRGFGFVQFATVQDADRALQQKNGSPVAGRKIRVKLAMNRAPLKERLQKGNMQVKDSDAKDEADEISPAEKHKGKSHKTDPEQLHLLSNDAKVSKEAPIGDSEKVKNSEKQRVAKTVIFGGLQDSAMATEVFRQAREIGSVVSVNYPLPKEEMRFNGLARDGCTSDMAAVLFASVKSAWDSVVQLHNKEVKGATVWARQLGGEIRKWRAIVRNLPFKITEKEIVDMFSSAGFVWDVTIPHKSDEGISKGFAFVSFTRKQDAENAIKNINGKDVAKRPVAVDWAVPKKVYTVAAKVDAKDNGNRVIFC

SEQ ID NO: 227994 - protein, 285 aa, Zea Mays
MLFFWGVLSPPPALRLFYHRRSHSNLTDRVCPSDLAVLLCRPTFYRVYRKKSTEGFQSTPYVVTLFSCMLWIFYALLKSGAGLRVRVLGWICVSVALSVFAAPLSIMRQVVRTKSVEFMPISLSFFLVLSAVIWFAYGALKRDVFVAFPNVLGFVFGVAQIALYMAYRNKEPAAVTVEEAKLPEHAKEVVVAAAAAEARASCGAEVHPIDIDIEATPTPVEEVHEPQVVVVVDVDVEPVTCAGAAEAAAGAGADASGVADGGVPGPMAPPEQLAIKPDMAISVEA

SEQ ID NO: 227995 - protein, 1286 aa, Zea Mays
MAAIDRVVFALNGQRYEVGGVDPSTRLLEFIRTQTPFTGPKLGCGEGGCGACVVLIAKYNPKTDEVTEFTASSCLTLLYTINFCSVITTEGLGDSQYGFHAVQERMSGFHASQCGFCTPGMCMSIFTSLIKADKSKRPEPPKGFSKLKVSEAGKAFSGNLCRCTGYRPIVDACKSFASDVDLEDLGLNIFWKKGDRNPDVSELPSYTLGGGVCTFPDFLKTELKSSLDHLNNPCIAASGEGWYHPKSIKEYYELINSCLFSDSVKVVVGNTSSGVPGYKDQDIYSKYIDIGGIPELSNIVRMGSGIEIGVATSISRTIEILEEECESISSPNGSVVFRKLANHMSKVATPFVRNTASIGGNIVLAQKFPFPSDIATILLGAGATVCLQVVAERRQITLEEFLEQPPIDATTLLLSIFIPNWISDSGANISLLFETYRAAPRPLGNAVSYVNCAFLGHASLDEQSDTLVLSNLRLAFGAYGTEHAIRATRVEEFLTGKSLTASVVLGAIQLLRETVVPMEGTSHPEYRVSAAVGFLFSFLSPFSKCIPEPGKSLASSSTDSADTDDVRNLPLSTRRETFSSDEYKPVGEPIKKYGVELQASGEAVYVDDIPAPKNCLYGEFIYSTQPLAYVKSIKFKSSLASEKIISFVSAKDIPSGGLNIGSSSTFGDEPLFGDPIAEYAGQALGIVIAETQRYADMAAKQVVIEYDTEDLSPPIITVEQAVEKSSYFDVPPEFYPKEVGDVSKGMAEADHKIPSTEVKLASEYYFYMETQTALAVPDEDNTLVVYSSSQYPELAQSVIARCLGIPFSNVRVITRRVGGGFGGKAFRSFQVATAAALCAYKLRRPVRMYLNRNTDMVMVGGRHPVKAHYTVGFKNDGNVTALHLDLLINAGISPDASPIIPGTIISSVKKYNWGALSFDIKLCRTNNSSKSVMRAPGDTQGSLIADAVIEHVASVLSLDANSVREKNFHTYGTLQSFYPDSAGEASTYTLHSIFDRLVSTSSYLDRAESIKEFNSNSKWRKRGISCVPLIFKVEPRAAPGRVSVLKDGSVVVEVGGIEIGQGLWTKVQQMTAFALGRLWPDADGGGECLLGRVRVLQADTLNLVQGGLTAGSTASESSCAATLQACNTLYDRLKLVLDRLQQRSENVSWDTLVSQAYEDDVDLSASAYWVPGQASNKYLNYGAGISEVEIDLLTGAITIIRGDLVYDCGKSLNPAVDLGQIEGSFVQGIGFFVYEEYTTNSDGLMISNSTWDYKIPSVDIIPRQFNAEVLNTGYHKNRVLSSKVCV

SEQ ID NO: 227996 - protein, 485 aa, Zea Mays
MQSGLRSCPQSEDMWIEYLRMELTYLNKLKARKVALGEDVKTLQKKDNDASQWKEENKELFMPLNEQVKDPKEPGSAGDALEEKEDLFWRQGLLIIQTIYHGAVEALPSSLTLRKKFLEILNSVDLAHSDELKLEVLDDLKRDFSHSEDYWDWFARLQLSNLNSSSNSNRKDAISNKLNRSIQVYDEAIRKLPNSKMYSLYAKFWMDVIYTDREDSVTLFQDSEFDASEFTSSILKVYENAESCGCLTEDLACQYISLYLKLERLEEAKTLAEKLCDGPLSNAANLWSLRFTMEINSIATAPGSSSLSKENLSSLLDLFSTVLSKLSVTEAERLWHMAMKLFSHDKVCFEKLVKCAMLSLSLAGGSDSGASVSSAIVGWYLQRDGVKHARKMYKRLLALPRPSLKFMQYCIALEANLASLGDNGALKDARRLYDSALDLYPQEREVWRSYYDLELKMGTSESANAVYSRSRKVLGDSTALTAPRG

SEQ ID NO: 227997 - protein, 918 aa, Zea Mays
MFFLCQSLVGYPLLINNCGIHLLARCVIVTVIPFNFCYDFKSLSLTESANVSHRRWQDNSSRLLEDKPTTSNSMSDSDFLVNSFTKPSDNARPSRRKSKKKSKKHRQRCRKPTDGSEAKFREGNGAASAADVGDCEDSTLSPKHVGDIRFEETSPSSSVKEASEEAPESDDDEYHCCSGGSVSSASYCDEMELSKSTTSCPALCGQCPSSNLQYLDNTQNSAPTGPSQETCYAGSKANCNHDTKSLFIFRNERGSDPCEATEFCSSSSGFDENWIEKFDYDSGICSPKSVGTYGGDQAAHLCSDTTGDNDFCLVISRKRARKEKKMSLWKSYGAHASTPALDRNKKYVGHSSMQMTNEFNSNDWSHRQNHVSRIHPQHGNALKSSTKNFMQRPSIGCRETQYGFPAKESKLGASLNHSTGPREKTCGKLTGGFDKTAQQLYLDRDLSNALNSSESIRCETRSISSSEPTTPKSLKGNYTSESGESTDITIGALPMQKRRLQDLVRTDDASETISGRSSPCSESSTTELIAGHSTDSSIEGNHGCQGLCNSRTHLAQMLRVVNDACKVQVGADVLLAAGYPISDLEKFICSATPVIGRAPCMISNTCSLDQVVSDSVCQHDISNVSLRRIWEWYEEPGCYGLEVKALSNLSSKTSSSSSSEFFAYFVPYLSAIQLFGLSRNNMHHSFGVQGRELLISSNTASSMSSHPVHAKAHTLLEESNACLPESSLVVEDPGELIFEYFETEQPSLRPPLFEKIKELVSSANVSDHRVFGDTEKLQNAKLCELHPASWFCVAWYPVYRVPRGNFRAAFLTYHSLGKLVHKKCSMDTNDGHTQVVSPVVGLQSYNDKGEQWFQLRCPDLKQLPIEDSLKTSPAEVHKERLRTLKMGALAMARAVVPKGSGESVNHHPDYEFFLSRCA

SEQ ID NO: 227998 - protein, 918 aa, Zea Mays; identical to SEQ ID NO: 227997

SEQ ID NO: 227999 - protein, 293 aa, Zea Mays
MSQIQSFSRNNCALLAVLCGKYAENRTPAARSGLEAKRPRPAYPFPELSSAGRLEVHTLFNPTPEQFLEAQRVVQPNFLYIQGQQLEDEKEIGSLVWGDADVSDPQAFSTLISPPFPTIVYLEVPIGEKLAQAVHSKGIPYVIYWRNSFSSYAASHFRHALMSAIQSSVSHTWDAFQLAHASFRLYCVRNNHVQSVKLGPRLLGDAPKINISPPETEMVDEEGSSEVTPAIKIYDEEINMKLLLCGVPCTLDPCLLGSLEDGLNALLNIEIRGSKLQNRISCISTTWDGYYAL

SEQ ID NO: 228000 - protein, 246 aa, Zea Mays
MSQIQSFSRNNCALLAVLCGKYAENRTPAARSGLEAKRPRPAYPFPELSSAGRLEVHTLFNPTPEQFLEAQRVVQPNFLYIQGQQLEDEKEIGSLVWGDADVSDPQVYLEVPIGEKLAQAVHSKGIPYVIYWRNSFSSYAASHFRHALMSAIQSSVSHTWDAFQLAHASFRLYCVRNNHVQSVKLGPRLLGDAPKINISPPETEMVDEEGSSEVTPAIKIYDEEINMKLLLCGVPCTLDPCLLGSL

SEQ ID NO: 228001 - protein, 115 aa, Zea Mays
MDGDLWDKVLQPENEYRRQLIDQVVSTALPESKSPEQVSAAVKAFMTADLPHELIELLEKIVLQNSAFSGNFNLQNLLILTAIKADPSRVMDYVNRLDNFDGPAVGEVAVEAQLY

SEQ ID NO: 228002 - protein, 96 aa, Zea Mays
MGMNGHLDLNAGGSQLAECRLQRRTGLNLLLLLCGRSASLAADDAEDDGDDDDEYEQRQRDDEHELHLTTSLRADGALAGSEQRGGEERRRQSAVQ

SEQ ID NO: 228003 - protein, 59 aa, Zea Mays
MLSVSKEVPWYLDDGTGRVYVVGARSAAGLILTVASEVFEESGRTLVRGTLDYLQGCWE

SEQ ID NO: 228004 - protein, 98 aa, Zea Mays
MLSVSKEVPWYLDDGTGRVYVVGARSAAGLILTVASEVFEESGRTLVRGTLDYLQGLKRTERVLPTGTSLTVVGEAIKDDVGTIRIQRPHKGPFYASS

SEQ ID NO: 228005 - protein, 91 aa, Zea Mays
MLSVSKEVPWYLDDGTGRVYVVGARSAAGLILTVASEVFEESGRTLMLGVKRTERVLPTGTSLTVVGEAIKDDVGTIRIQRPHKGPFYASS

SEQ ID NO: 228006 - protein, 85 aa, Zea Mays
MAVVAHAGLPRPRLFLPFSFHGSPIYSSCLSLALPSVAVDYDHGNPWCRPDTPHNGASRGHHPSVSSGWPCVGRARSHEFLIKIR

SEQ ID NO: 228007 - protein, 315 aa, Zea Mays
MLCAPDGELPEKLRNLEPRLIEHVSNEIMDRDPNVRWNDIAGLEHAKKCVTEMVIWPLLRPDIFRGCRSPGRGLLLFGPPGTGKTMIGKAIAGEAKATFFYISASSLTSKWIGEGEKLVRALFGVASCRQPAVIFVDEIDSLLSQRKSDGEHESSRRLKTQFLIEMEGFDTGNEQILLIGATNRPQELDEAARRRLTKRLYIPLPSLEARAWIIRNLLEKDGLFMLSEEETSAICKLTEGYSGSDMKNLVKDASMGPLREALQTGVEIAKLSKEDMRPVMLKDFENAMREVRPSVSSSELGTYEEWNRQFGSLSI

SEQ ID NO: 228008 - protein, 205 aa, Zea Mays
MLQPEVVATQEHKFSAAFELARTDVGCVFANQGDNNVERIQRSKYFQALLQKSKANVSEQRNATCQEFSVQWAPCVDESQAEMENEKLSIRASKLMMQTKLTSLYSSKSLKTNGVPNKNMFKSENSSKVCAGVENRTSQNSNRRHAYLDVEEDEKSHGQLQNAKWKHTGFRSPIFEVANSPSSNDEADAPANEFTTAKRMMILVK

SEQ ID NO: 228009 - protein, 543 aa, Zea Mays
MAEEVQAPLSATMAKEAQSPPSATIAEATAPPQLLLFNSFTKREEPFQPRVEGKVGMYVCGVTPYDFSHIGHARAYVAFDVLYRYLKFLGYEVEYVRNFTDIDDKIIKRANERGETVTSLSSQFINEFLLDMTELQCLPPTCEPRVTEHIEHIIKLITQIMENGKAYAIEGDVYFSVESFPEYLSLSGRKFDQNQAGARVAFDTRKRNPADFALWKAAKEGEPFWDSPWGRGRPGWHIECSAMSAHYLGHVFDIHGGGKDLIFPHHENELAQSRAAYPDSEVKCWMHNGFVNKDDKKMAKSDNNFFTIRDIIALYHPMALRFFLMRTHYRSDVNHSDQALEIASDRVYYIYQTLYDCEEVLATYREEGTSLPVPSEEQNLIDVLDRCFMELLKAINSSLNDLKKLQQKIEQQKKKQQQQKKQQQQKQQQQKQQQLQKQPEDYIQALIALETELKNKLSILGLMPSSSLAEVLKQLKDKSLKRAGLTEEQLQEQIEQRNVARKNKQFEISDGIRKNLATKGIALMDEPSGTVWRPCEPERSEES

SEQ ID NO: 228010 - protein, 211 aa, Zea Mays
MMEGIFICAAPMCLKSFLKKADFEFHVPDVHANLLQTNLEKEEERNESDAPNIPCASAGDTQRQSQMPEMSTARAPPPRPGVSQDREERSRYHQSREQTPLRPPPLSKPPFHGRHSYPPGDTQAENNPPQGFDRPYNWASQSRQESPGKLYDAYEYESAFDLQRTIQLPSPARWKPSVLFCPFPDAAATRYWIRPRFHVKCPASSWPYELP

SEQ ID NO: 228011 - protein, 528 aa, Zea Mays
MLTGRESLVRLIGRRRRSPLPASLVAALSLPSPSPSTSLAQADDGGGSGEAAGGEAGSTSGGSRVVGMGAEWVVCPVCGDSIRGSDYCVNTHLDMCLTRGTKRKLTQSTLLNFQFSKKVSAEPTINNLNNESETENMKQIDEGLSSDQAFFAFDSEIGSSKAGTTISSPTCMNDSLGTSETITSYAPSNTVLSDAKDAVNDGAGELPTVATSCSFDECAVMDSSTVVVVDTVIVGRRFHENIELREDADITFMRDPQNAKDPDAIKVLHAGSECEEMLGYLPRDLAKVLAPLVDKHHVECEGSVVGLHEQQFGNVPIQITIQKCKSDNQRNNDPNCCQSLWENFVSIVKRENFRRPHSARYQTNFNLMIADVMVNHAHVFSDIEKSFLASFKSLSDDGQRLFIRIYTRKGPWFRKGSISYQEISDLEHAVMELELAGYIDMLSCTIDPFEYDMKEILDVLSVPEMKEILKELPKDNTICTRRHELVSTLLSSYRNGTCASLPKRILKWTGTCIRISKMADELLWRIQV

SEQ ID NO: 228012 - protein, 565 aa, Zea Mays
MLTGRESLVRLIGRRRRSPLPASLVAALSLPSPSPSTSLAQADDGGGSGEAAGGEAGSTSGGSRVVGMGAEWVVCPVCGDSIRGSDYCVNTHLDMCLTRGTKRKLTQSTLLNFQFSKKVSAEPTINNLNNESETENMKQIDEGLSSDQAFFAFDSEIGSSKAGTTISSPTCMNDSLGTSETITSYAPSNTVLSDAKDAVNDGAGELPTVATSCSFDECAVMDSSTVVVVDTVIVGRRFHENIELREDADITFMRDPQNAKDPDAIKMLGYLPRDLAKVLAPLVDKHHVECEGSVVGLHEQQFGNVPIQITIQKCKSDNQRNNDPNCCQSLWENFVSIVKRENFRRPHSARYQTNFNLMIADVMVNHAHVFSDIEKSFLASFKSLSDDGQRLFIRIYTRKGPWFRKGSISYQEISDLEHAVMELELAGYIDMLSCTIDPFEYDMKEILDVLSVPEMKEILKELPKDNTICTRRHELVSTLLSSYRNGTCASLPKRILKWTGTCIRISKMADELLWRIQRLFFLNGDQDLSSFLLVEFGIVKFPDYVCSISHRIFQERNDLLEYEDV

SEQ ID NO: 228013 - protein, 319 aa, Zea Mays
MAAAAVHEPEVIRDKAAMRAWSRRRRAEGKAVALVPTMGFLHEGHLSLVSAAVAASAGPVAVVVSIYVNPSQFAPTEDLATYPSDFAGDLGKLAATGVVAAVFCPPDLYVRGSADRPSAASASGGAVSCLEDAGGHAHETWIRVERLEKGLCGSSRPVFFRGVATVVAKLFNIVEPDVAVFGKKDYQQWRVICRMVRDLDFAIQIVGSEVVREADGLAMSSRNVNLSEEDRKKALSISRSLVDARTATLSGSNRSQEIKDQIVRTITEAGGQVDYVEESLVPVERMDRPCVICVAAWFGKVRLIDNIEIHVDSSTVLSI

SEQ ID NO: 228014 - protein, 232 aa, Zea Mays
MGADSEDAVKQLSLLMEQVEAPLKRSFQNMHQGYPKETLVRFLKAREWNVAKAHKMIVECLNWRIQNEIDSVLERPIVPVDLYRSIRDSQLIGLSGYTKEGLPIFGIGVGHSTYDKASVHYYVQSHIQINEYRDRIILPRLTQQFGRPVTSCIKVLDMTGLKLSALSQIKMLTSISTVDDLNYPEKTETYYVVNVPYIFSACWKVVKPLLQERTKKKVKVLTGCGRDELLKV

SEQ ID NO: 228015 - protein, 145 aa, Zea Mays
MGADSEDAVKQLSLLMEQVEAPLKRSFQGLPIFGIGVGHSTYDKASVHYYVQSHIQINEYRDRIILPRLTQQFGRPVTSCIKVLDMTGLKLSALSQIKMLTSISTVDDLNYPEKTETYYVVNVPYIFSACWKVLSVTANARTYGF

SEQ ID NO: 228016 - protein, 225 aa, Zea Mays
MGADSEDAVKQLSLLMEQVEAPLKRSFQNMHQGYPKETLVRFLKAREWNVAKAHKMIVECLNWRIQNEIDSVLERPIVPVDLYRSIRDSQLIGLSGYTKEGLPIFGIGVGHSTYDKASVHYYVQSHIQINEYRDRIILPRLTQQFGRPVTSCIKVLDMTGLKLSALSQIKMLTSISTVDDLNYPEKTETYYVVNVPYIFSACWKERTKKKVKVLTGCGRDELLKV

SEQ ID NO: 228017 - protein, 476 aa, Zea Mays
MQGRMRGARRSARGESSRKAAGREVEPFTLCGEMSHLTRATSEPCRRARGAAFARRARPFSAYELVSAREAGRAGGAGFSAADRAYLGRQHIPTKGPWGVDDVESEAYVSQFSADGSLLIAGFRGSRIRVYDAEKGWKIHKDISCRSVHWTVSDIALSPDQRFLAYASLTPIVHIVNVQNAGKESHANITEIHEGLDLTGGDEDEDFGIFSVKFSKDGKEVVVGNNEKSIYVYDLSANKVSARIRAHKADVNAVTFADETGNVLYSGSDDSLCKVWDRRCLSGEKSAGILTGHLDGVTFIDSRGDGRYFISNCKDQRIKLWDIRKMSSVVRSRPVSLVDWDYRWMPFPSEAHNLKHPGDQSVATYRGHSVLRTLIRCYFSPVHSTGQRYIYTGSSDKSVHIYDVVTGEAVKRLSWHGSIIRDCTWHPYYPTLVSSSWDGFVARWEASGDDDDHSVLVADEMRGSPYYRRYGDPLVM

SEQ ID NO: 228018 - protein, 175 aa, Zea Mays
MAENEGRFRWDSNLDTFFCRSCVQLLDDGLITQRQPSLHDEALEYLSQKFSTVNSTVSKKTLMNKWNCMKQLYDSYVLFRIHSSNMGELKSRRMYIKKTKKCANVFKHMINEPPKNLDLLKRLFHDEDQGTPPSSPPHPSFEPQSSFMPESSSPPQSSSFMPGSSSPPQSSVSSS

SEQ ID NO: 228019 - protein, 229 aa, Zea Mays
MAAFDAVPRLSAHQYNQLHLAAVDRSSFHSPPPPPAARRIFAHMLQAAAPPSEAPMMQISPVPIFAAFQVKTTSPRKYFVRPNASIVQPWDSCTITITLQAQKDYPPDMQCKDKFLIQSTKVATGTEMDEIPLIRSTRKADKVIEEMKLKVVYTLPSYGGSNDSSVSFLGSRSFKAASDDLMMLKNASLEEQRKHFSRRQSESGCSPCNGACHRTRGHPRPRRDHQGKH

SEQ ID NO: 228020 - protein, 543 aa, Zea Mays
MITGIITKDIESTVLALELKQHKLQLQEQRVMFTDVLEELMALAEATLWKVNQHLENIAICTLHEENNEARVDLENLKQNCEEIMKKLHAMNEENTTLKCLMSSFQTNLDAKNKALMELECSHATICTELELTIDAMNRRSTRENYFISENETLKQEIRNILCKDQCMVELMDNIEADKLFSTIEGRLQLVTDHVHNYITEQINTMSKLSNDLDIIEVSAQELSTQNSLLKSELIRKEELTKGLSFDLSLLQESASVAKDQAAEITGLRKVIKSLELELASKSLELDDVVSDRQQLEAMILKCNQNVAALEEELGKKIDELNIVSMENAELKSQIQHIEEISCTMEELADKSEVIRRLEEKLIESRTLIDERSVCLQSLQNDFSKLSDEKTSCDTELLILKEKLEMAQALAEESEAIATESRQIAEEHKAYAEGKDEEVKVLERSIEELENTVCVLESKVEIVKEEAERQRMQREELEVELQKVRQQMLAVPPSGKARRYMEDGMIDLADSSRHPVDMHNELLSAQETIRILRKEVSEKESEN

SEQ ID NO: 228021 - protein, 82 aa, Zea Mays
MIKDFDEPGTLAPTGLFVGGTKYMVIQGEPGVVIRGKKGTGGITIKKTGMSLIIGIYDEPMTPGQCNMVVERLGDYLIEQGF

SEQ ID NO: 228022 - protein, 282 aa, Zea Mays
MIAAKVNGNLVSPIHVLANAEVVEIITYDKLSSKYAFQRHQQWLQHAKTRSARHKIMKFLREQAALSAAEITADAVNNFVADLEDESDSELSLPSTKNEDSKFNWEKILSSDKLFFVNKSSDGFLPVNNVHTKVNGKQNKTVKDLGIKINGHSTIRGDSFSELMHPGNSTCKEVFPGLDHWKSGKISGWHNTEGNSVQWLCIACVDRKGMMAEVTSALTACGITIWSCVAEVNKRRGMGVMLFHFEGSYENVVSACSSVDMILGVLGWSVGCSWCPLGVLEC

SEQ ID NO: 228023 - protein, 332 aa, Zea Mays
MEEAAPAGTNKVYYDGCPGCAMDRRKESRAGVPYKELLFVAAATFASALPITSLFPFLYFMIRDLRVAEREEDIGFYAGFLGAAYMIGRGVASVFWGVVADRVGRKPVIAFSVLSVVVFNTLFGLSAKYWMAIATRFLLGALNGFLAPAKAYSIEVCRPEQQALGISVVSTAWGMGVIIGPAIGGYLAQPAKQYPHLFHEKSVFGRFPYLLPCLCISFFAALVVISCAWLPETLHKHRGLERAAAEVAEGTTAAAAAQESTPEPEPEPPKSSLLRNRPLMSSIVTYCVFSLHDTAYVEAPVSWCTKSSPTVGSTRSSAQSTQPEFRRRYPYR

SEQ ID NO: 228024 - protein, 156 aa, Zea Mays
MESRAASKLRVYLRTHALDQMVQAVGASAGLRVIKRVDQTLQELAVNLKPKVPTKAVCIEHIELRNELLTLLNLQKQLQNKEAEVSANRESSFTEAPSTPKRSNRDIDRPFIPDTSGFTGERAGKRDHKRKSTGRFIDAPPSPPQSKRPRKLKGSD

SEQ ID NO: 228025 - protein, 124 aa, Zea Mays
MCNFKTIKDAADVAIATMLSGIQVSRVELLDEVQIKAINMANGKNLPEVPTLMFEFIGTEAYALEQTLLVQKIATEHHGSDFVFVEEPDAKAELWKIRKEALWAGFAMKPDHEAMITSGYCSCW

SEQ ID NO: 228026 - protein, 153 aa, Zea Mays
MAAPPARARADYDYLIKLLLIGDSGVGKSCLLLRFSDGSFTTSFITTIGIDFKIRTIELDGKRIKLQIWDTAGQERFRTITTDIRNWIRNIEQHASDNVNKILVGNKADMDESKRAVPTAKGQALADEYGIKFFETSAKTNLNVEQVFFLHRT

SEQ ID NO: 228027 - protein, 87 aa, Zea Mays
MGILLVYDVTDESSFNNIRNWIRNIEQHASDNVNKILVGNKADMDESKRAVPTAKGQALADEYGIKFFETSAKTNLNVEQVFFLHRT

SEQ ID NO: 228028 - protein, 471 aa, Zea Mays
MLVTTVGMRTQWGKLMATLSEGGDDETPLQVKLNGVATIIGQIGLFFAVITFIVLSQGLFSKKYHEQMLLSWSGDDALELLEHFAIAVTIVVVAVPEGLPLAVTLSLAFAMKKMMNDKALVRHLAACETMGSATTICSDKTGTLTTNHMAVVKACICGNIKEVNGSQNASKLRSELPEIVIKTLLESIFNNTGGEVVINQDGKYQILGTPTETALLEFALSLGGDFKAKRDETKIVKVEPFNSTKKRMSVILELPGGGCRAHCKGASEIVLAACDKFVDETGGVHPLDKITADKLNGIIDSFAGEALRTLCLAYKDMEEGFSNADHIPLQGYTCIGIIGIKDPVRPGVKESVATCRAAGIMVRMVTGDNINTAKAIARECGILTEDGIAIEGPEFREKSLAELLELVPKIQVAKESADVIILDDNFSTIVTVAKWGRSVYINIQKFVQFQLTVNVVALLVNFSSACFTGVS

SEQ ID NO: 228029 - protein, 376 aa, Zea Mays
MEWIEGVKLNQQAVIESQGLKVLDLVNIGIQCSLRQLLEYGYFHADPHPGNILATPEGKLAFLDFGMMSETPEDARVAIIGHVVHLVNRDYEAMARDYYALDFLEPDVDVSPIVPALKNFFDDALNATVSELNFKTIVDGLGAVLYQYPFNVPAYYALILRSLTVLEGLALYADPDFKVLAASYPYFAKRLLTDPNPYLRDALIELVFKDGKFRWNRLENLLVQGRQDREFAAKDALQPVLKLLLGPGGEELRALVVKEAVRVTEAIAIGTLVDSYNAAPSFLKPLISSGNLAEPFKFSETEQEQMMELRDQVFRVWGLLRSSNNFDPSLLQPIVQVLQEPEARVLGSRVAGGVTQRLAARLLQQLLRTPPAPGSS

SEQ ID NO: 228030 - protein, 97 aa, Zea Mays
MAAHGKGAGRKWPMPRISSPSSATTELAWSRLGSLATTPRGPSSPASWGARATLVSWSGWGRRTPTSVTRCSPRGVLQTDHDKTKGSFEAADSVSTT

SEQ ID NO: 228031 - protein, 220 aa, Zea Mays
MEKAVYDTLNMLNFDVTKKCLVGEGWCPIFAKSQIKDCLQRSTIHSNSQVGTIFHEMDTIESPPTYFRTDKFTNAFQEIVDAYGVARYQEANPAVYSVVTFPFLFAVMFGDWGHGICLLLGALVLILREKRFSSQKLGSFMELAFGGRYVILLMAIFSIYCGLIYNEFFSVPFHIFGKSAYECRDKSCSDAHTFGLIKVREPYPFGVDPSWRGSRSELPF

SEQ ID NO: 228032 - protein, 527 aa, Zea Mays
MFLAMTEEVRVIIVKLADRLHNMRTLTHMPQHKQYAIAMETLQVFAPLAKLLGMYRIKSELEYLSFMYVNPTGFAELRKRVEDLYKAHEQELEEANRILRQKIADDQFLDLVSVETKVRSVYKELYSIYKTTLKSKSSINEVNQVAQLRIIIKPKSCNGVGPLCTAQQICYHVLGLVHGIWTPVPQAVEDYIATPKPNGYQSLHTTVIPFLNESMFHLEVQIRTEDMDLIAERGIAAHYSGRGVVSGPVRPGISSGRNAKGKVICLNNTGFALRKLSSKYAFQRHQQWLQHAKTRSARHKIMKFLREQAALSAAEITADAVNNFVADLEDESDSELSLPSTKNEDSKFNWEKILSSDKLFFVNKSSDGFLPVNNVHTKVNGKQNKTVKDLGIKINGHSTIRGDSFSELMHPGNSTCKEVFPGLDHWKSGKISGWHNTEGNSVQWLCIACVDRKGMMAEVTSALTACGITIWSCVAEVNKRRGMGVMLFHFEGSYENVVSACSSVDMILGVLGWSVGCSWCPLGVLEC

SEQ ID NO: 228033 - protein, 96 aa, Zea Mays
MAWRRASVAWRTGHPRRAGPPTSTPKSRREEVSLLFRVRRERSSRMRTIRGRRAFQVPDFTDLDFSSRHARAVPDTRGSRNPGYFTGMRSSFGGII

SEQ ID NO: 228034 - protein, 76 aa, Zea Mays
MGSRSSSALPTSGHRSCCGRSSVDVLPCTLLIHSPFAATILTLYKIFLQFLFHFQTFFSLNMHSVTWVTDKRGATH

SEQ ID NO: 228035 - protein, 423 aa, Zea Mays
MAARKKKPLLIACQATSARITRSQAAANSTRSGLAPSVPVPLKTEHNHAAKKKMKREASDENASADAGASAPLPKRRTVLKNVTNISCAKISKRCTAVTGLKLGPSQKAGQSINKQCTNKISMLLPLAVGGSSLVDDSNNAEETQMVDLLAQKEKQIVLLKEAQPLQNTEQNKGGACDEASVEERNAMNVHETAALKAGVSNGLNIVDIDKNNGDPQMCVTYVAEIYRNLMASELIRRPRSNYMETLQQDITASMRGVLIDWLVEVSDEYKLVADTLYLTVYLIDQFLSQNCIQTHKLQLLGITSMLIASKYEEYSAPSAEEFCNITAGTYAKAEVLEMEQQVLNDLGFHLSVPTTNTFLRRFLRAAQASRTAHLTTLNYLASYLAELTLISYDFMKFLPSEVAASSIFLAKWTLDQSDHPWV

SEQ ID NO: 228036 - protein, 214 aa, Zea Mays
MTTMSDDGDRTCPLCAEEMDITDQQLKPCKCGYDICVWCWHHIIDMAEKEETEGRCPACRTRYDKDRIVKMAATCDRTVADKNAEKKQKAQRVKPKAAPTATTTSTVESKKHLATVRVIQRNLVYIIGLPAHLCNESVLERREYFGQYGKVLKVSVSRPTGPPSQQASANSSISVYVSLNYTVYMHDLFILHMNLDFYFQYWSISLMEYQITIY

SEQ ID NO: 228037 - protein, 982 aa, Zea Mays
MGSVVGPPSSLSVVSYASIHTPQPRHSRCPPPRARGGLSPCAPPPSPHEAPEKDIKRTPMAMTPHASAATVAVTPALRFPHTLSATGLSSPPLAGGCGGCRVRFRPSQRGRGTQGRRGGSHVSRVGGLLGTVFGGGGRDDGEATRKKYADTVARINSMELEVSALSDADLRARTAALQDRARSGESLDSLLPEAFAVVREASKRVLGLRPFDVQLIGGMVLHKGEIAEMKTGEGKTLVAILPAYLNALSGKGVHVVTVNDYLARRDCEWVGQVPRFLGLQVGLIQQNMTPEQRRENYSYDITYVTNSELGFDYLRDNLAMTVDELVLRNFNYCVIDEVDSILIDEARTPLIISGLAEKPSDRYYKAAKIAEAFERDIHYTVDEKQRNVLLTEEGYADAEEILDIDDLYDPREQWASYILNAIKAKELFLKDVNYIVRSKEVLIVDEFTGRVMAGRRWSDGLHQAIEAKEGVPIQNETITLASISYQNFFLQFPKLCGMTGTAATETQEFESIYKLKVTVVPTNKPMIRKDDSDVVFRATNGKWRAVLVEISRMNKVGRPVLVGTTSVEQSESLSKQLREAGIPHEVLNAKPENVEREAEIVAQSGRLGAVTIATNMAGRGTDIILGGNAEFMARLKLREILMPRVVNPIDGVIVSKKQMPPRKTWKTNESLFPCELSKETLSSVKDTVEMAVKEWGDKSLTELEAEERLSYSCEKGPTRDEVIANLRNAFVKIADEYKVYTEEEKQKVITVGGLHVVGTERHESRRIDNQLRGRSGRQGDPGSSRFFLSLEDNIFRIFGGDRIQGLMQAFRVEDLPIESKMLTRALDEAQRKVENYFFDIRKQLFEYDEVLNSQRDRVYAERRRALASDSLQSLIVEYAELTMDDILGANIGPDTPKENWDLNKLIAKLQQYCHLLDDLTPELLEGKSSSYDDLREYLRKRGREAYFQKTVSYFSFSFHGYCFFAWFKGFKKFNNNNINIAF

SEQ ID NO: 228038 - protein, 641 aa, Zea Mays
MAMTPHASAATVAVTPALRFPHTLSATGLSSPPLAGGCGGCRVRFRPSQRGRGTQGRRGGSHVSRVGGLLGTVFGGGGRDDGEATRKKYADTVARINSMELEVSALSDADLRARTAALQDRARSGESLDSLLPEAFAVVREASKRVLGLRPFDVQLIGGMVLHKGEIAEMKTGEGKTLVAILPAYLNALSGKGVHVVTVNDYLARRDCEWVGQVPRFLGLQVGLIQQNMTPEQRRENYSYDITYVTNSELGFDYLRDNLAMTVDELVLRNFNYCVIDEVDSILIDEARTPLIISGLAEKPSDRYYKAAKIAEAFERDIHYTVDEKQRNVLLTEEGYADAEEILDIDDLYDPREQWASYILNAIKAKELFLKDVNYIVRSKEVLIVDEFTGRVMAGRRWSDGLHQAIEAKEGVPIQNETITLASISYQNFFLQFPKLCGMTGTAATETQEFESIYKLKVTVVPTNKPMIRKDDSDVVFRATNGKWRAVLVEISRMNKVGRPVLVGTTSVEQSESLSKQLREAGIPHEVLNAKPENVEREAEIVAQSGRLGAVTIATNMAGRGTDIILGGNAEFMARLKLREILMPRVVNPIDGVIVSKKQMPPRKTWKRQMKACSHVNFQKKHYRLSRIQLKWLSKNGEINH

SEQ ID NO: 228039 - protein, 176 aa, Zea Mays
MQAFRVEDLPIESKMLTRALDEAQRKVENYFFDIRKQLFEYDEVLNSQRDRVYAERRRALASDSLQSLIVEYAELTMDDILGANIGPDTPKENWDLNKLIAKLQQYCHLLDDLTPELLEGKSSSYDDLREYLRKRGREAYFQKTVSYFSFSFHGYCFFAWFKGFKKFNNNNINIAF

SEQ ID NO: 228040 - protein, 144 aa, Zea Mays
MEASYTQDSKLSGMELNGTLDYQLLSLQALKTMDLSNNHLHDSIPYQLPSNLTYLNLAKNNFSGNLPYSISNLVSLEYLNLSHNSLFQKIGEFSFRIVYCVRPTVYFRKLEASIHFQNFICKTINYQAHLMSLATLALRHSDHS

SEQ ID NO: 228041 - protein, 60 aa, Zea Mays
MLVDSTQFKERLKCGRCCLCPSMPQAVIFSSNKLLYITSLVDWLTICAEATLSSRVAPLW

SEQ ID NO: 228042 - protein, 155 aa, Zea Mays
MTALVTALGVPLRVEYLLQVGDGQDLYDRQEDSQDYTPTSTCWSSHRRQLPHVHVVPRVTVLYTNAHYDIIYPHRRDGPPVPSIDERCCQQTALVQRPTTESSGQQIAQRDSCSGTGESSSQHIAQVEISTDENSDQHAELKLTSTDAHEYDDHC

SEQ ID NO: 228043 - protein, 319 aa, Zea Mays
MSNIYSYLVINNSCFYFPEIMHPSCFVCSSDSITNVSFHTSLLKHFFFNYLPCNRCSLAEGSQTSVIMAFKTLIKKVMRWKRHNRWKNVLTTDSYSKQKLLKFFSGCGRPDNIFAFLRLVAAIWIYSHSEEFEPLIPELDEYDTLREWCSQEVIRHKVFTDHVQMTALVTALGVPLRVEYLLQVGDGQDLYDRQEDSQDYTPTSTCWSSHRRQLPHVHVVPRVTVLYTNAHYDIIYPHRRDGPPVPSIDERCCQQTALVQRPTTESSGQQIAQRDSCSGTGESSSQHIAQVEISTDENSDQHAELKLTSTDAHEYDDHC

SEQ ID NO: 228044 - protein, 79 aa, Zea Mays
MRAAYDQGHQSSCLHRWNYVCSVTSKDPVPSSSYCATGAEYHFTAVSTSLPIIQCSLATHTIDQCSVSSLHMVCFEYIT

SEQ ID NO: 228045 - protein, 453 aa, Zea Mays
MVESKISQIRDLFPDYGKGFLSACLEAYNLNPEEVIQRILEGTLHQDLLALDTSLEEMPHEKPAPTAVKDKGKGILVETVPQITKKPHKVAETHYFVQDGLSSATSSASQGPSSAISPASLGPSSAISSAFQGPSSAISSASLGPSSSISSVPKGRFTRKANDDLPDTAILDSKNAKNAARSVILDSQYEYEDEYDDSFDDLGFSVVESSYEETDGVNDAEASSHGPRWSSQKKPQFYVKDGKNYSYKVAGSVAVSSAREAAVMRQTQKETIYGLGRGGNVPFGVPNRQHIDVEAEEVGDADNSGRGSNSRGRGRKGGREGNRPEENESSNGRGSGFGGKRGGWSQGNPAEENWNPNGQQGFGRGGRRGGWNQGGPAKEDGNSSGRQESFGRGARRGSMNHDQSAEDNEGHNNPAQDFTRGPAPRGGHGRGGGRNHHRRDRAMKKHMQGLTGL

SEQ ID NO: 228046 - protein, 798 aa, Zea Mays
MTYANFCCFSQWHRTLLCMNSLIVIYNSGTGALLLEKKLLDLPKLLDICAIYEHDNGKLTSSLVTNVINVQPSVLDDINIVIPQFLNIFHTMHDRCMTSLQVLTSTGSIDNGYVQLQKDFMEVLDFINDAIVTLDSFVGAYQPAALLFCTNFEMSYGVEELLNALARLYSSLLPSLLHGFKVMPKSQSNAEASLDSTLSDIPLAIRMLSKRTARFGWRLLHYCYLNDQVREHDAQTSTKMFPAKVEDPMIRGDILVQTLKDINRESTYSSQVNHGNTFLQELESEFQLMSQIGDIRNKGWIYMDDEQFQFLSRLCGSTHTSWNGISDLPVSSHGGELQQKDEETAMVESKISQIRDLFPDYGKGFLSACLEAYNLNPEEVIQRILEGTLHQDLLALDTSLEEMPHEKPAPTAVKDKGKGILVETVPQITKKPHKVAETHYFVQDGLSSATSSASQGPSSAISPASLGPSSAISSAFQGPSSAISSASLGPSSSISSVPKGRFTRKANDDLPDTAILDSKNAKNAARSVILDSQYEYEDEYDDSFDDLGFSVVESSYEETDGVNDAEASSHGPRWSSQKKPQFYVKDGKNYSYKVAGSVAVSSAREAAVMRQTQKETIYGLGRGGNVPFGVPNRQHIDVEAEEVGDADNSGRGSNSRGRGRKGGREGNRPEENESSNGRGSGFGGKRGGWSQGNPAEENWNPNGQQGFGRGGRRGGWNQGGPAKEDGNSSGRQESFGRGARRGSMNHDQSAEDNEGHNNPAQDFTRGPAPRGGHGRGGGRNHHRRDRAMKKHMQGLTGL

SEQ ID NO: 228047 - protein, 217 aa, Zea Mays
MNREEGLHVASSERERAQSRQAGRLVGLMSCFHSVPDELEAVGPGVPLHEAHEAVPLLRRAHHVLGLDPRRLAVHELGAHVHGLQHALVVHHVKARDVAQLRRRVEHRRTLEREDGHAVGAVAGLGQPHVRDRLLVRALDELDRRPARHRHHLRPPPSPRALNRRYAVEQRLQVQAQVLLLMLLARDTCDVVPTGMLCCPCRHRRGDSKSLHHCGHP

SEQ ID NO: 228048 - protein, 197 aa, Zea Mays
MSNSGRWRRRTRSVAPSPATSSPSSPGLREAQPFRLPQWKFSQVLGELPPAAEARRDGAPRPQDDDDADEISAIEFDGRGEYLAGGDNAGRVILFRRTDGDGDDARPRAELERTDRAGAPPPRYSYATEFQSHEREFDVLDSLDISERIKKVRWCARPNSSLLMLAANDRTVKLWKVSNQRKCVDACCRLSPWEHVV

SEQ ID NO: 228049 - protein, 84 aa, Zea Mays
MPSTDCYAMEEDKRADHLDMDVSLVTVMAMVRNMLKLDYTMQEKIVTALSLKTPASELEGYCLMWDLRPYIDDDVMRLAWNMCP

SEQ ID NO: 228050 - protein, 84 aa, Zea Mays; identical to SEQ ID NO: 228049

SEQ ID NO: 228051 - protein, 609 aa, Zea Mays
MASTAARRLLLPLLLVALIAAHRAAARFVVEKNSLRVTSPAVLRGVYECAIGNFGMPQYGGTMHGVVVYPKADAKACRPFADSGLSFKPRSGGLPVFLLVDRGDCYFTTKGWNAQNAGAAAVLVADDRVEPLITMDSPESSGTEHIENITIPSALVTKRFGEDLRKALQSGDMVNVLLDWRESLPHPDERVEYELWTNSNDECGAKCDMQMSFVRSFRGIAQALEKRGSQCINHGRYCAPDPEQDFSTGYDGRDVVLQNLVQICVFRVANGTRRPWMWWDYVHDFAVRCPMKEKKYTRECANGVINSLGLDIEKINKCVGDPEADKENPVLKAEQDAQIGHGSRGDVTILPTLVVNNRQYRGKLEKTSVLKAVCSGFEETTEPDVCLREDIETNECLENNGGCWLDKATNVSACKDTFRGRVCECPIVNGVKFIGDGYNHCEASGLGRCQINNGGCWNETRNGKSVSACSNQEAKGCKCPAGFKGDGANSCEDVDECKEKLFCQCKDCACENTWGSYECSCGGGNSLYIREHDTCISKHSSSTPSWGFLWVVFLGLALAGAGAYAVYKYRLRSYMDSEIRAIMAQYMPLESQDMPSQQHHLVPVDRADV

SEQ ID NO: 228052 - protein, 467 aa, Zea Mays
MAAEGEAAALEFTPTWIVAAVCSLIVLLSLVAERCLHYLGKTLKRKNQKPLFEALLKVKEELMLLGFISLLLTVFQGMIRRTCIPERWTFHMLPCEKPDEKAGEAATMEHFVGTLGRIGRRLLQEGTAGAEQCQKKGKVPLLSLEAIHQLHIFIFVLAITHVIFSVTTMLLGGAQIHQWKQWENGIKKDAPGNGPKVTNVHHHEFIKKRFKGIGKDSIILSWLTHCPGNPKFDFHRYMVRVLEADFKKVVGISWYLWVFVVIFLLLNVNGWHTYFWIAFLPLILLLAIGTKLEHVIAQLAHDVAEKHTAVEGDVIVKPSDEHFWFGKPRVILYLIHFILFQNAFEIAFFFWILSTYGFDSCIMGQVRFIVPRLVIGVVIQLLCSYSTLPLYAIVTQMGSCYKKEIFNEHVQQGVLGWAQKVKMKKGLKGAASASKDESITNADSAGPSVKIEMAKAGEDVEIVGNTG

SEQ ID NO: 228053 - protein, 450 aa, Zea Mays
MVLSQVSDSNLRHTLQFGIGLHHAGLNDRDRSLVEELFSNNKIQVLVCTSTLAWGVNLPAHLVIIKMMGRAGRPQYDQHGKAVILVHEPKKSFYKKFLYEPFPVESNLREHLHDHINAEIVSGTISNKEEAIIYLTWTYLYRRLVVNPAYYGLEDTETNTLNSYLSRLVETTFEDLEDSGCIKVDDHSVKYLILGKIASQYYLSYLTVSMFGSNIGPNTTLEVFLHILSAASEFDELPVRHNEDNLNRILSGNVPYPVDQHHLDDPHVKANLLFQAHFSRAELPISDYVTDLKSVLDQSIRIIQAMIDVCANSGWLTSALTCMHLLQMIIQDLQHFPHVDVKVKLHNEQERSKPPTLNIRLQLKNSRRSASRAFAPRFPKAKQEAWWLVLGNATSSELYGLKRISFADRVINTRMELPQTFNVQETKLILVSDCYLGFDLEYSLEHLTKG

SEQ ID NO: 228054 - protein, 129 aa, Zea Mays
MFGSNIGPNTTLEVFLHILSAASEFDELPVRHNEDNLNRILSGNVPYPVDQHHLDDPHVKANLLFQAHFSRAELPISDYVTDLKSVLDQSIRIIQAMIDVCANSGWLTSALTCMHLLQMIIQLFYFYLA

SEQ ID NO: 228055 - protein, 117 aa, Zea Mays
MCAHGCFAQMATTTPRRKPATGSAYDDRGCETSAALPRPLRAGSGAGVVGRPGPADSPDHPFHERQDAHGPAAASPDHPFHVNHNRDALGPAVCGIPWPSRSTTMHSAFTPAGAPGF

SEQ ID NO: 228056 - protein, 183 aa, Zea Mays
MSGGISEVRAVGLRIVNSLHGIRIKTAPGRGGYVENVYIADVSMDNVSMAIRITGNYGEHPDDKYDSTALPVISNITIKDVVGVNIGVAGILEGIQGDNFSNICLSNVSLSVQSAHPWNCSLIEGYSNSVIPESCEQLRSNCRQTSICYDGSSSSVMSVQQPRHTSPTSRLLDLFTGVGFILV

SEQ ID NO: 228057 - protein, 350 aa, Zea Mays
MVIYLPLSFLKDFIYNSLRRHSRNTSASKIASKSSFGGSAPLKNGEFQKMLEMESQKTIVVNCPDVSIPVVEETKPLICGITEMDDGLFKDKQLSTKEIATYGLYLCPLWFVTEYLSNAALARTSVASTTVLSSTSGLFTLFIGVLLGQDSINAAKIIAVFISMAGVVMTTVGQTWASDESEAGKSGFTQRTLLGDMFGLMSAIAYGLFTVLLKKFCGEEGEKVDVQKLFGYLGLFTLVALWWIVWPLTALGVEPKFSMPHSAKVDEVVVANSLIGSVLSDYFWALSVVWTTPLVATLGMSLTIPIAMVADMIIHGRHYSAVYILGSVQVFSGFVIANLADRFSRSLGLS

SEQ ID NO: 228058 - protein, 425 aa, Zea Mays
MHLAPFCLEKNIWHHSESSRGFTTGPGLYLYHKETKKSQFLCLLLYNSGVNEPKTTWIFTKYRHPFAVTYLGASLMVIYLPLSFLKDFIYNSLRRHSRNTSASKIASKSSFGGSAPLKNGEFQKMLEMESQKTIVVNCPDVSIPVVEETKPLICGITEMDDGLFKDKQLSTKEIATYGLYLCPLWFVTEYLSNAALARTSVASTTVLSSTSGLFTLFIGVLLGQDSINAAKIIAVFISMAGVVMTTVGQTWASDESEAGKSGFTQRTLLGDMFGLMSAIAYGLFTVLLKKFCGEEGEKVDVQKLFGYLGLFTLVALWWIVWPLTALGVEPKFSMPHSAKVDEVVVANSLIGSVLSDYFWALSVVWTTPLVATLGMSLTIPIAMVADMIIHGRHYSAVYILGSVQVFSGFVIANLADRFSRSLGLS

SEQ ID NO: 228059 - protein, 112 aa, Zea Mays
MSFGSNNVHLMTFGQPRVGNAAFASYFAQYVPYTVRMTHERDIVPHLPPYFFFLPKLTYKHFPREVWEHEVDGNTTYQVCDGSGEDPNCCRWGAGACFDSALECVCAVLERF

SEQ ID NO: 228060 - protein, 286 aa, Zea Mays
MARLFFLLLLFPLLYSSVTGLNRSDFPPSFLFGAGTSSYQPNFHAHTYCMLIRRIYLEVLAINHKSGNIDDGSNGDVAADHYHRYKDDIEMMHSIGLGSYRFSLSWSRILPKGRFGGVNQAGIKFYNSLINGLLEKGIQPLVTINHFDIPEELQERYNSWLSPEIQEDFTYFAELCFKMFGDRVKHWVTFNEPNLVVKLAYSIGAFPPNHCSEPYGKCDSGNSSTEPYIAAHNMILAHAKTVNIYRKNYKSKQGGFVGISLHLRWYEPLRNITEDHLADLGSLVLW

SEQ ID NO: 228061 - protein, 174 aa, Zea Mays
MTFPSVKNILLLDSEGKRVAVKYYSDGWPTLSAKLAFEKSVFAKTQKANAGTDEIVMFDGQIVVYKFIQDLHFFVTGGEEENELILASVLQGFSDAVERLLKNMVDKRTALENLDLILLCLDEIVDGGIVLETEGREIAEKVSGHGSEGASSAEQTLVNALTQAREHLAKSLLM

SEQ ID NO: 228062 - protein, 80 aa, Zea Mays
METFPSVKNILLLDSEGKRVAVKYYSDGWPTLSAKLAFEKSVFAKTQKANAGTDGNLHLISLNTEELFSTDGERCCAPLR

SEQ ID NO: 228063 - protein, 189 aa, Zea Mays
MAPFALGSQVRTATRVRGRRSLGVRRLELFRQGCRTQVPGRDACQITVLHHEDNGMNIEMAKLAFSKGIWSYICKMNNALRRYPQHGSPSVSILTMQKLMKKDLETADASLSASQNTAASVVPSTPTSRTSPCKLAGRKSRQMIASGILLVGSIVCLSRGRSNLGAQLAMAFFLKKAFKQERQSGSSST

SEQ ID NO: 228064 - protein, 1311 aa, Zea Mays
MWATLHKPVAHANLRLLLTVSAFSGPLHLGTASAVAAAVTTRRSSSSRGVAATAMPSSSPPPLPPAEETTASAAALAPEGGFSLTEPSFLESLMPKKEIGVDRFLAAHPEYDGRSALIAIFDSGVDPAAAGLQTTSDGKPKILDVLDCTGSGDVDTSKVVKADADGAIVGASGARLVINPSWKNPSQEWHVGCKLIYELFTDTLTSRLKKERKKKWDEENQESISDALKQLNEFEKKHPKPDDTMLKKAHEDMQSRLDYLRKQAEGYDDKGPVIDIVTWNDGDVWRVAVDTQTLEGNNDGGKLADFVPLTNYRLERKYAIFSKLDACSFVANVYNDGNLVSIVTDCSPHATHVAGIAAAFHPDEPLLNGVAPGAQLISCKIGDTRLGSMETGTGLVRALIAAVEHKCDLINMSYGEPTLLPDYGRFIDLSNEVVDKHRIIFISSAGNNGPALNTVGAPGGTSTSIIGVGAYVSPAMAAGAHCVVQPPAKGMEYTWSSRGPTADGDLGVSISAPGGAVAPVPTWTLQSRMLMNGTSMSSPSACGGVALLVSGMKAEGIPLSPYSVRKAIENTAASISNAPEEKLTTGNGLLQVDRAFEYAQQAKKLPLVSYRISINQVGKSVPKLRGIYLRGGNACCQTSEWTVQLDPKFHEGASNLEQLVPFEECLQLHSTDTSVVQIPEYILVTNNGRSFNIVVNPANISSGLHYFEVYGIDYKAPWRGPIFRVPITVIKPIALLGEPPLLSISNLRFQSGHIERRFINVPFGASWAEVTMRTSAFDTPRRFFLDTVQICPLKRPVKWEAVVTFSSPSSKNFSFPVEGGLTLELSIAQFWSSGIASHEPTCVDFEIVLHGISIDQKVSTLDGESPLLIVARSLLASEKLVPVGTLNKIRIPYRPVECNLSSLPTDRDKLPSGKQIIALTLTYKFKLEDNAEIKPHVPLLNNRIYDNKFESQFYRISDSNKRIYSSGDVYPSYVRLSKGEYTLQLYIRHENVQFLEKLKELVLFIERKLDKKDFVPLMFYSQPDGPIVGSGTFKSTVLVPGEPEAFYVGPPSSEKLPKNAPPGAVLVGSITYGTVSTFNKKDEQNHRAPVSYSISYTILPSKVDDKEKGVLVGTKSIPEQLDEEVRDTKIKFLSSVKQLTEEDKSAWSELVVSLKSEYPKYTPLLSKILQCVLQKGTDGDKISHEKEVIAAADEVVGSIDKEELAKYLSLNSDPEDEEAQKFKKKIEETRDQLADALYQKCLALAEIESLKSDESIEVSAKDIFEENYKELIKWVDVKSAKYGTSTVLREKRCGRPGTALKVWLLETLLNW

SEQ ID NO: 228065 - protein, 89 aa, Zea Mays
MEPCLNLRKTVDASPLSPMSATILIVNSFLQWLYHPGFSSCHFHCWVRQFIISMANSQLGKLLDLCVWGHSYSIVILWYNIRGVLSPRR

SEQ ID NO: 228066 - protein, 709 aa, Zea Mays
MQMDVETVQAGPALAAHLQLQASPVKKYYFKKKTSSSHSRNGKDDVNHDSTIQPRSPLSRQSLTFDAIPTYHAGAFYEIDHDKLPPKSPIHLKSIRVVKVSECTNLDITVKFPSLQALRSFFSSYPAPGTGPELDERFVMSSNHAARILRRRVTEEELEGEVQQDSFWLIKPRLYDFAAPQQVPSRTLCLPPPPAPPAATLGLTADSCLLTTLKCDGAGWGMRRRVRYIGRHRDEAPKEASVDGYDTESSVREVQQPPATQEVKRSERNCKRKREAEASSKDNNGDEGKKNNKVQGASKKISKKAKKRTVESKDGDPRHGKDRWSAERYAAAEKSLLNIMRSRDARFGAPVMRQVLREEARKHIGDTGLLDHLLKHMAGRVPEGSVHRFRRRHNADGAMEYWLEPAELAEVRKQAGVSDPYWVPPPGWKPGDDVSLVAGDILVKRQVEELTEEVNGVKRQMEQLLCKDDGDFGAERDYSSLKEKYQRAVRANEKLEKQVLCLKDMCENVVQMNGELKKEVSSFKEKYEHIADKNDKLEEQVTYLSSSFLSFKDQLVVALKLELAPSEAVPRTALFVASGEQMTGTVIQGGQDRAERKSSFRVCKPQGKFLLPSMASGMTIGRGASSTCPAAATPGPGIPRSTSFPSMPGLPRSSRGPVEVVAAASGLDEHVMFGAHFSTPPLGVVHQRRCQAAAVPAQPEVAPAAAEAV

SEQ ID NO: 228067 - protein, 165 aa, Zea Mays
MGNTLPVHDMSESTGAAAIGSPNKEDLATMTLIKNWMLEIMVWHCYFSYSCFMSQSEVTRVGNHGISDWEWEEDEEMIWCYQGQAPSPRNGSSSFAWATCASGYSSPTVFGMGATNSSTMGMQQQQQQGVYGNMQAGAQNVQSMVGLQNQTQNPNFTQQIQQNQQ

SEQ ID NO: 228068 - protein, 54 aa, Zea Mays
MGATNSSTMGMQQQQQQGVYGNMQAGAQNVQSMVGLQNQTQNPNFTQQIQQNQQ

SEQ ID NO: 228069 - protein, 403 aa, Zea Mays
MSQEQGMEEPPPQAVGEAQSAADVPMSEAAAVEDEDEEPVMGEGQGGESGTADAVDSVKASVKPEAEGAEEGDREELNGGPTADLTDEVVKLENGDGPVPVGGSADECGAGDGGVDKGLVGQNEPVVNQLVLVQAEEELALSKISNSSFMFDYTTGGDDSGTEEEQAAFMKELERFHREKMLEFKPPKFYGEGLNCLKLWRQVTGLGGYDQVTSCKLWRQVGESFKPPKTCTTVSWTFRNFYEKALLEYEKHKIETGEFQVASSALPDRVGSESQVGGSHVSGSGRARRESATRAMQGWHSHRLLGNGENADPIIKDKGPIVLKKDKTPKSSGSAKRKRIPSLEDDMVIPYKSDKLQNDSMVIDMGPPADWVKINVRKTVLWLLWNFHKEYRLTANQELVKLQ

SEQ ID NO: 228070 - protein, 536 aa, Zea Mays
MPDPDAEVIALSPKTLMATNRFVCEVCSKGFQREQNLQLHRRGHNLPWKLKQKDPLQAQRRRVYLCPEPTCAHHDPARALGDLTGIKKHFSRKHGEKKWKCDKCSKRYAVQSDWKAHSKICGTREYRCDCGTLFSRRDSFITHRAFCDALAQESARLPPTSSLSNLTSHLYGAATNAGNMALSLSQVGSHLTSTLQDGHHHRPSPELLRLGATAGGGGGSSIAARLDHLLSPNGASAFRPAQPPSFFHNAGASVGQDFGDDAGNGPHSFLQLQANKPFHGLLMQLPDLQGNGAGGPGASGGPSSLFSLGFFANNGNSSSGSSHEHASQGLMNSDQFSGGGSEAQAAAGIFGGNFVSAGGDQVPPPGLYRDQASMLPQMSATALLQKAAQMGATTSANGASAASMFRGFAGSSPQHVRPATPHMEQSDANLNDLMNSLAGGGGLGAGGGMFGGGSNGAGHAGMFDPRQLCDMAEREGKFGFGQGGGGDITRDFLGVGGGGLVRGISTPRGDHQSSSDMSSMEAELKSASSFNGGRMP

SEQ ID NO: 228071 - protein, 85 aa, Zea Mays
MYCRRTCSNSCSPTLKELFFFKVVKRRPWVPMALAPRQVCSSPLCNITIVTIFCTHNTKLHIYIHPRLSDLSLSFVLPLLIFHNN

SEQ ID NO: 228072 - protein, 576 aa, Zea Mays
MNRIPSVSLRGGGANEDAAAASPPPDPAALSRWVRAFCVIRFDLERGQLVEACFPPDALTAPGSGLDRLVAFSSFPDSMSHHLPRHRSSVHDSLFSFRIPDPSSPRRAFLYGFVFNRQRQDERLPRGGEQKSVVILSHAPYSSLFRLLLQILGPLCFDVGPSALAMVASHVAVWPAPAPGHPMELPIGSAALRVHLPPAADDPGPPPALLPANPSVPYGLFHDADLFAAFRGLLLHLWTLWELMVVGEPILVVAPSPAQCSEAVSALVSLVAPLLYSVDFRPYFTIHDPDFARLNVLAEGEVFPPMVLGVTNLFFLKSLKSIPNVVSVGSPNPYSTRVLPVGGQSPGNGMNGTPGKLKLEKLAINKFSPTSLLNSIKLRREGPLSLMTEHKEALWSTYSPTTKPDTSVLNRLIDAGVSPRIEESMSVVNNEILRRHFLELTTNFLAPFGPYLRTTTPSEGTSPFVDPPLLPPFHADEFINGLAARGPGKFLSKRMRSNWLDLYRRFLEGPNFMPWFRQRRAAAEQEQQRLWRQARMNVDIEKLMSNMSEIERIDSFDAVERYLLREMENLKAKEYV

SEQ ID NO: 228073 - protein, 70 aa, Zea Mays
MATAAAGLAPAKEVVEKKVELLKEIRAHEVAIAELDNLNPSRVSLFPSVSLPCLRFVSGGVPESWQHLLP

SEQ ID NO: 228074 - protein, 213 aa, Zea Mays
MKTHSADNYHVCQYPECGRRFTQESKLRAHIRAQHEKAVCLQNPGASAMNHSAIGEQHQPPKPAKVSATPPAPSAERPYVCPYDGCDKAYIHEYKLNLHLKKEHPNHYQDGGPQGAAPSKRSISKSSHRSRPDITARMPPAKVSKRKGGYAAPSPAVNLPEEHLPEEQQWPRKVMYEDDSEETEEEEGGNNVEDRWNYNRVASSDDEETEDEQ

SEQ ID NO: 228075 - protein, 77 aa, Zea Mays
MASDSGDFGGENKSLETARRLLEETFTSEAEAEALPSLPSGFYDAFVLRGIRVVQALQPGTLLCHFNVPSRLLGLTP

SEQ ID NO: 228076 - protein, 126 aa, Zea Mays
MGHQTDEEDFASLTERVSQEMFDGVIREVVEETGVPASSLTDPVFIGVSRREVNVRPTAFFFTKCNIDSSGVSELYSRAQDGYESTKLYTVSVEELQGMRQRMPGCHNGGIALYELMRNAAKKKKF

SEQ ID NO: 228077 - protein, 602 aa, Zea Mays
MATSSTLGQTQRYAAGALLALALRQAQTHQTVLLGSHGLDDEPHPDAATAVEPDARDLWTHESRGLLRPVLRFLEIDPKAWVGVEKTAASSDPKHHIGAFLRKVFEDEDDDEKARSERSDHELALAKAVDAMAMGLESGGVGSVAEALRPESHGSDDDDGDPALAASTRTKDYRKMAVLYMLLSACVADVNMAEEGMGSPRVTKGYDARHRVALRLLATWLDVTWNKMEAVEIMVACSAMAAAREEEQSRENSSPNSRWENWKRGGIIGAAALTGGTLMAISGGLAAPAIAAGFTALVPTLHTLVPLIGASGFAAIATAAGHTAGSVAVAASFGAAGAGLTGTKMATRIGNVKEFEFKTIGQNHSQGRLAVGIFVSGFAFSEDDYSKPWEGWKTNLERYVLQWESKHVIGVSTAIQDWLASRVAIELMREGAMQTVLNGIISAFAWPATLVSAADFIDSKWSVAIDRSDKAGKMLADVLLKGLQGSRPVTLVGFSLGARVVFKCLQELAQLGNNVGIVERAVLIGAPVSVQGEMWEPARKMVAGRFVNVYSTNDWILGVTFRARFGRHPGRACPWSRERRRYRARCRALFVLVASPEDSRPS

SEQ ID NO: 228078 - protein, 127 aa, Zea Mays
MGDEMPRLALCLPLPPATTRARRMRSPPRRLMWRKTPRGWTLPSSCGLRPRWTSFTPGAIWTQVEVEAASRGQAPPKDSYKEGDRGGNESAEKNVVVAVMGQQVHHPRSSFPLCFCLIYFFKISLSV

SEQ ID NO: 228079 - protein, 94 aa, Zea Mays
MQVEVEALVIQGPKLSTILSQVKKLEASVLVLSQRKPSPFCCFLRSRSSSEEEELVEECINRAECLTLAVRRRSKGVGGYLVSTRWQKNFWLLA

SEQ ID NO: 228080 - protein, 979 aa, Zea Mays
MTEPRRVSFRDGCLASRKAEEAAWRRHQAAAWLQAMVGSLGLPPYPSEQEFVASLRNGIVLCKAINKLQPGAVTKIITNAPSNSQPLTAFQYFENIRNFLVAVNKLKLTSFEASDLDKDNLDAGTVGKIVDCVISLKSYHEWKQAGGANGPNKYMKSPLAVRSSQIQSENVASGPSPSLKRLDLTEVDADTQTFQNLDPNMKDCAFADAVEKLQKVIVDSMLSSKENIDQDILKKVPSKLIGAVLASQLGKEQFKHLQLLSPEKLIAENEPTHCIEHPNSPIESKQLLLQAHETELLDLKKMFQDVKVNFRSLQTQFRDDMAKLGENIQDLSKAALGYNQAVKENRNLYNMLQELRGNIRVFCRIRPLLHSESISSIEHVGTDGSVMVCDPVKPQSAHKIFQFNKVFGPTTTQDEVYKETQPLVRSVMDGYNVCIFAYGQTGSGKTHTMCGPSGGLSKDYGINYMALNDLFNISTSREDVKYDIRVQMVEIYNEQVRDLLNEDRSSTKLDIRASLNNGLSNLPDAKICPVQSPSDVINLMQLGEKHRASGSTAMNHRSSRSHSILTVHVNGKDIAGNVSRSSLHLVDLAGSERVDRSEATGDRLKEAQHINKSLSCLGDVINALAQKNSHIPYRNSKLTQLLQSSLGGNAKMLMFAHISPDAESCAETLSTLKFAQRASTVELGTALANKESSEVRELKEQVDTLKKALASKELEKTTLKVKGSATTSERTKQVLDCTPPRPRRLSLENASDKARMPERKILKSPRSAVGITHDKECNTDAFRHANHHESLIQMSAACAEVLVREEEKIICTVDTVEFCQLPTEAYNLLKQSGLNTPEAAPCRSRNLRTEASCGDALSSTTKLEKIMAGTAVKKGSQLKKSIQSSIGRLIHGTERRNAQHSAQGTPTKIIASGCHNNVSPVTADIRLRRRQSLTGIPPPLPTMSRRSSLGGRSDTSSNDKRGAKTPPPVNSAAKAKRWL

SEQ ID NO: 228081 - protein, 234 aa, Zea Mays
MEVASTCTVFCPIAGCGAHLDCLEEFEDHYVTRHTASCSVCSRVYPTSRLLSIHVSETHDSYFQAKVARGFPMYECLVEGCGMKLKSYKSRQQHLIDKHQFPKSFEFFKKARDSQRQRQKSQRRQTAHKGEETRDNSMDVDGKGARQTNRRYRLKQHDHSEPKENKQQHKEAQEDEMEVEQKIDELTSAVSRLSTADSTPSSVTFGHRRSRGLTFVPRSIRQNKQAALPAGSNK

SEQ ID NO: 228082 - protein, 330 aa, Zea Mays
MAVQAHYHHHYHRESPFLVSRLAAAMELHHQAQKEAMAPQQAQAPPLFLDFSHGDYGGGRKRQREAEPMSSQFFSLQQQPQAQGPKVINLAQLQKRTAMGLRLDFDEGSEHVSCTSPASASASCLLSKELAAQRDQHRNEMDRLIQEHADRLRRALADTRRRHYRSLVGAAEAAAAQRVREKEAEASEAARRRADLEDRVARLRAEAAAWQAKDAADQSTAAALHAQLQKAAAAQARGKAEEEDNVGAAADDAGSCFVDPDRVVEVAPPRPLARPCRTCGQRSASVVLLPCRHLCVCAECEPAVPAAGAVAAACPMCRGAVTGTVQVFFS

SEQ ID NO: 228083 - protein, 68 aa, Zea Mays
MESQSGVQDALRLESATYNERSIRSHLRRVKGLLSLSSLYVSLSTSLALLQESAQGKFAGLIYVFSVH

SEQ ID NO: 228084 - protein, 59 aa, Zea Mays
MVATTYNERSIRSHLRRVKGLLSLSSLYVSLSTSLALLQESAQGKFAGTSGLIYVFSVH

SEQ ID NO: 228085 - protein, 218 aa, Zea Mays
MPTISSRCLPSRRRLPRVGRRLPPHRPSPLTETHLKMMRSQLWMHHLKLWMEKSVNQNLSQVSQHLMNGLISAIILLRGCIIDIELGLITKDMNQLESSSVTRGRGKNKRIWTYYEDEELIKALYEISLDPKWKSEGGFKNGYCSVLENELKARLPGCGLSAIPHIESRVRHFRTKYGSIEVMLAKSGFNQMTMLFALPETLRREFILNMIADEAQRK

SEQ ID NO: 228086 - protein, 71 aa, Zea Mays
MSPDVLVARGVPCCRLVQCPGEFVVTFPRAYHIGFSHGRPQATPCLHLRRSCLPCPARDSLQALMKLSVLQ

SEQ ID NO: 228087 - protein, 273 aa, Zea Mays
MHARFLSAPSPASAAPSPYVRLAFTGARPRRACWKPRGPASASAPPPRPLHSLCARASMQPASPAHDGHGGPPVHGVSNTVIGVLGGGQLGKMLCHAASQMGIRIVILDPLPGCPASSVCDEHVIGSFNDEDTVREFAKRCGVLTVEIEHVDVTTLEKLEKQGVDCEPNASTIMIIQDKYRQKKHFSRCEIPLPDFMEVDTLRSIEEAGEKFGYPLMVKSKRLAYDGRGNAVAKNKEELPSVVASLGGFERGLYVERWTPFVKLSVIVARSRD

SEQ ID NO: 228088 - protein, 161 aa, Zea Mays
MLCHAASQMGIRIVILDPLPGCPASSVCDEHVIGSFNDEDTVREFAKRCGVLTVEIEHVDVTTLEKLEKQGVDCEPNASTIMIIQDKYRQKKHFSRCEIPLPDFMEVDTLRSIEEAGEKFGYPLMVKSKRLAYDGRGNAVAKNKEELPSVVASLGGFERGL

SEQ ID NO: 228089 - protein, 494 aa, Zea Mays
MSMYALLRSSKQPPTEDQIEDCLAGNLCRCTGYRPIIDAFRVFAKTDNLAYTNSCSEDAKDQAICPSTGKPCSCRNETDVNVNESSLSSSVERYSPYSYNEIDGSAYNERELIFPPELQLRKVMPLKLNGSNEIKWYRPLKLKQLLHLKSCYLDAKLIIGNSEVGVETKFKNAQYKVLIAVTHIPELNTLKAKEDGIHIGSAVRLAQLQNFLKKVVAEHDLPETSSCQAIVRQLKWFAGTQIRNVASIGGNICTASPISDLNPLWIAVGAKFHIIDVNGNVRTTLAKDFFLGYRKVDIKPEEILLSIILPWTRPFEYVKEFKQAHRREDDIALVNAGMRVYLQETERNWIISDVSIVFGGVAAVPLSASRTENFLTGKKWDSGLLDDTFNLLKEDISISENAPGGMIEFRRSLTLSFFFKFFLSVTHEMKIKGLLADGLHADHLSAVQPYSRPVTVGTQSYELVRQGASVGQPMVHMSAMLQVTGEAEYTDDTP

SEQ ID NO: 228090 - protein, 1106 aa, Zea Mays
MIDENIEENLFSMLDEETDSETAMLVRATIIRLLYTSCPVCPSRWLAVLRNIVLATSIRRNTGEVLSCFGHNPPDSTSENDVYYGEDEDNMISSSKQQQIRCAGSISSQFPPRNKHLRYRTRVFAAECVSHVPIAVGAEPAHFDLLLARSAISQGTYLSNDWLVLKLQELVSLSYQISTGQFEGMQPIGVKLLCLIMDKFGKAVDPEFPGHILLEQFQAQLVSAVRMAISTASGPLLLEAGLELATRVMTSSIIGGDRLALSRLFSLITRPLSDIEGLLYPSFADWVVCKIKVRLLTAHAAVKCNTYQFLRMRENAPNEYQQLAPSLVNSSTLLGKYWIRALKDYVSISFGLHSKINYKPFLDGIQSLLVLSKVQRYLDEVWLLILKATALDAAPLDFDENNPKNLLEQTFISGHCMVKLDRTEFQFLWGLSILVLFHSCQSMKNNSLKINLDFKQDKNFGEFIVHGLDDKRPCDQVLRVLSSLTTEVFFSNNFISVDICQQLLQALTYADCSSAPIIHLFTQIIRFCPDNFFEVEAFVFSAIELLSQYLGLILQCRDGSSQNNSSNTLISELSIASETMAYRIKGEYLWKLVMLVVSTSHQSFQQVSTNLCFSNIICFLQNIFPFMRKIFRERVESDGECTSPKVVFGAMVGLVGYFYVECDKKISLLENKISDSYKLLNKILLFCLGEATALAKLVPEIIYRSENVSNNDVLLWGSFRLCVQVIQGSFRSTNIQVHMLGLQVLRSYAQKELTEGSETKLDSFMMLLTELLGDLFLVMETTLKECSNKKSVSVVDECLKLVFLFHTLAQSKKYRQDATTLLLEALLMVFSLSSDTVSQELAEVNTISRKLFSHFIQIPSVAIQIKDIMLSAPAERRLQLQDMVRASVSQGQITVPVATSAHSEQNIQDSCSKNPGSTSEASDCVATHGNNDNEVVDDDWDDDWDAFQSLPAIANDGVDSGEISLTTRYNEQIPQENSSYGSCNADITARAMEDITCVDKELEEPSDLQFSSTEQQPKHDLPGSSHEGCAKLERHPSVDCKEQLADDETADELQQQVHEDTDHVNKDSEVLSAEIHGVKLDILDEDVEDDSPMNSNNLSDIAEEES

SEQ ID NO: 228091 - protein, 437 aa, Zea Mays
MVKLHKVEKLSKEEYKEVPVNLGIEEPKKGRNAWNGMRYHHMDAQQLASGGWIAVMDGDRVPSGDSTRRSLIGYLAFLLASALVVFVGFMKGAISCYVPPSLWVPLTRRTELSRIFYVHRFNQKVRRYSTSISRYISAAKTKLSEKTWSNVLFFCVVALFGAINVCIAVHFLCGGNGAEEAYTYQGQHSQFTMITMTYEARLWNLKVFIEHYSRCESVREIVVVWNKGNPPSSDAFDSTVPVRIRVEETNSLNNRFRVDPLIKTRAVLELDDDIMMTCTDLEKGFRVWREHPERMVGFYPRMIDGNPMQYRNERYARGKNGYNLILTGAAFMDKEFAFKTYWSEKAREGRDYVHKNFNCEDLLMNFLYANASSTTRTVEYVHPAWAIDTSKLSSVAISRDTQKHYDIRTHCLANFSSIYGPLPQKWEFGMREDRWDK

SEQ ID NO: 228092 - protein, 238 aa, Zea Mays
MFWVGCVYGKNDESRFGFFCHSALEFLLQKGSSPDIIHCHDWSSAPVAWLYKEHYALNGIGNGRIVFTIHNLEFGAHHIGKAMAHCDKATTVSDTYSKEVAGHGAIAPHYYKFHGIRNGIDPDIWDPYTDKFIPVHYTSENVVEGKSAAKKALQQMLGLQQTDTPVVGIITRLTVQKGIHLIKHAMHRALERNGQVVLLGSAPDPRIQSDFTNLASKLHGEYHGRVKLCLTYDEPLSH

SEQ ID NO: 228093 - protein, 80 aa, Zea Mays
MCSCRYPVPRKVPLFFHLTSNTGTFSFFFTSAWHGVVVPCSPRPFCRCGWIHLPLGAGSDATEYSSLIQNTFLVHGNEWQ

SEQ ID NO: 228094 - protein, 256 aa, Zea Mays
MSDQMREVVRSAALHLPTAIISGRSCDKVFDFVRLTELYYAGSHGMDIMGPVGKTGSVTDHRSRGTNSSKKQDKEMQIFQAASEFLPMIDEVFGLLVDKVRGIDGARVENNKFCVSVHYRNVNEKDWALVARCTDDVLKAYPRLRLSHGRKVLEVRPMVDWNKGKAVEFLLDSLGLADSDEVLPIYIGDDRTDEDAFKVRGQFGSFLVMLENGLRCFKTCRFYGETNGVWGFWCHLYRRNLRRCTPCWIHLRSWTS

SEQ ID NO: 228095 - protein, 81 aa, Zea Mays
MTWPTSSVAWRICSGPSAPWRHTIEGPDDMPAHIKSSMFGCSLMIPITNGRLNMGTWQGIWLCEHRDYATPRQIVITLNGI

SEQ ID NO: 228096 - protein, 94 aa, Zea Mays
MTWPTSSVAWRICSVDTETFLSRIVPEGPSAPWRHTIEGPDDMPAHIKSSMFGCSLMIPITNGRLNMGTWQGIWLCEHRDYATPRQIVITLNGI

SEQ ID NO: 228097 - protein, 569 aa, Zea Mays
MASAAFKSTTRRALHATTTSRSDPPPCPRRTRSRSVSAAPRAAHEDYANTRTNPLFDSAASPSASPSPPPGAAAATGATSGRGDAAGRERGREPRLKSGGRGGGGGRARSASVAPPQRRHTASVADSAADVGGRKASRARSVADVARTYRGSETDAEARGVARKLQSWRSQHSVPEGCRQMDETTQSESSTVVSSPGHLEHQDHSTVPVDPVLEIPPEFDPDSAEFISDISDYVTEYGKKNVVEISLESRNSAAKQHWEQMEISLEFDTDASELVSDTWHHGANQQRGELEASLEFDPDTSELAPDITEYTLKLKQSHERARKLRADLAVEEQREQELSRMLKGIVTDPNFTETHKKRPRRKSSIERLKVSRRLAEEAMNYFEECVSISTMDSTDFSSPEDPQPNSVVNVPPKSNSRFFHKGRSIFQEPHTLADQHGYHVESDKQTQCSISATGSDVSDSVIFSHTNGAGLKIRSVSSDDPDGFDTPRSRSSCFSFTHEPVKKLENCDVRQYLGNFGRGNNTELKETRSSYFADDYASQKVDPDLLKDMVTFQNRIEYGGLVICNIRTF

SEQ ID NO: 228098 - protein, 389 aa, Zea Mays
MLAAVMDYFSSCWGPRSGAGHRGKGSDAAGRQDGLLWYKDAGQLVTGEFSMAVVQANQLLEDQSQVESGSLSLADPGPQGTFVGVYDGHGGPETSRFINDHLFNHLRTDVIRKAFQATEEGFLSLVSKEWSLKPQIASVGSCCLVGVICAGTLYVANVGDSRAVLGRLVKATGEVVAMQLSSEHNACYEEVRQELQSSHPDDPHIVVLKHNVWRVKGLIQISRSIGDVYLKKPEYNREPLHSKFRLRETFQRPILSSEPQITEHRIQPNDQFVIFASDGLWEHLSNKEAVDLVQSSPRNGIARRLVKAAMQEAAKKREMRYSDLKKIDRGVRRHFHDDITVVVVFLDSDAMSKASWSKSPSVSLRGGGVALPAKSLAPFSAPARLNSTY

SEQ ID NO: 228099 - protein, 415 aa, Zea Mays
MSPLHPPRDAIPKPSALPPPSRRIPSTAISARLRPEGTFSWLPVSCPPRRTRTRRSPRRHRISRQGQAGAGGHSQIPSSAAINALLLDPVIRCESPFSSPSRFHRRRGPLAGADLSQARHSGAGAVQGLDPAGQGEDDHAGWEQGPAGAEVRAGFEFWFMGFVRYQVSLHELEKAIEQANVRGQIHRLPFDGLALCFCVAIRSLEKAIELLSKRKVQGRILLCGYSFNYISGTASIKKVSHTTRNLGAVGFVVAVENIYPGIKFDPVPVSIPRILITDVSKTEDLIDYYNSSTIIDWAGRATTFKATADILAPGNLIWAAWAPNGTDESNYAGEGFAMVSGTSMATPHFAGIAALIKQKNPKWSPSAIKSAMMTTTNTLDKGSRPLRAQQYTTSEMMTLSQATPFDCDTVPDVYN

SEQ ID NO: 228100 - protein, 144 aa, Zea Mays
MAGKAGGLKGVALIGGSANSTVAGVIHFFEDPSTRYTEVRGKVTGLTPGRHGFHIHVFGDTTNGCNSTGPHFNPHNKPHGAPFDDERHLGDLGNIVANEDGDAEVFIRDLQISLSGPHSILGRAVVVHADPDDLGRDRYQPTPP

SEQ ID NO: 228101 - protein, 314 aa, Zea Mays
MEITRILVSHPINAKRAAEGKNIANVVLLRGCGIRIEVPAFETKHGLAPCMVAPTKIIAGLGLSLGIDILEAPGATGDYRTLLTSKAKAIAKALSAPMDTPPRVFVPGEDGYKAGKENGYDFGFLHIKAKCIFRFFLLVLTIYVIVIALVIMSMQAIDDAGHDKAVKLKVRGLEAVDRAIGQLARLLWEAEKAGHYQYFLCVTGDHSTPVEYGDHSFEPVPFAICRLRDYAGAIGEDNIMNTQLDDFPLPSVKSGEDLLDSIESLEHKPGQLKAFSGDSVCEFNEIAAARGCLGRFPGSEMMGIIKKFIKAKND

SEQ ID NO: 228102 - protein, 554 aa, Zea Mays
MCKGSVGVQRAHHGESVEEKENFQHDSGSLGASKDGFEEEKPDVHPPAVLEENYAAHEEQKQCDVLSPEEYSDEGWQAANMRGRSANVRKKSSRRKPALMKLMVDRFEDDHTGSVYRTGLQPRTKGEKDDSATAPSQISFGSFLKTDKLNGDPSIAEDKSLNGTAKPEQFTNPTGINRPTSIASKFISYKDVAVSPPGTVLKPILEKKEAKEKGSGHDIYLTLSSEEEDPQFTENEKEKPSEDSSKEVLSSQQDLESHVETPDSNSDENPSAPKKASGSKLSASAPPFNPGSLLSMSHPYSTVAIYDASAVIQAVPNQAMEILPHAIDTRVPRGPRSTLYYRTGHSFQRKQGYTHSQSTIVRGSYSPTTMNPHAAEFVPGKTSQQSDVADREPSPANHVANSDLDVVSQTTDEVKAETPATEKAGQVEKVVSGKGKENRGKDIVRNSYKTELARQILLSFIVKSVHDSLGSAQAEPERKPSGSDEASNKQSSNLVKNASGRKDSDKQEKSMEVPKGLKDTEGFTVVSKRRRRPQPFMNPINGLCSQPSICTSVS

SEQ ID NO: 228103 - protein, 279 aa, Zea Mays
MGIQGTEVAKESSDIIILDDNFSSVVKVVRWGRSVYANIQKFIQFQLTVNVAALVINVVAAVSSGNVPLNAVQLLWVNLIMDTLGALALATEPPTDQLMRRPPVGRREPLVTNIMWRNLFIQAVFQVAVLLTLNFRGRDLLHLTHDTLGHSSKVKNTLIFNTFVLCQVFNEVNSRKPEELNIFSGVSRNHLFLAVVSITVVMQVIIIEFLGKFTSTVRLNWKLWLVSVVIAFLSWPLAFVGKFIPVPRTELKDLIVRCWPKRGESAAQQTQDDRMEVPV

SEQ ID NO: 228104 - protein, 566 aa, Zea Mays
MPAGGAIVVVEVVQVVVPGAVAKPPGSKEEAAASTGMKSGLARLVRRTGGAERPTSAWSVAGGRVLWARAAIPLPATQIPMGGGWLDNGGTQIRHGAAPRPGGGGRRAAHWRVHDRGGGEPVEAEDEWRFARVTWRLTVTAVGLNTEWGLLMASISEDNNEETPLQVRLNGVATFIGIAGLSVAAMVLVVLFARYFTGHTTDSDGSVQFVKRHTSVKSAIFGSIKILTVAVTIVVVAVPEGLPLAVTLTLAYSMRKMMADKALVRRLSACETMGSATTICSDKTGTLTLNQMTVMQSIVGEVKLQPPANVDKLSSTVASLLLEGIAQNTSGSVFEAQDGSVEVTGSPTEKAILSWGLDLRMKFAEERSRSSIIHVSPFNSEKKRAGVAVVARDSNVHVHWKGAAEIVLALCTSWLNVDGSTHEMTPDKANQLKKLIEDMAEQSLRCIAFAYRNLDMKDVPSEEQRINWQLPDNELTLIGIIGMKDPCRPEVRDAVELCKKAGVKVRMVTGDNLKTAKAIALECGILDDSEASAQAIIEGRVFRAYDDTERENVADKISGWIGVELG

SEQ ID NO: 228105 - protein, 59 aa, Zea Mays
MRCVLLCLAMRYEALLLPDAKYCNDLHLKVSRLEWLTFTTYCLDNGFYTIVSKVVLLHR

SEQ ID NO: 228106 - protein, 216 aa, Zea Mays
MADAASGRGHVVYPPRSAEDIFKDYRARRSAILRALTHEVEDFYAQCDPDKENLCLYGYANEAWEVALPAEEVPTELPEPALGINFARDGMNRRDWLALVAVHSDSWLLSVAFYYAARLNRNDRKRLFGMINELQTVFEVVSGARQQQSKERSSMDNGGRAKPVKKIMEKSQTKHTKMTVITVKPYVEPVVGYTTRMSFGSGVTCASDGTMASVSR

SEQ ID NO: 228107 - protein, 122 aa, Zea Mays
MLEEKFGPILFPNVDTDNRICPSCSEGTLRFKVSRYGEGYFIGCDRHPKCKYIARSLSQQEDETEPTEECQKTFTPRLLGVMPDSDEKVFLKQGPYGHYVQIGEDKKGLFPKRASLSKVSKI

SEQ ID NO: 228108 - protein, 79 aa, Zea Mays
MAACRNGTEPRTHTKAGVKDIDSVTLEDAIELLQYPKILSVDPKKMTLERALKLLSGKSVRRIGRPKGKVENKEPMEWH

SEQ ID NO: 228109 - protein, 126 aa, Zea Mays
MHGTGQTRSLAMADSCSVAIGELNFTSTAFDLPPPSAPSRSVSGQSPNPLSTNSLDLDGQETTSVFNLSTNAHSVPVSTNEPTEAQFVPSNQESSQREGASGRKRKQSHVGLALKVMWSLKRSIFY

SEQ ID NO: 228110 - protein, 410 aa, Zea Mays
MLMSFAGSAPDPTILMFSESWPGLPRGVEFNPSDSDLLWHLAAEVGNALAERHPFINEFIKFVDDVREFICTHPQHIPGVRQDGRASYFFHRSFEPYINENDVNNCWKKIGSPRSIILDGTLTGCKEVFALYADMPSDKRSQETDWRLHQYHLQNTVKAESEIVASKIFLASRNSLCELAEETHIESEWDVSTHKDSSVECAKGFNPEICTETDELDHISLKERYRILLADKSLGLTTVSAGKSIMHVETSRASPKRNHEGKISKEDIFSMLQEISSAPSIIESNPMDDDSNRRILGEDLPVEGSENQIGGTATCMGENSELVARKQGAHLADVKLEPALGGYEIGPSELPQENSTHAEGSVLSLGIKDELTDCELPGLCENVSFSSRQRRKRKTSYSTEKTLKEDKKHC

SEQ ID NO: 228111 - protein, 353 aa, Zea Mays
MMLENLFALILNIYQFNCNLAGVRQDGRASYFFHRSFEPYINENDVNNCWKKIGSPRSIILDGTLTGCKEVFALYADMPSDKRSQETDWRLHQYHLQNTVKAESEIVASKIFLASRNSLCELAEETHIESEWDVSTHKDSSVECAKGFNPEICTETDELDHISLKERYRILLADKSLGLTTVSAGKSIMHVETSRASPKRNHEGKISKEDIFSMLQEISSAPSIIESNPMDDDSNRRILGEDLPVEGSENQIGGTATCMGENSELVARKQGAHLADVKLEPALGGYEIGPSELPQENSTHAEGSVLSLGIKDELTDCELPGLCENVSFSSRQRRKRKTSYSTEKTLKEDKKHC

SEQ ID NO: 228112 - protein, 280 aa, Zea Mays
MLMSFAGSAPDPTILMFSESWPGLPRGVEFNPSDSDLLWHLAAEVGNALAERHPFINEFIKFVDDVREFICTHPQHIPGVRQDGRASYFFHRSFEPYINENDVNNCWKKIGSPRSIILDGTLTGCKEVFALYADMPSDKRSQETDWRLHQYHLQNTVKAESEIVASKIFLASRNSLCELAEETHIESEWDVSTHKDSSVECAKGFNPEICTETDELDHISLKERYRILLADKSLGLTTVSAGKSIMHVETSRASPKRNHEGKISKEDIFSMLKFLLHLLL

SEQ ID NO: 228113 - protein, 438 aa, Zea Mays
MLMSFAGSAPDPTILMFSESWPGLPRGVEFNPSDSDLLWHLAAEVGNALAERHPFINEFIKFVDDVREFICTHPQHIPGVRQDGRASYFFHRSFEPYINENDVNNCWKKIGSPRSIILDGTLTGCKEVFALYADMPSDKRSQETDWRLHQYHLQNTVKAESEIVASKIFLASRNSLCELAEETHIESEWDVSTHKDSSVECAKGFNPEICTETDELDHISLKERYRILLADKSLGLTTVSAGKSIMHVETSRASPKRNHEGKISKEDIFSMLQEISSAPSIIESNPMDDDSNRRILGEDLPGNSGFLNVFGMSSNSKPCLFELGYCHDPVEGSENQIGGTATCMGENSELVARKQGAHLADVKLEPALGGYEIGPSELPQENSTHAEGSVLSLGIKDELTDCELPGLCENVSFSSRQRRKRKTSYSTEKTLKEDKKHC

SEQ ID NO: 228114 - protein, 466 aa, Zea Mays
MLFFKPSHYDRPRIAQLCEKAGLYLRALQHYAELPDIKRAIVNTHAIEPQALVEFFGTLSREWALECMKDLLLVNLRGNLQIVVQAAKEYSEQLGVDACIKLFEQFKSYEGLYFFLGSYLSSSEDPEIHFKYIEAAARTGQIKEVERVTRESNFYDAEKTKNFLMEAKLPDARPLINVCDRFGFVPDLTHYLYTNNMLRYIEGYVQKVNPGNAPLVVGQLLDDECPEDFIKGLILSVRSLLPVEPLVDECEKRNRLRLLTQFLEHLVSEGSQDVHVHNALGKIIIDSNNNPEHFLTTNPFYDSRVVGKYCEKRDPTLAVVAYRRGQCDDELIIVTNKNSLFKLQARYVVERMDGDLWDKVLQPENEYRRQLIDQVVSTALPESKSPEQVSAAVKAFMTADLPHELIELLEKIVLQNSAFSGNFNLQNLLILTAIKADPSRVMDYVNRLDNFDGPAVGEVAVEAQLY

SEQ ID NO: 228115 - protein, 657 aa, Zea Mays
MVYITVGSAANPILEFLEEWGTENFEEISPAVIPQAAKIFVNGCWVGIHRNPDLLVKTLRRLRRQIDVNTEVGVVRDIRLKELRLYTDYGRCSRPLFIVEGQRLLIKKAHIRALQQRETPDEGWHELVSKGYIEYIDTEEEETTMISMTINDLQNARHNPEEAYSETYTHCEIHPSLILGVCASIIPFPDHNQSPRNTYQSAMGKQAMGIYVTNYQLRMDTLAYVLYYPQKPLVTTRAMEHLHFRQLPAGINAIVAIACYSGYNQEDSVIMNQSSIDRGFFRSLFFRSYRDEEKKMGTLIKEEFGRPNRENTMGMRHGSYDKLDDDGLAPPGTRVSGEDVIIGKTSPIPQDDAQGQASRYSKRDHSTALRHSESGMVDQVLLTTNADGLRFVKVRMRSVRIPQIGDKFSSRHGQKGTVGMTYTQEDMPWTIEGITPDIIVNPHAIPSRMTIGQLIECIMGKVAAQMGKEGDATPFTDVTVDNISKALHKCNYQMRGFETMYNGHTGRKLTAMIFLGPTYYQRLKHMVDDKIHSRGRGPVQILTRQPAEGRSRDGGLRFGEMERDCMIAHGAAFFLKERLFDQSDAYRVHVCEKCGLIAIANLKKNSFECRGCKNKTDIVQVHIPYACKLLFQELMAMAIAPRMLTHDMKTGKDQKKR

SEQ ID NO: 228116 - protein, 124 aa, Zea Mays
MEDFYVTILYGLLLVAGGVAGYMKRGSAASLVAGGGFGAALLLAGALSAWAFAHGRGGAAAIFATVLQIVCAVLLTVVMGIRYVKTQKIMPAGIVASISALVLIFYVYKISTGGNKVYMSVSAE

SEQ ID NO: 228117 - protein, 192 aa, Zea Mays
MASLPVPHTLPRVSPAIVGAARGRAAVRVRTATAALGGGCGGGGGMEQRHGDAPHSPGKSTLACALSRELHCRGHLTYVLDGDNLRHGLNRDLSFKAEDRAENIRRVGEVAKLFADAGVICIASLISPYRRDRDACRALLPHSNFIEVFIDLPLKICEARDPKGLYKLARTGKIKGFTGIDDPYEPPINDSN

SEQ ID NO: 228118 - protein, 64 aa, Zea Mays
MYFEKIDLILVCPLLVDTIRSVVGHMNKRHQHVGSNRRYRSFRNGNGFIRFIVDDICFACILPA

SEQ ID NO: 228119 - protein, 107 aa, Zea Mays
MSSVRNYLQTNIIIPFAHMLQLRFYILFSLSSISRDIITHKTASLSFRFGDTSVTNSDSSHISSMHNCDMLFGFVSSLGALAHLINLSNIRIVIRRPPVAGYMILNG

SEQ ID NO: 228120 - protein, 107 aa, Zea Mays; identical to SEQ ID NO: 228119

SEQ ID NO: 228121 - protein, 229 aa, Zea Mays
MEQEFLQALQAFYYDQKAIMSNEEFDNLKEELMWEGSSVVMLNEDEQKLLEASLAYTSGNPIMSDAEFDELKLRLKTDGSVIVKEGPRCSLRTHKVYSDLNVDYLKMFLLNVPATTVALGLFFFIDELTGFEINVFQLPEPFGFIFTWFAALPLILFLAQSLTKAIVQDFLILKGPCPNCGTENLSFFGTILSVSSGGTTNKVKCANCSTELEYDSKSRVITLPEASNA

SEQ ID NO: 228122 - protein, 242 aa, Zea Mays
MAASSIPPCQVQEQDDEVVDRNILPYCSIDRKQKKTLGEMEQEFLQALQAFYYDQKAIMSNEEFDNLKEELMWEGSSVVIAKQTNSVIVKEGPRCSLRSHKVYSDLNVDYIKMFLLNVPATTVALGLFFFIDELTGFEINVFQVSVHLIQLPEPFGFIFTWFAALPLILFLAQSLTKAIVQDFLILKGPCPNCGTENLSFFGTILSVSSGGTTNKVKCANCSTELEYDSKSRVITLPEASNA

SEQ ID NO: 228123 - protein, 459 aa, Zea Mays
MGSDRAELARLCSARNWSKAIRLLDSILARSPSSIHDLCNRAFCYSQLELHKHVVKDCDRALLLDPALLQAYILKGKALSSLDKKEDALAAWKQGYEIAVRDTTDLKQLLDLEELVSSVKICGTTQSADHVMDASTCDTKVVISEDRVADTSFAATTMADTKTVVCEEAIGSSKVSSNGDTKLTNYNKKADHNKVSSSSVKDITGTQAPKKAPKLDKKNKAKAVKEINGRAEGVTGRASTDESETISLDQALFATKISKSSKSISLDFRLSRGIAQVNEGRYDQAISIFDQILRETPTYPEALIGRGTAYAFQRELDSAISDFTKAIQSSPSAGEAWKRRGQARAALGEFKEAIEDLTKALEFEPNSPDILHERGIVNFKFKDYNSALEDLSTCVKHDKKNSSAHTYLGLTLSALGEYKRAEDEHVIGLKYDESFLDCWAHLAQGNNSARRSAGSSSAS

SEQ ID NO: 228124 - protein, 128 aa, Zea Mays
MTRGFSAHMHQVSLPFAATVFQFDRLGKRQGNRICHGRRFPFLSDVDVLYSCIFGFNNMPLVCCQASYLQEINGLRPRGLFFLIMRFQVGRDFGYPLKRYAWWCFLVLKNKYPTEPQPFVLSGDFLHY

SEQ ID NO: 228125 - protein, 176 aa, Zea Mays
MLEGPKEALIDLAWHPVEPTIATVSVTGFVYIWAKEHVENWSAFAPDFVELEENEEYAEREDEFDLNPREEQAEKVVIDEDADVDIETSEKNTVFSDVEDSVDEISYLPAIPYPDSPDEQPEKCLGSSKLEDSNHSGSPSSMDAVQNGQAIPPASSPMEGKAFLCQCLFSISVQLL

SEQ ID NO: 228126 - protein, 85 aa, Zea Mays
MWRRRRGNARRTASDSLGHAWRRTTAPTCAAVRASPAAVRWWTFILFIGLLDFFPPNNKKTHVLACTLCCICFSCWLHLLITDEL

SEQ ID NO: 228127 - protein, 271 aa, Zea Mays
METSAATPTRPPHPAAASPSPSPSSSLRLWRSAAQRNVRNQWSRLSAAKEQWLAAVADGRAHASALVNAHLCRRNMPATDLGVLKDMPGIRDKANSKLVLREEQYSGMLLSAYKEMVRQLSYLVEASHSMRCFSKAAPNCSITQFSDRQDNLNDSGDGGGAPVFKWFSILEFETLAQELVQMFVSEQKLKRLLLLEFLSIALKEGVELQTSLNWGDELYDERLGSQRPGNLPLHEVLQVYLTTWHANMNINRSRIGEIFELVEEEMKIKLS

SEQ ID NO: 228128 - protein, 108 aa, Zea Mays
MFVSEQKLKRLLLLEFLSIALKEGVELQTSLNWGDELYDGESNELQSIGLQSGDAYSPPENWCAERLGSQRPGNLPLHEVLQVYLTTWHANMNINRKLVKYLSLLRRR

SEQ ID NO: 228129 - protein, 210 aa, Zea Mays
METSAATPTRPPHPAAASPSPSPSSSLRLWRSAAQRNVRNQWSRLSAAKEQWLAAVADGRAHASALVNAHLCRRNMPATDLGVLKDMPGIRDKANSKLVLREEQYSGMLLSAYKEMVRQLSYLVEASHSMRCFSKAAPNCSITQFSDRQDNLNDSGDGGGAPVFKWFSILEFGACSDVCFRAKVEEAATLGISLDCFKGRCRTPDIIKLG

SEQ ID NO: 228130 - protein, 628 aa, Zea Mays
MTPLPMKEDVRAPPPLPSLIPESVLIQDVVAAAEPSVEYHCNSCSVDCSRKRYHCRTQADFDLCCDCYNEGKFDPGMAKTDFILMDSAGVSGASGTSWTDEETLLLLEGLEIFGGKWAEIAEHVATKTKAQCMLHFLQMQIEDRFHDGKDINQNIPVSTDQATTEKAIAETSEKMEVEDKVEGRGTVDEKASEKTEGNCEETKTENASVVVNKDTQNSDGRDSGASPSTEEPKQSSDEQPVVKENSADVDTSGEKLSNVAIDILKSAFEATGHSPEYEGSFADAGNPVMALAAYLAGLVEDDNTTTSFRSSLKSVSDVSPALQLSSRHCFILEDPPDELKDICASVSKKNRDGDQKQDEDMIQNSIDTEKKEINEKEGKSLSVEKKNNSSMSQNDHQESGIKSVSSDDCSLVEPKTNNAKESGDSTAIGDKSATETTKGNTEQVNDLPSVEVEAPDDSSSKGKDELNKTKDAVATPATVQEQKHSQTLGNGDREEPNNIESVVVGEEKGSVVTANRPDSIARLKRAAATAVSAAAVKARFLGDQEEYQIRRLTALVIEKLFQKIEVKMSLFSEIEQVVFRTREYTEKTRKKLLKERNAIIAARMGALPSRPNQTGVAGNRLPPGLSDS

SEQ ID NO: 228131 - protein, 507 aa, Zea Mays
MEPKPSSAAHADAPAVEAPRRRGGGGKRKSAGSSFTPSKRQAKERNASFHVPPHLLHSGPLTRAARQSPHKLSGTPSESVPASSAAATGDGVSGGQAVVDAIRPETEETPAPELPLVDEMFEAVRSRGAGVHVVPTFAGWFSWKEIHPVEKQTLPSFFNGKSEKRTPEVYLAVRNSIMMKFHANPQLQLESKDLAELSIGETDARQEILEFLDHWGLINFHPFPPDGHEESKPEETQDNSNDEKASLIEQLFKFESVQSYMTPLPMKEDADFDLCCDCYNEGKFDPGMAKTDFILMDSAGVSGASGTSWTDEETLLLLEGLEIFGGKWAEIAEHVATKTKAQCMLHFLQMQIEDRFHDGKDINQNIPVSTDQATTEKAIAETSEKMEVEDKVEGRGTVDEKASEKTEGNCEETKTENASVVVNKDTQNSDGRDSGASPSTEEPKQSSDEQPVVKENSADVDTSGEKLSNVAIDILKSAFEATGHSPEYEGSFADAGNPVMALALFYS

SEQ ID NO: 228132 - protein, 585 aa, Zea Mays
MEPKPSSAAHADAPAVEAPRRRGGGGKRKSAGSSFTPSKRQAKERNASFHVPPHLLHSGPLTRAARQSPHKLSGTPSESVPASSAAATGDGVSGGQAVVDAIRPETEETPAPELPLVDEMFEAVRSRGAGVHVVPTFAGWFSWKEIHPVEKQTLPSFFNGKSEKRTPELESKDLAELSIGETDARQEILEFLDHWGLINFHPFPPDGHEESKPEETQDNSNDEKASLIEQLFKFESVQSYMTPLPMKEDVRAPPPLPSLIPESVLIQDVVAAAEPSVEYHCNSCSVDCSRKRYHCRTQADFDLCCDCYNEGKFDPGMAKTDFILMDSAGVSGASGTSWTDEETLLLLEGLEIFGGKWAEIAEHVATKTKAQCMLHFLQMQIEDRFHDGKDINQNIPVSTDQATTEKAIAETSEKMEVEDKVEGRGTVDEKASEKTEGNCEETKTENASVVVNKDTQNSDGRDSGASPSTEEPKQSSDEQPVVKENSADVDTSGEKLSNVAIDILKSAFEATGHSPEYEGSFADAGNPVMALAAYLAGLVEDDNTTTSFRSSLKSVSDVSPALQLSSRHCFILEDPPDELKDICAS

SEQ ID NO: 228133 - protein, 115 aa, Zea Mays
MSVKTWRSRQCGADTSNDAERVSEQRAVMMAQATFPYYLLKEEAMLNKVLKETVLSKVVAIDKLQSGLASSLRIQDVMRNEIQRVQDELSCITHKAKQLELQVSCVPCIFHIYFP

SEQ ID NO: 228134 - protein, 249 aa, Zea Mays
MSGDGTGGVRQVQQPRQAAATPADASHVGTPDRGVANMGSRPHSGLTHQLRDGTRGRSLRAIYPGALVDVSCGLRLPKAALLQRWGTSLVRPVVDEGDLGDMAGKRKINPECAKLIPVKLAFDRLHASLSSGSADGAPFEPAAVLQGGAPTTSQGPLLSNLFVRPVAAILDSPMLPQLMPAETPVVATAAASIAQNTKHRRLFNLSARAQRYLCRKLGLLANEGTPNFDNAFQDFQAWFQKPLSKEVKL

SEQ ID NO: 228135 - protein, 545 aa, Zea Mays
MLPRTHSHQARRRSGLGPQLCAAAAALLLLLSLAVLHSRLSSSSSSRFPTSASRSRPSTPAADSNSSALLADEEDEDVAAALDPLLTVTTTAAEGDSLANPDDDRIDELDVLDEDAAGANEADSASASTVGAATPLVWDHVTGAARLPFRLPASVESLPAGLPRLDSPRRIAAAAFGSDDELVDLELRVEISSIAGIEDALLLKPASGKAAETRLRAGWARWLEGKADYLRRDRMLRSNLESLNPRNHPLLQDPDSPGLTSLTRGDRMVQRMLLAELDKPASKSFERRRLLSYENKQSMTTTVKEKPQTGRRWGYFPGIDPHLGFSEFMERFFEHGKCSMRVFMVWNSPQWAYDIRHQRGLESLLKQHPDACVVMLSETLELESFHQFVKEGYKVAVAVPNLDELLESTPTHVFASVWYEWRQTKYYHLHYSELVRLAALYKYGGIYLDSDVIILKPLTSLRNSIGATNHVSGNSRFGGAVLAFEKQRCQIGTATSLTGYAAYARARVEFLTWLVLVAALYWRSALGNFIRHMMIPSCSGMGLNL

SEQ ID NO: 228136 - protein, 478 aa, Zea Mays
MCPAAATTSSAKPSKKRKQPVIAPPESDSEEESVYDTASDDDEEEEETQELESEDVDEEVEEGSEGGEENEIGDDSEVEEEEVKEKKEKEETVKEKKEKKDMKQEGKKAKKQEEKKAKKDKKEEEKKVMEDKKEEEKKAKKKSEGSGILSNKLFSELPLSELTAKAIREMNYTHLTQIQARSIPHLLEGNDVMGAAKTGSGKTLAFLIPAIEMLYHTHFSPRNGTGAIVVCPTRELAIQTHNVAKELMKYHSQTLRYVIGGNNRRSEADQLAKGINLLVATPGRLLDHLQNTKSFIYRRLKCLVIDEADRILEQNFEEDMKQIFKRLPQNRQTVLFSATQTPEVEKFAKLSFEKNEESKKKPVYVGVDDDKSKATVEGLQQGYCVISSDKRFLVLYAFLRKKRNKKIMVFFSSSFARQKRASYCALMWLPVDLIFLTWIISCNMTLQMNQRITFTELVVPHVVRKAKEVHCCSYYQKN

SEQ ID NO: 228137 - protein, 97 aa, Zea Mays
MSEISLSSGEGKQLHCTIVLFRSQISSYISHLFTINRTEKPILILTNLYLLLVSVLSLMIPRGQRAPQNELFFYSKEFLDVEHWRLDPCSSISHSGV

SEQ ID NO: 228138 - protein, 164 aa, Zea Mays
MQNNEIKISTAKVPVKVGIQNADEDETSSGDDDDFTDSDSEMSEEDESSDEDEVSSDTDTSDDSGSEEQTPTPKKTEVVVGKKRAIEAETPSGKKAKSEQSAQKTGDKVSTSHPAKQSSKTPADKSTKTPTADKKSPKSGSHACKSCSNASALESHQKAKKHEA

SEQ ID NO: 228139 - protein, 59 aa, Zea Mays
MGSPLGGWPSYNPHNFSQLVPADPSAQPSNVTPATYVATHRTDPPPNQDYCGLNRALEL

SEQ ID NO: 228140 - protein, 69 aa, Zea Mays
MFAVVASVDLYEDFVPWCQRSRIIRCHEDGSFDAELEIGFKFLVESYVSRVEMEKPRLQHLKVDFLIIW

SEQ ID NO: 228141 - protein, 625 aa, Zea Mays
MAAQGQAAAGSASESGGSPAASAAAAAAAAFPATSLYVGDLHESVQDAQLFDVFSQVGGVVSVRVCRDINSRKSLGYAYVNYNNTSDAARALELLNFTPINGKPIRIMYSNRDPSSRKSGAGNIFIKNLDKSIDNKALYDTFCAFGNILSCKIATDPSGESRGYGFVQFEMDESAQSAIDKLNGMLINDKKVYVGPFVRKQDRENVSNNIKFSNVYVKNLSDTVTDDELKEMFGKYGTITSAVVMRDSDGNSRCFGFVNFENADAAAQAVQELNGKIFNDKELYVGRAQKKSEREMELKEKFEKNIQEVAEKFQNTNLYLKNLDDNIDDEKLREIFAEYGNITSCKVMRDSYGVSRGSGFVSFKSAEDANRALTEMNGKMVGSKPLYVALAQRKDDRKAKLQFSQMRPVAMAPSVGPRMPMFPPSVPGVGQQLFYGQPPPAFINPQGQQPQRPAGRRAGSGGMQQPMPMGSQQQIFPRGGRGYRYATGRGMPDPGMHNVGAVMPSPYEMGGMAMRDAGVSQPVPIGALATALANASPDQQRLMLGENLYPLVEQLEREQAAKVTGMLLEMDQTEVLHLLESPDALKAKVAEAMEVLRSAQHLQQSNASTEQQLANLSLNDGVLSS

SEQ ID NO: 228142 - protein, 507 aa, Zea Mays
MAAQGQAAAGSASESGGSPAASAAAAAAAAFPATSLYVGDLHESVQDAQLFDVFSQVGGVVSVRVCRDINSRKSLGYAYVNYNNTSDAARALELLNFTPINGKPIRIMYSNRDPSSRKSGAGNIFIKNLDKSIDNKALYDTFCAFGNILSCKIATDPSGESRGYGFVQFEMDESAQSAIDKLNGMLINDKKVYVGPFVRKQDRENVSNNIKFSNVYVKNLSDTVTDDELKEMFGKYGTITSAVVMRDSDGNSRCFGFVNFENADAAAQAVQELNGKIFNDKELYVGRAQKKSEREMELKEKFEKNIQEVAEKFQNTNLYLKNLDDNIDDEKLREIFAEYGNITSCKVMRDSYGVSRGSGFVSFKSAEDANRALTEMNGKMVGSKPLYVALAQRKDDRKAKLQAQFSQMRPVAMAPSVGPRMPMFPPSVPGVGQQLFYGQPPPAFINPQAGFAFQQPMMPGMRPGGPMPNFMMPMVQQGQQPQRPAGRRAGSGGMQQPMPMGSQQQIP

SEQ ID NO: 228143 - protein, 439 aa, Zea Mays
MGIDWTRVMPKEPIEDLESSVNFAALERYRWIVQRVRDYGMKVMLTLFHHSLPPWAGEYGGWRMEKTVKYFLDFVRLVVDRVSDLVDYWVVFNEPHVFVMLTYCAGAWPGGDPNAIEVATSALPTGVYNQALHWMAIAHAEAYDYIHSKGESKRKPVVGVAHHVSFTRPYGLFDVAAVTLANSLTLFPYIDSICDKLDFIGINYYGQEVISGPGLKLVDNDEYSESGRGVYPDGLFRILIRFNERYKSLNIPFVVTENGVSDETDLIRKPYILEHLLAIYAAILMGVPVLGYLFWTTSDNWEWADGYGPKFGLVAVDRANNIARKPRPSYYLFSKIVTTGKITRHDRLAAWRELQQAAFQKKTRPFFRAVDKHGRMYAGGLDRPIQRSFILRDWRFGHYEMEGLQDPFSRFITSIISTILWKKKISYIEDEDISYSLSC

SEQ ID NO: 228144 - protein, 603 aa, Zea Mays
MPLPAFLAAAARLAVLLAAAVTAANAVSFARYRRRHLRRIPNPIDESADPVADFRALRPASAEDAAEDDSFFFGLATAPAHVEDRLEDAWLQFAVEHSCDDKEAMRDPTTADAVMASAAGDGGAQLASRRSSRGDDDRDGDGELRKPLKIAMEAMLRGFEMFAEGGESGSAAAAGDSCSHNVAAWHNVPCPQERLKFWSDPDTELKLAKETGISVFRMGIDWTRVMPKEPIEDLESSVNFAALERYRWIVQRVRDYGMKVMLTLFHHSLPPWAGEYGGWRMEKTVKYFLDFVRLVVDRVSDLVDYWVVFNEPHVFVMLTYCAGAWPGGDPNAIEVATSALPTGVYNQALHWMAIAHAEAYDYIHSKGESKRKPVVGVAHHVSFTRPYGLFDVAAVTLANSLTLFPYIDSICDKLDFIGINYYGQEVISGPGLKLVDNDEYSESGRGVYPDGLFRILIRFNERYKSLNIPFVVTENGVSDETDLIRKPYILEHLLAIYAAILMGVPVLGYLFWTTSDNWEWADGYGPKFGLVAVDRANNIARKPRPSYYLFSKIVTTGKITRHDRLAAWRELQQAAFQKKTRPFFRAVDKHGRMYADFLESRVM

SEQ ID NO: 228145 - protein, 61 aa, Zea Mays
MVARRPQAGVRRRIGPLVRSSRRCASSCRLRFYMYRIFRFHFAGRGPNEGVTSERPERRCD

SEQ ID NO: 228146 - protein, 844 aa, Zea Mays
MSPPPAVATGGSGEPTVPAWLRGLPRAPEYRPTESEFADPIAFLSRVEREAAAYGICKVIPPYPRPSRRFVFAHLNRSLVSSSEAANPTTASGSSATAPSLPESAAVFTTRHQELGTPRRGRPPPQVLKQVWQSGERYTLDQFEAKSRAFSKIHLAGLREPTPLEVESLFWKASADRPIYIEYANDVPGSGFAAPKQSQRHKKRRRESDQVEEGEKGSGWRLSGSPWNLQAIARAPGSLTRFMPDDVPGVTSPMVYIGMLFSWFAWHVEDHELHSLNFLHTGAPKTWYAVPGDRASELEEVIRVHGYGGNPDRLGICPFSCSPSECFGCGLAGTSSEMASVSIGSNVHDIIQTSDSYEFFADMYCFSFIELIVMCYLLTMFIPALLDFHLHGFNCGEAANFATPQWLKFAKEAAVRRAVMNYLPMLSHQQLLYLLAVSFITRTPNVLSGIRSRLRDRKKEERELLVKQEFLQDMISENKLLCSFLEKKSIRHVVLWEPDLLPSSTALHSCSSGSKAPEKKSEDGCRIESSERGTKDNSSDGSAHMIGAQTKFMSGNSKSSGTASASMDEVNADTDDEDDLPFDLSIDSGSLTCVACGILGYPFMAILQPSREVLEGISLAHTSRYKMSSEKDNCSNTIPCCPTDSKFGCSFVPSRPSWPAEQQCLATPLGQANISHQNVNSHKDVCLRENEPNGPVPQCNNISHSCRSENTLHSCSDRGKSENKISEDSLGPEVGEQTGKYVINAQAAESSDGTINWNTYCTFARPRIFCLQHALEIEKLLEGKGGVHGLIICHSGRWKRLDVTDGSKPEIFCQTQEREIRKSRTVSFAIWGTAFLPFACFGCS

SEQ ID NO: 228147 - protein, 281 aa, Zea Mays
MKKQNHARHVAVAGGPSPQPGTPPARASRPSTASERRSPPDAARLLVTPFRFAFLPLSPFIPIGARPPSRTNPLAPAFPGASLRFARDSIQASLVGGMASSPASSYDCSFKVLLIGDSAVGKSSLLVSFVSAAHIDDDIAPTIGVDFKINFLSVGGKKLKLTIWDTAGQERFRTITSSYYRGAHGIILVYDVTKRESFTNLADVWTKEIELHSTNKECIKMLVGNKVDKDEDRMVTKEEGLAFAQERGCLFVESSAKTRENVEKCFEELALKAKCKCLLLV

SEQ ID NO: 228148 - protein, 556 aa, Zea Mays
MRIRRYAARLLSATTAAPSSPPRPPAASWLHTDDDDDCCAFCELSRPAPQEGQDAVKHKGHIAGRVPESDVRADERVGLHQRPPAPEVKKCKIDHVPPVDKSSVGLQVVKCASEVSGAVAKPEGGTPASEAAAGPAAKAGAFVVNDAASEQGVQCIASPLGGASKLEEVTAGNSFANGPTTELGVFKGASLANELADVPGVTSIMPEVIGKPSTDPGAITTVVEVSDIGSVVHETTELESAGEDYIASEAAAEPEDAGRASCNTDDTAALDEPLPPSCDPNIGNAQVGNAMDTVASTVRPSRCDAAEEGASVNSTANGPVRARGPTVKGGVPKDKSVAPSVLRVLDVVTRSIGKSGRTDVICYARRTGKRKPELQEVKTENIDLEDGVLCEKEEALLRTDCCESVLSTAGSIDVKLADIKKDLMDNSAASKVTKMKRNIFECKIDYCHMTFKTKAELAAHKKNMCTVNSCSKHFRSHSYLRRHESAHNDDMPYKCPWDGCNMAFKWSWDRAEHFKVHAGAKPYKCMTPGCSKMFKFVSDFTRHRRRCKPQRCRLAL

SEQ ID NO: 228149 - protein, 81 aa, Zea Mays
MLFRKCYESCHAVELRDNCQTITSPVVLKTKSGSIESKNPKVFDSWEWIEREYVLVPENCTSMEMSSLNIKSTKDDMDTRT

SEQ ID NO: 228150 - protein, 914 aa, Zea Mays
METLSSTEPHYIRCVKPNNLLKPAIFENTNVIQQLRCGGVLEAIRISCAGYPTRKTFYEFVNRFGVLAPEVLEGSNDDKIACQKILEKMGLENYQIGKTKVFLRAGQMADLDARRAEVLGRAARIIQRQIRTYIARKQFAELKRSATQLQSFVRGTLARKLYECMRQEAAAVKIQKNMRRHKARESYLQLQAAAITLQTGLRAMSARKEFRFRKETKAAVHIQAQWRRHRDYSHYKNLQGAALTYQCAWRQRLARRELRKLKMAARETGALKEAKDKLEKRVEELTWRLGLEKRLRTDLEEAKAQEIAKLQETLHDMQLQVEESKAMVVKEREAARKAIEEAPPVIKETPVLVEDTEKINSLTTEVEQLKALLLTERQATEAAKREHAESELRNEELIKKFESAEKKIEQLQETVHRLEEKATNMESENKVLRQQAVAISPTSKSLAAYPKSPFQLKTPENGNALNGEVKSSPDITPILPNPKELEAEEKPQKSLNEKQQENQDLLIKCVSQDLGFSSGKPIAACLIYRCLLHWRSFEVERTGVFDRIIQTIGSAIESQDNNDKLAYWLSNSSTLLLLLQRTLKTTGAAGFTPQRRRSSAASFGRVFSGMRASPQSAGRAFMGSRLIGGLGDLRQVEAKYPALLFKQQLTAFLEKIYGMIRDNLKKEISPLLGLCIQAPRTSRASLIKGSRSQANALAQQTLIAHWQSIVKILTNYLNVLKANYVPSVLISKVFTQIFSFINVQLFNSLLLRRECCSFSNGEYVKAGLAELEQWCIYATEEYAGSSWEELKHIRQAVGFLVIHQKPKKTLKEITNDLCPVLSIQQLYRISTMYWDDKYGTHTVSSDVISSMRVMMTEDSNNAVSSSFLLDDDSSIPFSVDDISKSMTEIEVTDVDMPPLIRENSGFTFLHQRKD

SEQ ID NO: 228151 - protein, 1307 aa, Zea Mays
MFDWISDPSDLPHATVSTNEDYGEKHISPATVSEKELTPSVAGSVYKSTLTEHGAEPSSAQTGSNQQESINVKNSSSASKEQETTDNSLFISSNKKPLDTKQVNVTGPPAALRSLALTGNTKPTIFSSFSTEGMNPTGGNAPNELASSLQPSSRSFGNNQTGKEGLDSVQSVGIFGGSQNSNKDGNVYGFKSSLFTSSGSVPAKIGERNEVGFGVPSLQTSYTADRKVFGAPVALSSVPSSSISPAKPSPIGYSSSGFRTANSEAPQSLRGSPPSQQSMGKSHNSRTQAPAEYSRNSKKGTGFDSEQDLSKKFYSINEMTKELDALLAYIEKDGGFRDACITIQQRPLSMFEDGLQNFLQLLQVFKGKVEEQCSKIEDLRNNMFQVSARQTYMKGIVSQSSDNQYWDIWNRQKLSPEFEVKRQNILRANQDLTNQLVELERHFNNLEMNRSSETGRVASNRRAVYSNKTSSSQTQLSSVYSALNSQLAAAEQLSECLSKQISVLNIGSPSRKQGMVTKKLFESIGLAHTTDATKFSGSTPKPVKRFPSVNEHSKGILGSSKGGEPETARRRRESLDMSLASLEPQKTTVKRITQQQRLKISSDLPFRSNKKIFDSQMAAISQEKSSDSSNSSIVESYVSRLRSLSEDVNDKLSGPQQNPLFKWVKESTGSSQTSEQKHFELPGQMKSTAQSSKLTPSSPPSFSYTRMGAQDSINPSSVPSFGTKHTVSKPNTLTFKTTISPKSNANTEPNILPSITAPKTSLSPLSVKTAGESGDLPTLTMKNRQDGQSMPSLGNIKGPGASLQNKGGIFRDLDKSSFNSEHSKPAALHEKTDQLSGVGDAVQNTVKDTSKMAPQPSAFLPAPVTQTNSYSLRPTVSSSATSGAKTSDVLSSSMQKVSPIVPGGTVSSSVPTPAKDSSTGLSQNASKPETLISKVTSTIVSASSTSVISVTESKPSVPPTTGASLPSTHVSAPQTAPTTSESVFTSTGKNVGPNTDTISTDEDDMEEEAPSASAELNLGALGGFGLGSQPSSSPQKSNPFGASFGTSGNKSSGTPFTLTTSPGQLFRPASLSIPSAQPAQPSQSTSSSSFSNSFSSGLTGFGQPAQIGSGQQSAFGKPAQIGAGQHAGFGQTAQIQSGFGQPAQIQSGFGQSAQIGTGQQSGFGKPAQIGAVQSGFGQPAQFAAQQTLGSVLGSFGQPPQLGGIGSGGFGGFSSASTSAGFSSLSSGGGFAAAATGGGFAALASKSGGFVGAASSGGGFGGASQGGGFGSGGGGFGSFGGNQGAGFSAFGASGAGRPAADFLTQMRK

SEQ ID NO: 228152 - protein, 556 aa, Zea Mays
MLGEAIDRTLLSHLLKMLTALGMYSESFEKPFLECTSEFYATEGVRYMQQSDIPDYLKHVESRLQEEHERCILYLEANTRKPLIATTEKQLLERHTSAIIEKGFTMLMDANRINDLSRMYNLFQRVNAVELLKLALSSYIRATGQGIIMDEEKDRELVPFLLDFKASLDKILEESFAKNEAFSNTIKDSFEHLINLRQNRPAELIAKFLDEKLRAGNKGTSEEELEGILDKVLVLFRFIQGKDVFEAFYKKDLAKRLLLGKSASIDAEKSMITKLKTECGSQFTNKLEGMFKDIELSKEINDSFRQSSQARTKLPSGIEMSVHVLTTGYWPTYPPMDVKLPHELNVYQDIFKEFYLSKYSGRRLMWQNSLGHCVLKADFPKGKKELAVSLFQSVVLMLFNDAQKLSFIDIKDSTGIEDKELRRTLQSLACGKVRVLQKIPKGRDVEDKDEFVFNEDFSAPLYRIKVNAIQMKETVEENTSTTERVFQDRQYQVDAAIVRIMKTRKVLSHTLLITELYQQLKFPVKPADIKKRIESLIDREYLERDRSNPQIYNYLA

SEQ ID NO: 228153 - protein, 141 aa, Zea Mays
MAIRHMDIRQNLGGIRGTSLFPHSIRSTTTKGRAARASDPGHSVSNGDRYFTDNGSSNGHISGDSSGALSHNGGSSIGSPDRETFATKDVLCELDIYANSRYEAMVLKEDTKNMSWLHSVDDKSDQSPVFDHRCKFLTRNR

SEQ ID NO: 228154 - protein, 98 aa, Zea Mays
MPANTDCSEDLFQSHEEMLENAEFWSKSNYSPVEHLECHMEVNMELNEGEQMIDHTEASRYELFSNDLQSKSRTSNLDNEHFPRDASNHANVEATGPP

SEQ ID NO: 228155 - protein, 329 aa, Zea Mays
MLYRKEGKQRKIAKYYKKQENLLKDFSEMETMNEMGGLDQNAPTEEEQKQLAKSERFAINLSNAVNLVLFVTKVVASVESASMAVIASTLDSLLDLLSGFILWFTAYKMKKPNKYNYPIGKRRMQPVGIIVFASVMGTLGFQVLIESGRQLITQHVLCCGREFFLMLYCRTFKNEIVRAYAQDHFFDVITNSVGLVSALLAVRFKWWMDPVGAILIALYTITTWARTVLENVGTLIGKSAPAEYLTKLTYLIWNHHEEIQHIDTVRAYTFGTHYFVEVDIVLSGDMPLSQAHDIGESLQEKLEQLTEVERAFVHVDFEFTHRPEHKAEV

SEQ ID NO: 228156 - protein, 358 aa, Zea Mays
MSPAAATTTFVAISIAVPNPTAPSRGRVRLPLGGVPAAPRRAVASMAVSAPRSGAATSFLERRESERALHFVKYQGLGNDFIMVDNRDSSVPKVTPEEAAKLCDRNFGIGADGVIFVMPGVNGADYTMRIFNSDGSEPEMCGNGVRCFARFIAEIENLQGTNRFTIHTGAGKIVPEIQSDGQVKVDMGEPILSGLDIPTKLLATKNKAVVQAELAVEGLTWHVTCVSMGNPHCVTFGANELKVLQVDDLKLSEIGPKFEHHEMFPARTNTEFVQVLSRSHLKMRVWERGAGATLACGTGACAVVVAAVLEGRAERKCVVDLPGGPLEIEWREDDNHVYMTGPAEVRGGGLGGQVIWWV

SEQ ID NO: 228157 - protein, 248 aa, Zea Mays
MPTLHANMAEMPSAAMAKARSLLRRTDRGSSSIPTRKRKKRRPGCEEEQQRHEARKTRGRSGTGEEVKPGATVSCIVCDGLVIHLSQAALGEPKKASENVIVSVKINDKKLVLGTLSVEKHPQISCDLFFDKEFSAAKFPVKDVIQNADETSGDDDDFTDSESEMSLEDDSSSEEQTPSPNKTDVVVGKKRAIEAEAPSGKKAKSEQSAQKTAQLGSHACKSCNKSFGQCVSTQVSSRDENGRRRRRS

SEQ ID NO: 228158 - protein, 315 aa, Zea Mays
MMLFQYLVNTLEADFVPRQIATKESLDWVIFRESLLSMLLGSRKLVFKSFVKNCMCILLNQYYHEAKDDYEDIIPSERETESTSYHNFSLNYLSFELKKTLISLRKLFVMVMKLDLTRKEADTLGLTSRADRFRNSIMDIILDELTYNSSYLSPFLLAFVERKWKLEIILQYFSKYCGKGAVRTRRSDNSQEDLKLENVLNFFVTATSAKAIVRKMSAEIAQLLLTHAYQACLSAEDANSNSADTPEKVGATLQEISSNFIAAFQNIRKVSPDIQISPFEKEALFTAATLVRKLKSKESMLMTPSYVWRMTLRKP

SEQ ID NO: 228159 - protein, 306 aa, Zea Mays
MGKSSKKAAAVAAAPAAVPKGKKREAEDEIEMAVSAKKQKAAPPAKAVPTSKKDAKEDAKSKKQPPPKKAENSSSDSEEDPESEEENFYNLIESGRADGDEEFDEDEEDGFEFGDADEAMQCVVMAESSTTAAALRAHTQDYEALAAHKRKALAEEQPQREEGPKRPRPDQLSEAEAATMFDQLMEGFGLRRKRRSKDGKRRGRKKGTKNKGSAEVIKKLGDATLLFAEEKFNEAIPILHEIVRIAPNLSDSYYLLGSIYSEIGELDKAINFLMLAAYVSPKDASLWKKLIPLANMIHLPSVACPG

SEQ ID NO: 228160 - protein, 245 aa, Zea Mays
MGKSSKKAAAVAAAPAAVPKGKKREAEDEIEMAVSAKKQKAAPPAKAVPTSKKDAKEDAKSKKQPPPKKAENSSSDSEEDPESEEENFYNLIESGRADGDEEFDEDEEDGFEFGDADEAMQCVVMAESSTTAAALRAHTQDYEALAAHKRKALAEEQPQREEGPKRPRPDQLSEAEAATMFDQLMEGFGLRRKRRSKDGKRRGRKKGTKNKGSAEVIKKLGDATLLFAEEKFNELCTMVTWKVDD

SEQ ID NO: 228161 - protein, 757 aa, Zea Mays
MEQPQCNAPLQAVGQEKPRERRKRRYRRCVAEQLRESFAVDADYEYISKDHKPDCQNGSSRSTKVSSPDVITKPDHDESAEVVDSKSEEAQITDSEQATYASANNDLKGTKAYQEADVSGLYNLAMAIIDYRGHRVVAQHLFVYYYAKLSQMSIIPGILQGDKSDSLLYGSVDNGKKISWNETFHSKVVEAAKRLHLKEHVVLDGSGNPVKLAATVECKGIVGSDDRHYILDLMRVTPRDSNYIGQGHRFCVLRPELIASFVEAESMKQSLKQKVPDAPVASTSDAKATSVEADDKSEESSVHTHKENDNSSSEILFNPNVFTEYKLDGSPEEIAADEELVKRAGTYLIDIVIPKIVQDLCSLDISPMDGQTLTDALHLHGINIRYLGKIAGMVKHLPHLQDLFSAEIIVRSAKHVIKDILRQSLDHDIGPAIAHFLNCFMGKVLGASTEGSLSDMQSKTLKGHENSQTQKSTKGHKLSNAAASRKSLSAYSHLTSDGIWFSIKEFAKSKYQFEVPDDARLSAKRVAVLRNLCQKVGITIAARKYDLDASTPFEASDILNLQPVVKHSVPTCTEAKNLMEAGKVRMAEGTLNEAYALFSEAFSLLQQITGPMHKDAANCCRYLAMVLYHAGDTAGAVVQQHRELIINERCLGLDHPDTAHRHDASNMNTALRYLQEALMKNERLLGPVHVQTAVCYHALAIAFSCMSLYKLSIQHEKKTYDILVKQLGENDSRTEDSKNWLNTFKLREEQLFYRQSA

SEQ ID NO: 228162 - protein, 470 aa, Zea Mays
MEQPQCNAPLQAVGQEKPRERRKRRYRRCVAEQLRESFAVDADYEYISKDHKPDCQNGSSRSTKVSSPDVITKPDHDESAEVVDSKSEEAQITDSEQATYASANNDLKGTKAYQEADVSGLYNLAMAIIDYRGHRVVAQHLFVYYYAKLSQMSIIPGILQGDKSDSLLYGSVDNGKKISWNETFHSKVVEAAKRLHLKEHVVLDGSGNPVKLAATVECKGIVGSDDRHYILDLMRVTPRDSNYIGQGHRFCVLRPELIASFVEAESMKQSLKQKVPDAPVASTSDAKATSVEADDKSEESSVHTHKENDNSSSEILFNPNVFTEYKLDGSPEEIAADEELVKRAGTYLIDIVIPKIVQDLCSLDISPMDGQTLTDALHLHGINIRYLGKIAGMVKHLPHLQDLFSAEIIVRSAKHVIKDILRQSLDHDIGPAIAHFLNCFMGKVLGASTEGSLSDMQSKTLKFHFFILIF

SEQ ID NO: 228163 - protein, 274 aa, Zea Mays
MCPNTSCGNVNFAFRGVCNRCGAARPAGAGGTGGGGGGRGRGRGNSDARGSSRAGAGAATGGGPPGLFGPNDWPCPMCGNINWAKRTKCNICNTSKPGTNEGGVRGGRGGGYKELDEEELEEVKKRRKEAEEDDGEIYDEFGNLKKKFRSKALHTGSAQTLPGSGRAGWEVEHRGSSEREGRERSRDRGRDDYDEKETRSIDRGDHGRDQRRSQDREREKGRERRDHEYERSRERDRRHRWYENFAWTRLALQPSDFLCCHIQARAATKQALRK

SEQ ID NO: 228164 - protein, 410 aa, Zea Mays
MAGYMSRGPQNGSVYVCNLPPGTDENMLAEYFGTIGLLKKDKRNGRPKIWIYRDKVSNEPKGDATVTYEDPHAASAAVEWFNNKDFHGSTIQVHIAESKSKDAFDNPTNLNTIAGVSEQDEVDNGAGRGRGRGDGPGKAWQQDGDWMCPNTSCGNVNFAFRGVCNRCGAARPAGAGGTGGGGGGRGRGRGNSDARGSSRAGAGAATGGGPPGLFGPNDWPCPMCGNINWAKRTKCNICNTSKPGTNEGETGSKEVQCHFGPLPIVVCIAIFLHFRGGRGGGYKELDEEELEEVKKRRKEAEEDDGEIYDEFGNLKKKFRSKALHTGSAQTLPGSGRAGWEVEHRGSSEREGRERSRDRGRDDYDEKETRSIDRGDHGRDQRRSQDREREKGRERRDHEYERSRERDRRHR

SEQ ID NO: 228165 - protein, 87 aa, Zea Mays
MPPTHSKSCRRRETYTPTMTAGLLNLGATPRRQAEGAAHHSPLPPCNSGILPSLPCNNGIKGFCNSDMDDQFPGEAVFSNNDIKVIL

SEQ ID NO: 228166 - protein, 403 aa, Zea Mays
MAALKIEVAGYDIDDKNLKSTARKKVLAGSEPSAVDATVVVVNLRLTWYRFTPTVILKGNFHSRSVSSPHAGVAHSSPAGAGAGSESWAASADEAGVSATVADGARAGASAADGARDGGGSGQGRPRRTGPGTGAGTGMRGRGDRFRGRRGRLVAGGSNGRDRCERDGLRKNNELEDQLRKSAQSKVPSDPNIWLQMRDNFEKIILIDHDLSEQRDVEYLLWQLHYKRIEDFRRNISAASSLASQSGKSNTNPDRVKRIKSAFKSFLSEATGFYHDLMLKIKSNWGLPLNYFPDSLDNANNSVRDDMKTVQLKKDLARYKSLNGDGDSASREYTAASSYYKEAASIYPSSGNPHHQLAILASYSGNEVVAVYRYFRSLAADTPFATARDNLIILFEKTCAIKL

SEQ ID NO: 228167 - protein, 860 aa, Zea Mays
MVTAKEAAAAAAAMDASKYVRYTPEQVEALERLYYECPKPSSLRRQQLVRDCPVLASVDPKQIKVWFQNRRCREKQRKESSRLQAVNRKLTAMNKLLMEENDRLQKQVSQLVYENGYYRQQTQSVRAGLATTDTSCESVVTSGPQNVAAVLPQAQPRDAGPAGLMSIAEETLTEFLSKATGTAVEWVQMPGMKPGPDSIGIIAISHGCPGVAARACGLVGMEPAKVAEVLKDRPLWLRDCRSMEVVNVLPAGTSGTVELLYMQLYAPTTLAPARDFWLLRYTSILDDGSLVVCERSLGANQGGPSMPLVQPFVRGEMLPSGFLVRPSDGGGSVIHIVDHMDLEPWSVPEVVRPLYESSAMVAQKMSMAALRYLRQVAHEDTAHSVVTGGWGRQPASLRALSQKLTRGFNEALNGLADDGWSVVGSDGVDDVCVSVSSSPSRVVSCNATFSNGPVVGTGSSSVLCAKASMLLQDVSPPELLRFMREQRSQWADSNLDAFFASAMKPDFCSLPIPPRLGGFGGQVILPLAHTFDPEEFLEVIKVGNAGNYQDALLHRDLFLLQMYNGVDENMAGTCSELIFAPIDASFSDDSPLLPSGFRIIPIDAPLDTSSPKCTLDLASTLEAGTPRSRTSGSGGPGTAAAACAGSKAVMTIVFQFAFESHLQDSVAAMARQYVRSIVASVQRIALALSSARLVVPHGSGVSHGAPAAGPEAATLARWICQSYRFHFGAELIKSADGSGCGEAVLKTLWHHAGAILCCSLKALPVFTFANQSGLDMLETTLVALQDIALERVFDDQGRKNLCAELPGVMEQGFACVPGGMCVSGLGRPVSYEKALAWKVLDDGSGGVHCVCFMFVNWSFV

SEQ ID NO: 228168 - protein, 98 aa, Zea Mays
MAAVEVQVPTAAPVEEAAQLAETETETKEAEAVAEPTEAEPKEAEPEIAAETKEVAAVEANEEEEEAAPAVAATPEVAATEEEAAAPAPEAAVEKSVE

SEQ ID NO: 228169 - protein, 151 aa, Zea Mays
MAAVEVQVPTAAPVEEAAQLAAASAVETPNEETAAPAVETEVVVAKEPEPVEAETETETKEAEAVAEPTEAEPKEAEPEAAAPAAETEAAAAPVEAAEPEIAAETKEVAAVEANEEEEEAAPAVAATPEVAATEEEAAAPAPEAAVEKSVE

SEQ ID NO: 228170 - protein, 153 aa, Zea Mays
MAAVEVQVPTAAPVEEAAQLAAASAVETPNEETAAPAVETEVVVAKEPEPVEAETETETKEAEAEPKEAEPEAAAPEAETEAAAPAAETEAAAAPVEAAEPEIAAETKEVAAVEANEEEEEAAPAVAATPEVAATEEEAAAPAPEAAVEKSVE

SEQ ID NO: 228171 - protein, 111 aa, Zea Mays
MDYTFSSEQRVRLGWGAEAASSGHNRYKGETNAAEVVPPASSHPPATPRSAPLPRVTSDAAPSAGALTSDAARGYERRRRLVRYSRVHSNGESPERRGTQAVATWKDGVVI

SEQ ID NO: 228172 - protein, 106 aa, Zea Mays
MDYTFSSEQRVRLGWGAEAASSGHNRYKGETNAAEVVPPASSHPPATPRSAPLPRVTSDAAPSAGALTSDAARGYERRRRLVRYSRVHSNGESPERRGTQGSVDMA

SEQ ID NO: 228173 - protein, 154 aa, Zea Mays
MGAGGEEAPRIIVPMAVEGTPNQLAFVEESKLQKRKENVDWAVRNRERRAAKRQRIRDEHKVAVRRPEEFVTAFRNKERDFLRMRTRIKLRGLAPAHQEGFEETTTDEGPHWGVPQGHRVDAEEAACGRTLCHIRVSELKECERAYLQEGPRVL

SEQ ID NO: 228174 - protein, 59 aa, Zea Mays
MLGRPCVRDRHCRPALPRSIEVPHALPAQVSGEEAADEEETVQGWWRLRQPGRQSQRTN

SEQ ID NO: 228175 - protein, 659 aa, Zea Mays
MNHWMRIILGKIPTQDGSRSAYTFISGRWITKRNISNSNNHRGLSNGQRGEVYEVNGDQVAVIFDPSIEKSHNAHEDVTNKEENGSATVYWVDSQDIAHDHDTESDDWHIALEALCEVLPSLQPIIVYFPDSSQWLSRAVSKSDRREFVQRVEKMFDRLTGPVVLICGQNLLAAAPKDKEQPALMFHNLSRLSSLPSPLKRLVGGLKGERYSRSSDISKLFTNSLTVPLPEEDEQLQLFNNQIEEDRKIMISRHNLVKLHKVLEEHDLSCVELLDVKLDGIVLTKQKAEKAVGWARNHYLSSTTLPSIKGDRLIIPRESLDISIERLKEQGITAKKSSQNLKVLAKDEYERNFISAVVPPNEIGVKFDDIGALEDVKRTLDELVTLPMRRPELFSRGNLLRPCKGVLLFGPPGTGKTLLAKALATEAGANFISITGSTLTSKWFGDAEKLTKALFSFATRLAPVIIFVDEVDSLLGARGGAFEHEATRRMRNEFMAAWDGLRSKENQRILILGATNRPFDLDDAVIRRLPRRIYVDLPDAQNRMKILKILLAKEKLESDFKFDELANATEGYSGSDLKNLCVAAAYRPVHELLEEEKKGRVSNENSYLRPLCLDDFIQAKAKVSSSVSYDATSMNELRKWNEQYGEGGSRTKSPFGFGN

SEQ ID NO: 228176 - protein, 1001 aa, Zea Mays
MYHAMRLRCLLLHPPMWSNSSSLGISASGVSRGSFVRRFSALGAPRPPGPARRLCRFYGSKGGVGSAEARGAAASPAAAGSSGRCFEQEHARLGERDQQEWLSGERFLTGCKRRESTFLTRRERFRREFLRRVVPWEKGSLSWQNFPYYVNDNARQLLSECVASHLRHKSVTSEYGSRLESSGGRILLQSSPGTELYRERFVRALAHELQVPLLVLDSSVLAPYDYGEDYSESEEEDEHAESEDEGSESEMEDDGDEDWTSNNGKSGESDDEDALKSVEDLKKSVDDLKKLVPCTIEEFAKRIAGAEESTASESSETPESPEEEKRPFQRGDRVKYVGTSAVVEADQRIILGKIPTQDGSRSAYTFISGRWITKRNISNSNNHRGLSNGQRGEVYEVNGDQVAVIFDPSIEKSHNAHEDVTNKEENGSATVYWVDSQDIAHDHDTESDDWHIALEALCEVLPSLQPIIVYFPDSSQWLSRAVSKSDRREFVQRVEKMFDRLTGPVVLICGQNLLAAAPKDKEQPALMFHNLSRLSSLPSPLKRLVGGLKGERYSRSSDISKLFTNSLTVPLPEEDEQLQLFNNQIEEDRKIMISRHNLVKLHKVLEEHDLSCVELLDVKLDGIVLTKQKAEKAVGWARNHYLSSTTLPSIKGDRLIIPRESLDISIERLKEQGITAKKSSQNLKVLAKDEYERNFISAVVPPNEIGVKFDDIGALEDVKRTLDELVTLPMRRPELFSRGNLLRPCKGVLLFGPPGTGKTLLAKALATEAGANFISITGSTLTSKWFGDAEKLTKALFSFATRLAPVIIFVDEVDSLLGARGGAFEHEATRRMRNEFMAAWDGLRSKENQRILILGATNRPFDLDDAVIRRLPRRIYVDLPDAQNRMKILKILLAKEKLESDFKFDELANATEGYSGSDLKNLCVAAAYRPVHELLEEEKKGRVSNENSYLRPLCLDDFIQAKAKVSSSVSYDATSMNELRKWNEQYGEGGSRTKSPFGFGN

SEQ ID NO: 228177 - protein, 1001 aa, Zea Mays; identical to SEQ ID NO: 228176

SEQ ID NO: 228178 - protein, 1190 aa, Zea Mays
MDYVAYTYTSSCSAKIDARDASSAPSKPEGIPRRGDLLRDLGVGGQGQLGGKWASLGTTIFLGKIEIPWEIGVPKLALKEPKEIHTSRRLKWSWAVMQIPDPIHGLGMSKQFFSGDARKKRPLIMTANSIKADSPLGIRHGLLVLVSNWGPTPQPSAGVARREKRITRNLERSGGALASPSSPSPAGVRHHLRRAARHPEPPEMYHAMRLRCLLLHPPMWSNSSSLGISASGVSRGSFVRRFSALGAPRPPGPARRLCRFYGSKGGVGSAEARGAAASPAAAGSSGRCFEQEHARLGERDQQEWLSGERFLTGCKRRESTFLTRRERFRREFLRRVVPWEKGSLSWQNFPYYVNDNARQLLSECVASHLRHKSVTSEYGSRLESSGGRILLQSSPGTELYRERFVRALAHELQVPLLVLDSSVLAPYDYGEDYSESEEEDEHAESEDEGSESEMEDDGDEDWTSNNGKSGESDDEDALKSVEDLKKSVDDLKKLVPCTIEEFAKRIAGAEESTASESSETPESPEEEKRPFQRGDRVKYVGTSAVVEADQRIILGKIPTQDGSRSAYTFISGRGLSNGQRGEVYEVNGDQVAVIFDPSIEKSHNAHEDVTNKEENGSATVYWVDSQDIAHDHDTESDDWHIALEALCEVLPSLQPIIVYFPDSSQWLSRAVSKSDRREFVQRVEKMFDRLTGPVVLICGQNLLAAAPKDKEQPALMFHNLSRLSSLPSPLKRLVGGLKGERYSRSSDISKLFTNSLTVPLPEEDEQLQLFNNQIEEDRKIMISRHNLVKLHKVLEEHDLSCVELLDVKLDGIVLTKQKAEKAVGWARNHYLSSTTLPSIKGDRLIIPRESLDISIERLKEQGITAKKSSQNLKVLAKDEYERNFISAVVPPNEIGVKFDDIGALEDVKRTLDELVTLPMRRPELFSRGNLLRPCKGVLLFGPPGTGKTLLAKALATEAGANFISITGSTLTSKWFGDAEKLTKALFSFATRLAPVIIFVDEVDSLLGARGGAFEHEATRRMRNEFMAAWDGLRSKENQRILILGATNRPFDLDDAVIRRLPRRIYVDLPDAQNRMKILKILLAKEKLESDFKFDELANATEGYSGSDLKNLCVAAAYRPVHELLEEEKKGRVSNENSYLRPLCLDDFIQAKAKVSSSVSYDATSMNELRKWNEQYGEGGSRTKSPFGFGN

SEQ ID NO: 228179 - protein, 1127 aa, Zea Mays
MDYVAYTYTSSCSAKIDARDASSAPSKPEGIPRRGDLLRDLGVGGQGQLGGKWASLGTTIFLGKIEIPWEIGVPKLALKEPKEIHTSRRLKWSWAVMQIPDPIHGLGMSKQFFSGDARKKRPLIMTANSIKADSPLEPPEMYHAMRLRCLLLHPPMWSNSSSLGISASGVSRGSFVRRFSALGAPRPPGPARRLCRFYGSKGGVGSAEARGAAASPAAAGSSGRCFEQEHARLGERDQQEWLSGERFLTGCKRRESTFLTRRERFRREFLRRVVPWEKGSLSWQNFPYYVNDNARQLLSECVASHLRHKSVTSEYGSRLESSGGRILLQSSPGTELYRERFVRALAHELQVPLLVLDSSVLAPYDYGEDYSESEEEDEHAESEDEGSESEMEDDGDEDWTSNNGKSGESDDEDALKSVEDLKKSVDDLKKLVPCTIEEFAKRIAGAEESTASESSETPESPEEEKRPFQRGDRVKYVGTSAVVEADQRIILGKIPTQDGSRSAYTFISGRGLSNGQRGEVYEVNGDQVAVIFDPSIEKSHNAHEDVTNKEENGSATVYWVDSQDIAHDHDTESDDWHIALEALCEVLPSLQPIIVYFPDSSQWLSRAVSKSDRREFVQRVEKMFDRLTGPVVLICGQNLLAAAPKDKEQPALMFHNLSRLSSLPSPLKRLVGGLKGERYSRSSDISKLFTNSLTVPLPEEDEQLQLFNNQIEEDRKIMISRHNLVKLHKVLEEHDLSCVELLDVKLDGIVLTKQKAEKAVGWARNHYLSSTTLPSIKGDRLIIPRESLDISIERLKEQGITAKKSSQNLKVLAKDEYERNFISAVVPPNEIGVKFDDIGALEDVKRTLDELVTLPMRRPELFSRGNLLRPCKGVLLFGPPGTGKTLLAKALATEAGANFISITGSTLTSKWFGDAEKLTKALFSFATRLAPVIIFVDEVDSLLGARGGAFEHEATRRMRNEFMAAWDGLRSKENQRILILGATNRPFDLDDAVIRRLPRRIYVDLPDAQNRMKILKILLAKEKLESDFKFDELANATEGYSGSDLKNLCVAAAYRPVHELLEEEKKGRVSNENSYLRPLCLDDFIQAKAKVSSSVSYDATSMNELRKWNEQYGEGGSRTKSPFGFGN

SEQ ID NO: 228180 - protein, 138 aa, Zea Mays
MYPKHSNFRSRRLSARELNMLKRKAKSNAKDHTKAVSEDDEVTLKGSVPSNGASSEQVGPQNGVFDTAVEEDNLEYNENGRWPFQQFVDQLIHDMFDPTHPSKGVSTCKSQKKLNSISHLSSHILAPECRRMNKKRTG

SEQ ID NO: 228181 - protein, 1244 aa, Zea Mays
MREPIRTFQWHEFFPHGTNNIGVVISLWAPIILVYFMDTQIWYALFSTLIGGIYGAYRRLGEIRTLGMLRSRFESLPEAFNERLIPSDANKSKGLRAAFSSRPKASGDESEREKRAARFAQMWNAIITSFREEDLIDNREKDLLLVPDCKDRELDIFQWPPFLLASKIPIALDMAADSGGKDRDLTKRIKSDPYFSFAIRECYASFKNIINTLVFGQREKDVLVQIFTVVDKHIEEETLITGLNMKNLPALSKKFVELLELLQKNKEEDLGQVVILFQDMLEVVTRDIMEEQDLLETLDSLHGANSRKHEGITPLDQQDQLFAKAIKFPVVESNAWTEKIKRLHLLLTVKESAMDVPINLDARRRISFFANSLFMDMPNAPKVRNMLPFSILTPYYKEDVLFSLQNLEERNEDGVSILFYLQKIYPDEWKNFLERVGCKNEEVLREDEQLEEKLCLWVSYRGQTLTRTVRGMMYYRKALELQAFLDMANNDDLMKGYRAMEVMSEDSPLKTQCKAIADMKFTYVVSCQLYGIQKRSNEPCAHDILRLMTEYPSLRVAYIDEVEAPSKDRIKKIEKVYYSVLVKASVTKPNEPGQSLDQVIYKIKLPGNAILGEGKPENQNHAIIFTRGECLQTIDMNQALKMRNLLQEFEKKHGVRHPSILGVREHIFTGSVSSLAWFMSNQETSFVTIGQRVLANPLRVRFHYGHPDVFDRLFHVTRGGVSKASKIINLSEDIFAGFNSTLREGNVTHHEYMQVGKGRDVGLNQISLFEAKIANGNGEQTLSRDIYRLGHRFDFFRMLSCYYTTIGFYFSTMITVWTVYVFLYGRLYLVLSGLDEALATGKRFVHNTPLQVALASESFVQLGFLMALPMMMEIGLERGFRTALSDFILMQLQLASVFFTFSLGTKTHYYGRTLLHGGAEYRATGRGFVVFHAKFAENYRLYSRSHFVKGLELMILLVVYEIFGQSYRGAITYIFITVSMWFMVGTWLFAPFLFNPSGFEWQKIVDDWTDWHKWISNRGGIGVAPEKSWESWWEKEQEPLRYSGKRGTIVEILLALRFFIYQYGLVYHLNITKKITKDNQSVLVYCFSWVVIFVVLLVMKTVSVGRRRFSAEFQLVFRLIKGLIFITFTAIVVILIAIPGMTVLDIFVCILAFMPTGWGLLLIAQAIRPVIQKIGLWGSIKALARGYEILMGLLLFTPIAFLAWFPFVSEFQTRMLFNQAFSRGLQISRILGGHKKDRGTRSKE

SEQ ID NO: 228182 - protein, 1128 aa, Zea Mays
MAAPGRRTADVSSSSPSPSPAAPSTGRRLLRTQTVANLGESIFDSEVVPSSLVEIAPILRVANEVEVENPRVAYLCRFYAFEKAHRLDPTSSGRGVRQFKTALLQRLERENDPTLKGRVHKSDASEMQRFYREYYRKYIQALQTVVNKDDRARLTKAYQTAAILFEVLRAVNDSQSVEVDQAILDTHIKVEEKKKLFLPYNILPLDPESTGEAIMRYPEIQAAVYALRNTRGLPWPKDQDKKPEEKNTGKDLLDWLQAMFGFQKDNVSNQREHLILLLANVHIRKIPKADQQPKLDDKALDDVMKKLFKNYKKWCKYLGRKSSLWLPTIQQEVQQRKLLYMGLYLLIWGEAANLRFMPECICYIYHHMAFELYGMLAGNVSPMTGENVRPAYGGDEEAFLTKVVTPIYKVIEKEAERSKTMKSKHSHWRNYDDLNEYFWSVDCFRLGWPMRADADFFKTPKDPYLNHLNGENRSAGNVHWMGKVNFVEIRSFWHIFRSFDRMWIFLILSLQAMIIIAWNGGTPSDIFDAGVFKKVLSIFISAAILKLGQAILDLVFGWKAKRSMSFAVKLRYVLKLISAAAWVVILPVTYAYTWENPTGLARTIKSWLGDGQNQPSLYILAVVIYMAPNILASMLFLFPFMRRILESSNVKVITIMMWWSQPRLFVGRGMHEGAFSLFKYVKMLTHLHIVLSCIASFSITEHCCPDRYTMFWIILLAMKLIVSFYIEIKPLVQPTKDIMREPIRTFQWHEFFPHGTNNIGVVISLWAPIILVYFMDTQIWYALFSTLIGGIYGAYRRLGEIRTLGMLRSRFESLPEAFNERLIPSDANKSKGLRAAFSSRPKASGDESEREKRAARFAQMWNAIITSFREEDLIDNREKDLLLVPDCKDRELDIFQWPPFLLASKIPIALDMAADSGGKDRDLTKRIKSDPYFSFAIRECYASFKNIINTLVFGQREKDVLVQIFTVVDKHIEEETLITGLNMKNLPALSKKFVELLELLQKNKEEDLGQVVILFQDMLEVVTRDIMEEQDLLETLDSLHGANSRKHEGITPLDQQDQLFAKAIKFPVVESNAWTEKIKRLHLLLTVKESAMDVPINLDARRRISFFANSLFMDMPNAPKVRNMLPFS

SEQ ID NO: 228183 - protein, 1391 aa, Zea Mays
MAAPGRRTADVSSSSPSPSPAAPSTGRRLLRTQTVANLGESIFDSEVVPSSLVEIAPILRVANEVEVENPRVAYLCRFYAFEKAHRLDPTSSGRGVRQFKTALLQRLERENDPTLKGRVHKSDASEMQRFYREYYRKYIQALQTVVNKDDRARLTKAYQTAAILFEVLRAVNDSQSVEVDQAILDTHIKVEEKKKLFLPYNILPLDPESTGEAIMRYPEIQAAVYALRNTRGLPWPKDQDKKPEEKNTGKDLLDWLQAMFGFQKDNVSNQREHLILLLANVHIRKIPKADQQPKLDDKALDDVMKKLFKNYKKWCKYLGRKSSLWLPTIQQEVQQRKLLYMGLYLLIWGEAANLRFMPECICYIYHHMAFELYGMLAGNVSPMTGENVRPAYGGDEEAFLTKVVTPIYKVIEKEAERSKTMKSKHSHWRNYDDLNEYFWSVDCFRLGWPMRADADFFKTPKDPYLNHLNGENRSAGNVHWMGKVNFVEIRSFWHIFRSFDRMWIFLILSLQAMIIIAWNGGTPSDIFDAGVFKKVLSIFISAAILKLGQAILDLVFGWKAKRSMSFAVKLRYVLKLISAAAWVVILPVTYAYTWENPTGLARTIKSWLGDGQNQPSLYILAVVIYMAPNILASMLFLFPFMRRILESSNVKVITIMMWWSQPRLFVGRGMHEGAFSLFKYTMFWIILLAMKLIVSFYIEIKPLVQPTKDIMREPIRTFQWHEFFPHGTNNIGVVISLWAPIILVYFMDTQIWYALFSTLIGGIYGAYRRLGEIRTLGMLRSRFESLPEAFNERLIPSDANKSKGLRAAFSSRPKASGDESEREKRAARFAQMWNAIITSFREEDLIDNREKDLLLVPDCKDRELDIFQWPPFLLASKIPIALDMAADSGGKDRDLTKRIKSDPYFSFAIRECYASFKNIINTLVFGQREKDVLVQIFTVVDKHIEEETLITGLNMKNLPALSKKFVELLELLQKNKEEDLGQVVILFQDMLEVVTRDIMEEQDLLETLDSLHGANSRKHEGITPLDQQDQLFAKAIKFPVVESNAWTEKIKRLHLLLTVKESAMDVPINLDARRRISFFANSLFMDMPNAPKVRNMLPFSILTPYYKEDVLFSLQNLEERNEDGVSILFYLQKIYPDEWKNFLERVGCKNEEVLREDEQLEEKLCLWVSYRGQTLTRTVRGMMYYRKALELQAFLDMANNDDLMKGYRAMEVMSEDSPLKTQCKAIADMKFTYVVSCQLYGIQKRSNEPCAHDILRLMTEYPSLRVAYIDEVEAPSKDRIKKIEKVYYSVLVKASVTKPNEPGQSLDQVIYKIKLPGNAILGEGKPENQNHAIIFTRGECLQTIDMNQEHYMEEALKMRNLLQEFEKKHGVRHPSILGVREHIFTGRKLVL

SEQ ID NO: 228184 - protein, 1419 aa, Zea Mays
MAAPGRRTADVSSSSPSPSPAAPSTGRRLLRTQTVANLGESIFDSEVVPSSLVEIAPILRVANEVEVENPRVAYLCRFYAFEKAHRLDPTSSGRGVRQFKTALLQRLERENDPTLKGRVHKSDASEMQRFYREYYRKYIQALQTVVNKDDRARLTKAYQTAAILFEVLRAVNDSQSVEVDQAILDTHIKVEEKKKLFLPYNILPLDPESTGEAIMRYPEIQAAVYALRNTRGLPWPKDQDKKPEEKNTGKDLLDWLQAMFGFQKDNVSNQREHLILLLANVHIRKIPKADQQPKLDDKALDDVMKKLFKNYKKWCKYLGRKSSLWLPTIQQEVQQRKLLYMGLYLLIWGEAANLRFMPECICYIYHHMAFELYGMLAGNVSPMTGENVRPAYGGDEEAFLTKVVTPIYKVIEKEAERSKTMKSKHSHWRNYDDLNEYFWSVDCFRLGWPMRADADFFKTPKDPYLNHLNGENRSAGNVHWMGKVNFVEIRSFWHIFRSFDRMWIFLILSLQAMIIIAWNGGTPSDIFDAGVFKKVLSIFISAAILKLGQAILDLVFGWKAKRSMSFAVKLRYVLKLISAAAWVVILPVTYAYTWENPTGLARTIKSWLGDGQNQPSLYILAVVIYMAPNILASMLFLFPFMRRILESSNVKVITIMMWWSQPRLFVGRGMHEGAFSLFKYVKMLTHLHIVLSCIASFSITEHCCPDRYTMFWIILLAMKLIVSFYIEIKPLVQPTKDIMREPIRTFQWHEFFPHGTNNIGVVISLWAPIILVYFMDTQIWYALFSTLIGGIYGAYRRLGEIRTLGMLRSRFESLPEAFNERLIPSDANKSKGLRAAFSSRPKASGDESEREKRAARFAQMWNAIITSFREEDLIDNREKDLLLVPDCKDRELDIFQWPPFLLASKIPIALDMAADSGGKDRDLTKRIKSDPYFSFAIRECYASFKNIINTLVFGQREKDVLVQIFTVVDKHIEEETLITGLNMKNLPALSKKFVELLELLQKNKEEDLGQVVILFQDMLEVVTRDIMEEQDLLETLDSLHGANSRKHEGITPLDQQDQLFAKAIKFPVVESNAWTEKIKRLHLLLTVKESAMDVPINLDARRRISFFANSLFMDMPNAPKVRNMLPFSILTPYYKEDVLFSLQNLEERNEDGVSILFYLQKIYPDEWKNFLERVGCKNEEVLREDEQLEEKLCLWVSYRGQTLTRTVRGMMYYRKALELQAFLDMANNDDLMKGYRAMEVMSEDSPLKTQCKAIADMKFTYVVSCQLYGIQKRSNEPCAHDILRLMTEYPSLRVAYIDEVEAPSKDRIKKIEKVYYSVLVKASVTKPNEPGQSLDQVIYKIKLPGNAILGEGKPENQNHAIIFTRGECLQTIDMNQEHYMEEALKMRNLLQEFEKKHGVRHPSILGVREHIFTGRKLVL

SEQ ID NO: 228185 - protein, 405 aa, Zea Mays
MKLIIKPLVQPTKDIMREPIRTFQWHEFFPHGTNNIGVVISLWAPIILVYFMDTQIWYALFSTLIGGIYGAYRRLGEIRTLGMLRSRFESLPEAFNERLIPSDANKSKGLRAAFSSRPKASGDESEREKRAARFAQMWNAIITSFREEDLIDNREKDLLLVPDCKDRELDIFQWPPFLLASKIPIALDMAADSGGKDRDLTKRIKSDPYFSFAIRECYASFKNIINTLVFGQREKDVLVQIFTVVDKHIEEETLITGLNMKNLPALSKKFVELLELLQKNKEEDLGQVVILFQDMLEVVTRDIMEEQDLLETLDSLHGANSRKHEGITPLDQQDQLFAKAIKFPVVESNAWTEKIKRLHLLLTVKESAMDVPINLDARRRISFFANSLFMDMPNAPKVRNMLPFS

SEQ ID NO: 228186 - protein, 63 aa, Zea Mays
MDWGKPPPSFIVHNADGAWGQLLAGDDASSGDRTDPQMGYRRAMHCEVSSHLKITLVTGISSA

SEQ ID NO: 228187 - protein, 114 aa, Zea Mays
MAICDRSSGRQAILPAGADLPCSLSGRSSMAQRVIFSAKVRESSSILIFYDLFTELDDYCTQVILAPRLLVIQMVILLTERTDAEEALQGLNGSLIGKQAVRLSWVRSPSHKQG

SEQ ID NO: 228188 - protein, 53 aa, Zea Mays
MSKPPTSRAAAITEDNRASCDRRSDPCLPWPPPPLLKPIAARATAIVTGCKHT

SEQ ID NO: 228189 - protein, 58 aa, Zea Mays
MKELYGLSYRHETPEGPTRFGEGMLTPLDPNPLFTPNLSHLEHLLFLRFISNLHRFKC

SEQ ID NO: 228190 - protein, 169 aa, Zea Mays
MRDGWVADWYFGTPCTTSCLPPPSRRSSRGREGERRNGRKEVEGRKGSMLLGVPQPQHGRPYFTCLFPVSLSLSEVDDGSSLSHFTHPPLPFQYYPSRQRKLAVATCSATRPLALARFFIASSPSSGNSTVSALFGSIHPSAWRPLCCLICYLYLVLGMDSAIRGILQV

SEQ ID NO: 228191 - protein, 227 aa, Zea Mays
MAPGKRSTWTSRKPEEPVPTDYEKIRAMNMMKNNQLFQRLGLGQLKSLVTATATNNKEDCPQQSESLYDGENTDNSNEEESQCRNDGRANISNDGDQISTKVTRGNKRIVAPVQERTIRVTRQRIAEINQENSHNLSVHKQLSSCPATNHDSIETLVVPTQPSANTTIDNNPTHNIDNAIEPNSLIQEESDNHNAVEGTIDIIPRRKSMGKQLESLSRGLGMKIPIQ

SEQ ID NO: 228192 - protein, 184 aa, Zea Mays
MKTYNRIWRCLHLGQNCSNLFELQNKKSSGPVTKAWEFKPKVCWSYAHKPAEAESSQCSQPSQCFDGRLIEWLGLEKFGLNDSQLNAVSDCVSLMDSNSSSIKLLWGPPGTGKTKTISSILWAMLIKGRRTLACAPTNTAVLEIAARIVNLTAKSSDGTVFLNDIVLFGNKKKMKIDNDYYLSK

SEQ ID NO: 228193 - protein, 163 aa, Zea Mays
MSILSVHHPLKSQDKSPQQAITLSCSRESSLKITGKNSLLLDDNADLALVKHVIEGPSLPLLVPVVHLPHASRDQTQGQSNEDLLHHTRALEGGMRNPAACHLLSCLLRSDAKRLEPAEVGEVVRAEGMKRGWGAEARRRGVGWCARTRRRRDKRLGDSTTRH

SEQ ID NO: 228194 - protein, 73 aa, Zea Mays
MAARLAQLRAQAVQAAEFASKHGGSYYKELMEKNKQYVVQPPTIEKCQELSKQLFYTRLARALVLTNTPYVSK

SEQ ID NO: 228195 - protein, 590 aa, Zea Mays
MHEQEEERRRRRRKRRWAGGPSRRRQGVGGRRCRHRCRVHGRRPPRGVCPRRLLGLVPPLPPAIPVPPQPGRRRPFVRFYEEHGMRDSYCKVRPLEAYVLPYHNDSCQSSYSHSQPPQEAPSSSALASPQYNATTGGNASSPEAAFVGLDEFRSRMMQGKAENDTGPPTDGGVAHRLEPNGAEYNYAAAAKGAKVLAHNKEAKGAANILGGDKDKYLRNPCSAADKFVVVELSEETLVDTVALANLEHYSSNFREFEVYGSTSYPTEAWELLGRFTAENAKHAQRFVLPEPRWTRYLRLRLVSHYGSGFYCILSYLEVYGVDAVERMLQDFIAGAGAGAGAEADASRDRAPIDFANRDADCNDTTAQQDGNGGAGRNDSTAGDGKSNSSRSGDAKLPPQVAALASPTGRIHSDGVLKILMQKMRSLELSLSTLEEYTRELNQRYGAKLPDLQNGLSQTAVALEKMKADVHDLVDGKDSVAKDLDDLKAWKSTVSGKLDDLIKENQEMRWSVEEMRGVQETLQNKELAVLSISLFFACLALFKLACDRVFCLFAGKGREEPDAEEHTRSSRAWMLVLASSSFTTLIVLLYN

SEQ ID NO: 228196 - protein, 262 aa, Zea Mays
MGNSLGCSASGERLVSAARDGDAIEARMLLELSPALARYSTFGGLNTPLHFAAAKGHLDIVTMLLEKGADVNARNYCGQTALMHACRHGHWEVVQMLLLFRCNVTRADYLSGRTALHFAAHDGFVRCIRLLVADFVPSVALEDIASSVVDGGDCQTNSGSSPNSSSGQKFNESARVRYINKPADGGVTALHMAALNGHLDCMQLLIDLGANVSAVSFPYGTTANLIGAGSTPLHYAAGGGKQECCELLISKGASRLTLNCNG

SEQ ID NO: 228197 - protein, 437 aa, Zea Mays
MQNFCDIGPHGTKIIVFNLWSNDDGNLELDFDTNPEDIMISGAPNPEQISNSVRRANENHLANRLRYSLRVYASVLYLQLPDYFRIMLRGREVERHHIASDLIYPERISYRPQSCGIIREAEVLTTIGFLKGAPTISVHGFNIYHKNRLILPFHRVLSTASSKGRSVSGVLEVDFIKPTHDKQDFEKSQLFQRLMNRLKEMTNEYWDLYSNKIGYVKVPRVRAAPTPAPPVMLAIENGPAEPSERSAPAPTQPLRWQHGNSSCVNAVPIAMAPPAFHPAPVKTETDAPGAPTGYAYSYSPSWPSVQAMQIEKIKEEPSMAAPGTDWVETRKRTNDDGATTVALFKRRKAPQELAGSGSRSATDQVSRYVGEGELNEFCFLKMENRMLRGECSEFEMAEKELRVKEQNLRLEIEMAQEQFKRLLGEYVSFSSMPTRKP

SEQ ID NO: 228198 - protein, 253 aa, Zea Mays
MTSGAAAVGGLGRTPTWKERENNKRRERRRRAIAAKIFTGLRALGNYKLPKHCDNNEVLKALCREAGWVVEDDGTTYRKGCKPPPGMMSPCSSSQLLSAPSSSFPSPVPSYHASPASSSFPSPTRLDHGSGSNSHTPGPAAAAAAAAAAASSLLPFLRGLPPLRVSSSAPVTPPLSSPTAGVAAARQGPQARLGRRRRRRPVPPPLLRGVRPRQPDPRAPARRAPGHHPRVRRVRRLLLRGDDSVVLIHGLVK

SEQ ID NO: 228199 - protein, 1486 aa, Zea Mays
MASTLNIVIGSHVWVEDKDLSWVDGEVSRIDGKKAHVRTTKGKTVIANISDIHPKDTEAPPDGVDDMTRLSYLHEPGVLDNLAVRYAKNIIYTYTGNILIAINPFQRLPNLVDARTMEKYKGANLGDLDPHVFAIADVSYRQMINEGKSNSILVSGESGAGKTETTKLLMGYLAYLGGRSGTGERTVEQQVLESNPVLEAFGNAKTVRNNNSSRFGKFVEIQFDKSGKISGAAIRTYLLERSRVCQINSPERNYHCFYFLCAAPSEDLKKYKLGDPSLFHYLNQSACIKVDGINDAEEYLATRKAMDTVGITDQEQEAIFRVVAAVLHLGNINFTKGREADSSIIKDDKSRFHLNTAGELLMCDCEKLENALIKREINTPEGVITTTVGPNSATISRDGLAKQIYSRLFDWLVNRINASIGQDPNSNKLIGVLDIYGFESFKTNSFEQLCINFTNEKLQQHFNQNVFKMEQEEYTREQINWSYIEFVDNQDVLDLIERKPGGIIALLDEACMFPKSTHETLSQKLYEKFKNHKRFTKPKLSRTAFTIQHYAGDVTYQSDQFLDKNKDYVVAEHQELLNASKCSFVSGLFPQATEENTKSSKSSIATRFKIQLHELMETLSSTEPHYIRCIKPNSVLKPGIFENTNVLQQLRCSGVLEAIRISCAGYPTRKLFHDFLHRFRVLAPEILKEKNDEKVSCQKVLDKMGLQGYQIGRTKVFLRAGQMADLDARRTEMRNNAAKGVQSQFRTHVAREQFLVLRDTSIYLQSFVRARLACKQHEFLRQQAAALRIQKNARWYFAWKTYYQLRLSAITLQAGLRSMAARNEFTFRKKNKASVHIQSQWRCHRDYSNYMNLKRAALTYQCAWRRRVARKELRKLKLAARDTQALKVAKEKLEERVEELTSRLDREKKLRADLEKSKADEVSKLKEALHEMEQRVEEVKAMQEQESAKKAVEEALAQEREKISLLTTEIEGLKVLLVAEREENDKMKKAHANALETNEELNKEVSDADEKIKQFSDTVRRLEGTVSEHEGLLLTERQQNEAANAALAESQARNEALVSKLEDAVKQNDLLHEADQRFQEATKNLESSLTFEKQRHEANLIELAEAREKIEELQREVGDTDEKFTLLQTSIQSVEERLREKDALLTTERLESEATKKSLNESEDRNQDLLLKIEIAQKDIAHFQETVRRHEENMAALETSLRSERQQNDAIMKQLAESQGEIGELQRKLEDADARNGLLQDSLQRHEENMAALETSLRSERQQNDAIMKQLAESQGEIGELQRKLEDADARNGLLQDSLQRHEENMAALETSLRSERQQNDAIMKQLAESQGEIGELQRKLEDADARNGLLQDSLQRLEDDATTREALMETERKETEMTKKTLTEALDQIEELVKEVECANHSVHQLQDSMQRMEQTAVAREATLLAEHQEKDATSKALAEAQGRIEGLLKEIYSANRKNDQLQSTIERRGCNNDRCSLLSRKKRA

SEQ ID NO: 228200 - protein, 2269 aa, Zea Mays
MAEDGASATQAMVAQTRPTGPCNGEGCPGGAVHGGEGGRSRFGKFVEIQFDKSGKISGAAIRTYLLERSRVCQINSPERNYHCFYFLCAAPSEDLKKYKLGDPSLFHYLNQSACIKVDGINDAEEYLATRKAMDTVGITDQEQEAIFRVVAAVLHLGNINFTKGREADSSIIKDDKSRFHLNTAGELLMCDCEKLENALIKREINTPEGVITTTVGPNSATISRDGLAKQIYSRLFDWLVNRINASIGQDPNSNKLIGVLDIYGFESFKTNSFEQLCINFTNEKLQQHFNQNVFKMEQEEYTREQINWSYIEFVDNQDVLDLIERKPGGIIALLDEACMFPKSTHETLSQKLYEKFKNHKRFTKPKLSRTAFTIQHYAGDVTYQSDQFLDKNKDYVVAEHQELLNASKCSFVSGLFPQATEENTKSSKSSIATRFKIQLHELMETLSSTEPHYIRCIKPNSVLKPGIFENTNVLQQLRCSGVLEAIRISCAGYPTRKLFHDFLHRFRVLAPEILKEKNDEKVSCQKVLDKMGLQGYQIGRTKVFLRAGQMADLDARRTEMRNNAAKGVQSQFRTHVAREQFLVLRDTSIYLQSFVRARLACKQHEFLRQQAAALRIQKNARWYFAWKTYYQLRLSAITLQAGLRSMAARNEFTFRKKNKASVHIQSQWRCHRDYSNYMNLKRAALTYQCAWRRRVARKELRKLKLAARDTQALKVAKEKLEERVEELTSRLDREKKLRADLEKSKADEVSKLKEALHEMEQRVEEVKAMQEQESAKKAVEEALAQEREKISLLTTEIEGLKVLLVAEREENDKMKKAHANALETNEELNKEVSDADEKIKQFSDTVRRLEGTVSEHEGLLLTERQQNEAANAALAESQARNEALVSKLEDAVKQNDLLHEADQRFQEATKNLESSLTFEKQRHEANLIELAEAREKIEELQREVGDTDEKFTLLQTSIQSVEERLREKDALLTTERLESEATKKSLNESEDRNQDLLLKIEIAQKDIAHFQETVRRHEENMAALETSLRSERQQNDAIMKQLAESQGEIGELQRKLEDADARNGLLQDSLQRHEENMAALETSLRSERQQNDAIMKQLAESQGEIGELQRKLEDADARNGLLQDSLQRHEENMAALETSLRSERQQNDAIMKQLAESQGEIGELQRKLEDADARNGLLQDSLQRLEDDATTREALMETERKETEMTKKTLTEALDQIEELVKEVECANHSVHQLQDSMQRMEQTAVAREATLLAEHQEKDATSKALAEAQGRIEGLLKEIYSANRKNDQLQSTIERLEEGATTTDALYLAERKGHDQTKKSLSEAQETNKELLKKIEKAEKNIDQLLENVERLEKDAITRESLLLTTKQSYGDTAKLLLESQEKNQELVHKVEDSDSKIVLLEDSVKRLEESTADKDSLLAIERHENSETKKELVGSQKKIAELLTEVQDTRANVAELEDLIRRLEQDVTAKEALLLTEKEAHDATRKTLTEAQEESGELLKKIHDNDKHILQLQFTIQRLEETTVANENLLLREREQNDITTKAHNESQEKYEELLSKFVDVDRKIDLLQGTIERLGENTTKDSLLLSERHEKDAIKKALTEAQEKNEELLMKVEDANEKIEQLQTTIDMLEDNVAAKDVSLEAAMKENDAIRRSLTEAQERNDELLKKISDSEYRIHLLQDTIQKLQVDAISRLSSFVMEKQESDASKRAVTEAHERNEDLLKRNEDLLKRNDDLIKKIEDSSKIVTQLQEALQRLEGKACNLEAENQVLRQQATSTPPTSAKSPASRAKISRIHRSPENGHNLNGDIRQTEMKPSTGTSEAITSAANVPDLGDQKDFEHGEKLQRIPKQKYQPSHHQQPQDDQQWLLACIPQHLGFSGSKPVAALLIYQCLLHWKSFEAMKTGVFDSILHAINSATEAQNDMRTLAYWLSNLSTLTVLLQRSFKTTRTAISTPQRRRFSSERIFHGNQTSNAGLAYLSGQSVVGSAGLPQVEAKYPALLFKQQLVDLIEKVYGMISDSVKKELNPLLELCIQDPRTSHSSIAKGNLNGMGQQNQLTYWLGIVKILTSYLDVLRVNHVPSILVHKLFTQIFSLIDVQLFNRLLLRRECCSFSNGEYVRAGLTELKHWSDNATREFAGSAWEALRHIRQAVDFLVISLKPMRTLREIHTDVCPALSIQQLERIVSMYWDDVNGTNTISAEFTSSLKSAVRDESNMATSFSILLDDDSSIPFSLDDITKTLPVIEVADDDFVPFVHENPSFAFLLQRGE

SEQ ID NO: 228201 - protein, 1045 aa, Zea Mays
MAPTLAAGRLEEGATTTDALYLAERKGHDQTKKSLSEAQETNKELLKKIEKAEKNIDQLLENVERLEKDAITRESLLLTTKQSYGDTAKLLLESQEKNQELVHKVEDSDSKIVLLEDSVKRFNHFSYRLEESTADKDSLLAIERHENSETKKELVGSQKKIAELLTEVQDTRANVAELEDLIRRLEGKLAITEALLLTEKEQNASTLKLLAEAQLRIEELIKKLEGSDRKSDSLQDTITRLEQDVTAKEALLLTEKEAHDATRKTLTEAQEESGELLKKIHDNDKHILQLQFTIQRLEETTVANENLLLREREQNDITTKAHNESQEKYEELLSKFVDVDRKIDLLQGTIERLGENTTKDSLLLSERHEKDAIKKALTEAQEKNEELLMKVEDANEKIEQLQTTIDMLEDNVAAKDVSLEAAMKENDAIRRSLTEAQERNDELLKKISDSEYRIHLLQDTIQKLQVDAISRLSSFVMEKQESDASKRAVTEAHERNEDLLKRNEDLLKRNDDLIKKIEDSSKIVTQLQEALQRLEGKACNLEAENQVLRQQATSTPPTSAKSPASRAKISRIHRSPENGHNLNGDIRQTEMKPSTGTSEAITSAANVPDLGDQKDFEHGEKLQRIPKQKYQPSHHQQPQDDQQWLLACIPQHLGFSGSKPVAALLIYQCLLHWKSFEAMKTGVFDSILHAINSATEAQNDMRTLAYWLSNLSTLTVLLQRSFKTTRTAISTPQRRRFSSERIFHGNQTSNAGLAYLSGQSVVGSAGLPQVEAKYPALLFKQQLVDLIEKVYGMISDSVKKELNPLLELCIQDPRTSHSSIAKGNLNGMGQQNQLTYWLGIVKILTSYLDVLRVNHVPSILVHKLFTQIFSLIDVQLFNRLLLRRECCSFSNGEYVRAGLTELKHWSDNATREFAGSAWEALRHIRQAVDFLVISLKPMRTLREIHTDVCPALSIQQLERIVSMYWDDVNGTNTISAEFTSSLKSAVRDESNMATSFSILLDDDSSIPFSLDDITKTLPVIEVADDDFVPFVHENPSFAFLLQRGE

SEQ ID NO: 228202 - protein, 221 aa, Zea Mays
MSLFSHIFLLNVPFMVLLIAQGHENVAAEYYKQQEEQEKVVRSESLAIWLSNIANMVLFAAKVYASTCCHDISCGLLPFQCKRQIPIETQLEKRMQPLNQGMQVGIAWLVIRGLICSGFHVGIKELAEVSFPQDDKQTEKTTLKRSADWAPQTVCGCGWDYRFGRKLVEARDELMKGSLPVLTQRGEPRIYSRTLFPYELFVKLYSKVELHPFGLHNLGNR

SEQ ID NO: 228203 - protein, 285 aa, Zea Mays
MSLFSHIFLLNVPFMVLLIAQGHENVAAEYYKQQEEQEKVVRSESLAIWLSNIANMVLFAAKVYASTCCHDISCGLLPFQCKRQIPIETQLEKRMQPLNQGMQVGIAWLVIRGLICSGFHVGIKELAEVSFPQDDKQTEKTTLKRSADWAPQTVCGCGWDYRFGRKLVEARDELMKGSLPVLTQRGEPRIYSRTLFPYELFVKLYSKVELHPFGLHNLGNRPIYAGNALCTVKYTDEDPCMMSIRSTSFSPTADAMSETKVAPITQVDLSFLSEGLFGSFTMLFC

SEQ ID NO: 228204 - protein, 170 aa, Zea Mays
MSLKIGFHRMVTSGHSNKSITSFCDVCFCWSFMFELMYVSDFRPIYAGNALCTVKYTDEDPCMMSIRSTSFSPTADAMSETKVAPITQVDLSFLSEGKSTWVNLTSQDTKRHDLANACVVVTGGRGLRSAENFKLLEQLAEKFGAAAGATRAAVEAGYVPNDLQEKAAAA

SEQ ID NO: 228205 - protein, 146 aa, Zea Mays
MGESQTTTTSDETYTTSSSLSSFYLTVEKTTTTTDQMYTAPPSLPSLYLTPKETLNNGVISISNYNTDEAPSPQPVSLVSDEIDISESSPPPSPSPHTVDEMDNSEESPSPLSHTIELQMFEVPTTSGNNEEDEEDDDSFREWESD

SEQ ID NO: 228206 - protein, 383 aa, Zea Mays
MRECISVHIGQAGIQVGNACWELYCLEHGIQPDGQVPGDKTAGHHDDAFSTFFSQTGAGKHVPRAIFVDLEPTVIDEVRTGTYRQLFHPEQLISGKEDAANNFARGHYTIGKEIVDLCLDRIRKLADNCTGLQGFLVFNAVSTSVVEPYNSVLSTHSLLEHTDVSILLDNEAIYDICRRSLDIERPNYSNLNRLVSQVISSLTASLRFDGALNVDVNEFQTNLVPYPRIHFMLSSYAPVISSAKAFHEQLSVAEITSSAFEPASMMVKCDPRHGKYMACCLMYRGDVVPKDVNAAVATIKTKRTIQFVDWCPTGFKCGINYQAPTVVPGADLAKRAFVHWYVGEGMEEGEFSEAREDLAALEKDYEEVAAEGGSDDGDEEEEY

SEQ ID NO: 228207 - protein, 391 aa, Zea Mays
MRECISVHIGQAGIQVGNACWELYCLEHGIQPDGQVPGDKTAGHHDDAFSTFFSQTGAGKHVPRAIFVDLEPTVIDEVRTGTYRQLFHPEQLISGKEDAANNFARGHYTIGKEIVDLCLDRIRKLADNCTGLQGFLVFNAVSTSVVEPYNSVLSTHSLLEHTDVSILLDNEAIYDICRRSLDIERPNYSNLNRLVSQTNLVPYPRIHFMLSSYAPVISSAKAFHEQLSVAEITSSAFEPASMMVKCDPRHGKYMACCLMYRGDVVPKDVNAAVATIKTKRTIQFVDWCPTGFKCGINYQAPTVVPGADLAKVQRAVCMISNSTSVVEVFSRINSKFDLMYAKRAFVHWYVGEGMEEGEFSEAREDLAALEKDYEEVAAEGGSDDGDEEEEY

SEQ ID NO: 228208 - protein, 163 aa, Zea Mays
MASLLARQAAQALRARQTAQLGPAASAMQGHLRTYMNAGIPKRFKEDEEKEQLAKDLAKDWNAVFERSINTLFLTEMVRGLMLTLKYFFDRNVTINYPFEKGPLSPRFRGEHALRRYESGEERCIACKLCEAICPAQAITIEAEEREDGSRRTTRGLPSRCYC

SEQ ID NO: 228209 - protein, 118 aa, Zea Mays
MASLLARQAAQALRARQTAQLGPAASAMQGHLRTYMNAGIPKRFKEDEEKEQLAKDLAKDWNAVFERSINTLFLTEMVRGLMLTLKYFFDRNVTINYPFEKGPLSPRFRDMPSAGNYN

SEQ ID NO: 228210 - protein, 191 aa, Zea Mays
MYQNPPSTMEANPMESCPSKEVENLREKLVEENFYLITELGEQGRVPVLLLKLDDPVPRRKPAIVFLHSSYKCKEWLRPLLEAYASKGYVCVAIDSRYHGERASNETTYIDIDFYDARDEESQPNFVWTSTFLQVWDLVKLGDYLGEREDVDPCRVGITGESLGGMHAWFAAFVDTRYSVVVPIIGVQVGH

SEQ ID NO: 228211 - protein, 292 aa, Zea Mays
MPTSREEGQAEPDEHHPTILHRGGGGDAAGGSGGRPRQVWVPGPVIVGAGPSGLATAACLKARGVPSLMLEKDSCVAASWRHRTYERLRLHLPRCFCELPLAPFPPGTPPYPTRDQFIAYLDDYARVFGIQPHLNARVHRAAYDAAIGFWRVTVKEDSGGDGATAANTEFLSRWLVVATGENAEPAWPEGVEGMDTYRGVAMHTSSYKKGDEFRGKNVLVVGCGQLRHGGQPRPLQQWRQSLHGCQGQASRVAEGDTRRLHVRALRVPSQVATHKAGGFFASLLHEADPRRH

SEQ ID NO: 228212 - protein, 117 aa, Zea Mays
MAASSADPAQHHASSRPPLLLAVRHLPFPGVPRTRTFPVPGPDVLAPLARRLEELASAAAAHPLLKPLFAAHSHLSSFSQEASGGGAACHGAVVRGALLRGGARGLGGRDGGGQRHQ

SEQ ID NO: 228213 - protein, 555 aa, Zea Mays
MNTTGYTQASNYRKIPLTYLHLIPDQVSYRTSLLGLITKLLLLSWSFHQNIKMEYTLLPDLAPHKIHAKIQVHVSRKWLFRGATDSGPLQHVDMVLSDREGNAIYAEIPGNLAEQKATNIEEGGVYDINRFRVCAAKTVFKIVDGDKMIQFTFHTIVKCATSPPTTFPLYVYRLTSFDLIEPHVQTTNNFVGVYLSGGPACRWYFNPTIPEAEPYLTSQSTKRIVLQLPQNLQHPPAMETKPIVEHKSLYELLTVNPYDFPETGFECTITIAEIPAEHKWWFPSCTKCNKATIPHTTGYHCESCNWDGYKFKYKLKFLASDETDIAEMFCFDTVARHIVGKSCEIVLRSVTEQSPIPPDLAQIISLKFTFRVTIDNQSLFQQTSCPNVFRINSIVAAHGRQRSLPMQIGISDQQGPSTPQNKSKPMLLEDSPSTTLEKLSTTTPTTVVRKLLYSETDNTPKTHSISFTQLSFIHFKIYANKSNINSPEKDDGDKETAQNFDICSLIQYPLTKEKDQQIQLNRHLKGSNKGRYASEKKWTSNPPRTKVSLRSSSTF

SEQ ID NO: 228214 - protein, 477 aa, Zea Mays
MFIRYDMEAIYFDEGVRSSKRQQLESKLLQLVNPAYQSLLGHLHTRTLEAFKEYFGKALEKEGFAVAACNCTETFLEKFDRGSEDAAIQQVNWDTSKVRDKLRRDIEAHVASVRAAKLSELCAKYEAQLTKALVEPVESLLDSASEDTWPAIRKLLQRETKTAVLGLESAVSAFELDEATEKELLAKLEKHGRSVVESKAKEEAGRVLIRMKDRFSTLFSRDADSMPRVWTGKEDIKAITKTARSASVKLLSTMAAIRLEEDGDNIENTLSLALVDTSRHGTTDRSIQLSDPLASSSWERVAEEKTLITPVQCKNLWRQFKAETEYTVTQAIAAQEANKRNNNWLPPPWALAAMAILGFNEFMTLLRNPLYLFAIFVIYLVGKALWVQSEIGREFQHGFLPAILSLSTKFVPTVMNILKRLADAGQEPAAAPERQREMELQPKSTRNGSLYSNVTSAGSSSVTTSEIGPEYSSPVVQ

SEQ ID NO: 228215 - protein, 568 aa, Zea Mays
MWCHDIGREQAANKPLLKTVFQATFEVMMRLFSPRKTTLLFVIRDKSRTPLENLEPILREDIQKIWDAVPKPHAHKETPISEFFDVQVVALSSYEEKEELFKQQVSDLRDRFQHSIAPGGLAGDRRGVVPASGFSFSSQQFWKVIKENKDLDLPAHKVMVATVRCEEIGNEKVTSFIADEEWQQFEEAVQHDFVTGFGKKLSSLLDRCLSEYDMEAIYFDEGVRSSKRQQLESKLLQLVNPAYQSLLGHLHTRTLEAFKEYFGKALEKEGFAVAACNCTETFLEKFDRGSEDAAIQQVNWDTSKVRDKLRRDIEAHVASVRAAKLSELCAKYEAQLTKALVEPVESLLDSASEDTWPAIRKLLQRETKTAVLGLESAVSAFELDEATEKELLAKLEKHGRSVVESKAKEEAGRVLIRMKDRFSTLFSRDADSMPRVWTGKEDIKAITKTARSASVKLLSTMAAIRLEEDGDNIENTLSLALVDTSRHGTTDRSIQLSDPLASSSWERVAEEKTLITPVQCKNLWRQFKAETEYTVTQAIAAQQIRGTTTGSHLHGHLLQWLSLDSTSL

SEQ ID NO: 228216 - protein, 267 aa, Zea Mays
MKDRFSTLFSRDADSMPRVWTGKEDIKAITKTARSASVKLLSTMAAIRLEEDGDNIENTLSLALVDTSRHGTTDRSIQLSDPLASSSWERVAEEKTLITPVQCKNLWRQFKAETEYTVTQAIAAQEANKRNNNWLPPPWALAAMAILGFNEFMTLLRNPLYLFAIFVIYLVGKALWVQSEIGREFQHGFLPAILSLSTKFVPTVMNILKRLADAGQEPAAAPERQREMELQPKSTRNGSLYSNVTSAGSSSVTTSEIGPEYSSPVVQ

SEQ ID NO: 228217 - protein, 600 aa, Zea Mays
MDLEGTDGRERGEDDTAFEKQSALFALAVSDIVLINMWCHDIGREQAANKPLLKTVFQVMMRLFSPRKTTLLFVIRDKSRTPLENLEPILREDIQKIWDAVPKPHAHKETPISEFFDVQVVALSSYEEKEELFKQQVSDLRDRFQHSIAPGGLAGDRRGVVPASGFSFSSQQFWKVIKENKDLDLPAHKVMVATVRCEEIGNEKVTSFIADEEWQQFEEAVQHDFVTGFGKKLSSLLDRCLSEYDMEAIYFDEGVRSSKRQQLESKLLQLVNPAYQSLLGHLHTRTLEAFKEYFGKALEKEGFAVAACNCTETFLEKFDRGSEDAAIQQVNWDTSKVRDKLRRDIEAHVASVRAAKLSELCAKYEAQLTKALVEPVESLLDSASEDTWPAIRKLLQRETKTAVLGLESAVSAFELDEATEKELLAKLEKHGRSVVESKAKEEAGRVLIRMKDRFSTLFSRDADSMPRVWTGKEDIKAITKTARSASVKLLSTMAAIRLEEDGDNIENTLSLALVDTSRHGTTDRSIQLSDPLASSSWERVAEEKTLITPVQCKNLWRQFKAETEYTVTQAIAAQQIRGTTTGSHLHGHLLQWLSLDSTSL

SEQ ID NO: 228218 - protein, 1066 aa, Zea Mays
MKERGYTNRRRSRHRLTPGTVKFAAFHVLSLEGSNGLTILDVAEKIQKSGLRDLTTSKTPEASIAAALSRDAKLFERTAPSTYCLKSPYRKDPADSEAVLSAAREKIRAFQNVLSDSEAEKEADEAERDDDSDCDDADDDPDGDDVNIEVEEDKDPLLAVKAQDEVPSTTTVIGIKTKLDSVGNALNSSSSFTKSAKGAPLPYLGRSSAADTSNDSPLGGPSANHEVTPGDSENTQIDESNQIEPWVCALAEGDYCDLSVEERLNALVALVGVATEGNSIRGVLEERLELANALKKQMWAEVQLDKRRFKEEFASRVQYNSGMSFKPDIYQENNMTEITSTRACDAYKENDGHVGTINNCEMLDQHSQGNAGGITYDRNVVGQEIHATPDTSYVQQYAYADKTRSQLKSYIGHRAEQLYVYRSLPLGQDRRRNRYWQFTTSASPNDPGSGRIFFESEDGCWRVIDSEDSFDSLVAALDTRGTREAQLRSMLQMIETTFKEAIKRRSASIELSATVYPKNGATDMIRANYHREVGSSSSTPFNDTSDSVTAYSDSFKVELGRNDFEKAAISKRADIFLKWMWRECYNQEETCAMRYGKKRCSELLHSCNCCYQIYLAEERHCSSCHKTFKSIYNFSDHTTQCEEKWRTDPYWKMQIADYSVPIGMVLLKLQLVLIEAYIPSEALQPFWTDVYRKSWSVKLYATKSIAETFQLLTVLEGAIIPDRLSSDFETTSECLNSQVIAPQNPVLPAGFASVLPWVPDTTSAVMLRVLDLDSAILYVQNQKMERDDGGFMKFPSRYTVVKSKQETIPLEPTGMDLYDGRWLPGSGRRGRGRGSRGGSRGGRGRSRGGRIPRGVSSSSRIEFKDGIAASGRAPRKNARRGRGRGRGRGRRTVRPRQPSVGRGRSIPKENLMGSFSMLTSSKAADIEESPRSSGADEWGLETRMTYTERDENSSGSRYEDNEENGQPMDEDYEEQVPDYSIDYSSGSRHHEMMSMMDHETDEEDEDAEGDENVEEDDADHAVDDADVEMDEGDDEIGDDGEDGGVGGEMTPDEDPDATSYSSDYSE

SEQ ID NO: 228219 - protein, 896 aa, Zea Mays
MTQFNSNLSSVPVEGQFDTSQVAAFEDPPVSSERRAYHDEDTSRVERKRKHNEEAKIAKEVEAHERRIRKELEKQDFLNRKREEQRHKEMERLERERRKEEERLLRERQREEERFQREQRRENERMEKFLQKQSRREEKQRQKEQLRKEKEAARQKAANERAAARRIARDYMELVEDERLELMELAAQNKGLPSMLYLDSDTLQQLDSFRGMVSQFPPATVKMKLPFSIKPWTGSEDNIGKLLMVWKFLITFTDVLGLCPVTLDEFVQSLHDYDSRLLGELHVALLKSIIKDIEDVARTPSIALGVNPGGGHPQIVEGAYSWGFDIRSWQRHLNLLTWPEILRQFALSAGSGPQLKKRTVEDSHYHYDNEGHDGENVILALRNGTAAVNAVAKMKERGYTNRRRSRHRLTPGTVKFAAFHVLSLEGSNGLTILDVAEKIQKSGLRDLTTSKTPEASIAAALSRDAKLFERTAPSTYCLKSPYRKDPADSEAVLSAAREKIRAFQNVLSDSEAEKEADEAERDDDSDCDDADDDPDGDDVNIEVEEDKDPLLAVKAQDEVPSTTTVIGIKTKLDSVGNALNSSSSFTKSAKGAPLPYLGRSSAADTSNDSPLGGPSANHEVTPGDSENTQIDESNQIEPWVCALAEGDYCDLSVEERLNALVALVGVATEGNSIRGVLEERLELANALKKQMWAEVQLDKRRFKEEFASRVQYNSGMSFKPDIYQENNMTEITSTRACDAYKENDGHVGTINNCEMLDQHSQGNAGGITYDRNVVGQEIHATPDTSYVQQYAYADKTRSQLKSYIGHRAEQLYVYRSLPLGQDRRRNRYWQFTTSASPNDPGSGRIFFESEDGCWRVIDSEDIRDPKAPKINRPCNHVLRNQTAATINLLPTLLTPF

SEQ ID NO: 228220 - protein, 204 aa, Zea Mays
MTAFEYHGTDSRFNRVFNEGMKNHSVIITKKLLDFYTGFEGVSTLVDVGGGVGATLHAITSRHPHISGVNFDLPHVISEAPPFPGVRHVGGDMFASVPAGDAILMKWILHDWSDAHCATLLKNCYDALPENGKVIVVECVLPVNTEATPKAQGVFHVDMIMLAHNPGGKERYEREFRELAKGAGFSGFKATYIYANAWAIEFIK

SEQ ID NO: 228221 - protein, 204 aa, Zea Mays; identical to SEQ ID NO: 228220

SEQ ID NO: 228222 - protein, 167 aa, Zea Mays
MDLDQDVEAAERELEDHNERLDELALFGIGTATSSNVDPVDVDAAPVTASSSPTATGGSIARDNRPRKRLATSRVWADFEEVTGIDDKGCLRSDDDDLQQIWLRSYLVLRIGSWQISICRILWRRRPRNSNQPLRTCTLMLKIVQTRGRKTKMGKLVPQFRSWLDSS

SEQ ID NO: 228223 - protein, 567 aa, Zea Mays
MGASRKLQGEIDRVLKKVYDTENANQKEKFEADLKKEIKKLQRYRDQIKTWIQSSEIKDKKALMDARKQIEREMERFKVCEKETKTKAFSKEGLGQQPKTDPKEKAKAETRDWLNNVVSDLESQIDNFEAEIEGLSIKKGKQRPPRLVHLETSITRHKAHIKKLESILRLLDNDELSPEQVNDVKDFLDDYVERNQEDFDEFSDVEDLYSTLPMEKVEALEDMVSLAPSSLVKGVAPVSTTAVLSTKSSVATSPTQPTVSTASSQSTSQDQTEETASQESNPEPTPQTPPPKGGNPGPSVPAVPIVVSTGSAAVSVPAETISSPVRLTVPATAATVLSSAIPRSAPENTLAVTSIPANLSTTLKDDESMSVPPRRPSPATEIGIGRGITRGTTSQALGTAPITIGPVSGNGSVSALPAINDLSKINILNTDEKINSDGLSQQLVMPLGSKVQPQQVPRTNDAIGSDSANTNENPILGGRVFSPPVVSGVQWRPQAAAAFQNQIETNQYRGRPEISADHREKYIQRLQQVQQQGGSLLNVSHITGINQKQFPTPQPNPLLQQFKSSIS

SEQ ID NO: 228224 - protein, 426 aa, Zea Mays
MGASRKLQGEIDRVLKKVQEGVDVFDSIWNKVYDTENANQKEKFEADLKKEIKKLQRYRDQIKTWIQSSEIKDKKALMDARKQIEREMERFKVCEKETKTKAFSKEGLGQQPKTDPKEKAKAETRDWLNNVVSDLESQIDNFEAEIEGLSIKKGKQRPPRLVHLETSITRHKAHIKKLESILRLLDNDELSPEQVNDVKDFLDDYVERNQEDFDEFSDVEDLYSTLPMEKVEALEDMVSLAPSSLVKGVAPVSTTAVLSTKSSVATSPTQPTVSTASSQSTSQDQTEETASQESNPEPTPQTPPPKGGNPGPSVPAVPIVVSTGSAAVSVPAETISSPVRLTVPATAATVLSSAIPRSAPENTLAVTSIPANLSTTLKDDESMSVPPRRPSPATEIGIGRGITRGTTSQALGTAPITIGPVSGNGS

SEQ ID NO: 228225 - protein, 583 aa, Zea Mays
MGASRKLQGEIDRVLKKVQEGVDVFDSIWNKVYDTENANQKEKFEADLKKEIKKLQRYRDQIKTWIQSSEIKDKKVSASYEQALMDARKQIEREMERFKVCEKETKTKAFSKEGLGQQPKTDPKEKAKAETRDWLNNVVSDLESQIDNFEAEIEGLSIKKGKQRPPRLVHLETSITRHKAHIKKLESILRLLDNDELSPEQVNDVKDFLDDYVERNQEDFDEFSDVEDLYSTLPMEKVEALEDMVSLAPSSLVKGVAPVSTTAVLSTKSSVATSPTQPTVSTASSQSTSQDQTEETASQESNPEPTPQTPPPKGGNPGPSVPAVPIVVSTGSAAVSVPAETISSPVRLTVPATAATVLSSAIPRSAPENTLAVTSIPANLSTTLKDDESMSVPPRRPSPATEIGIGRGITRGTTSQALGTAPITIGPVSGNGSVSALPAINDLSKINILNTDEKINSDGLSQQLVMPLGSKVQPQQVPRTNDAIGSDSANTNENPILGGRVFSPPVVSGVQWRPQAAAAFQNQIETNQYRGRPEISADHREKYIQRLQQVQQQGGSLLNVSHITGINQKQFPTPQPNPLLQQL

SEQ ID NO: 228226 - protein, 123 aa, Zea Mays
MGASRKLQGEIDRVLKKVYDTENANQKEKFEADLKKEIKKLQRYRDQIKTWIQSSEIKDKKALMDARKQIEREMERFKVCEKETKTKAFSKEGLGQQPKTDPKEKAKAETRDWLNNVRRRSLI

SEQ ID NO: 228227 - protein, 206 aa, Zea Mays
MGRLDPELINLKAKLQDAKHGNGSLPDIESLQKSIEARTKQLLPLYTQIAVRFAELHDTSLRMAAKGVIKKVVDWEESRSFFYKRLRRRISEDLLAKEIRRIIGDNFTHQSAMELINEWYLASQATTGSTAGWDDDDAFVAWKDSPENYKGYIQELRAQKVSQSLSDLADSSSDLQAFSQGLSTLLDKMDPSQRVKFVQEVKKVLG

SEQ ID NO: 228228 - protein, 284 aa, Zea Mays
MEQFPDGAHVRLRSRVHAGYLHADEDGVGVSLRRWRRRSMNVAWKVHRILHDGSTSVLLHSAAYGRYLAASHDPAPPGHLGLRVDLGDYDQDVDPILWKAVGSGDAGYVLLRHVSNRLLRANGRYRLWHRGVSVDDVDNQSTMMHWKVETIPTSPRPPALPAPTRRNRGSFRGLFLLHEEPVVLQRTVRFVRADNYGNFPDNWGTLQFQGRSVFELRAEMARRLNYALFFFRLLMCVRGGRYGRLTPLLIDLPRNEETLDIIVLFIGTQVAQELRYPVVNPRGV

SEQ ID NO: 228229 - protein, 88 aa, Zea Mays
MWAALRALRTLRVGVGTFLPEPYRTVPNRNFGFFGSSVRFRFLYLKSSVFGIVIGFHRIPNRNKKTNYLTLSILNYLTLSILKFGYSI

SEQ ID NO: 228230 - protein, 881 aa, Zea Mays
MASRAPIPPAPPHLRLHAASLFSQRLPLPRARAPRCRGGRSRLLSALPSPPPSPASRSQGVSTAPIEREPPGLAPTPAPTPAQQPHQDPAIAAEVARLSAARERLRAAHTLHEKLRALDAEPRVAAFFGEESSRGVLGVLEPREVLLLKCLVAAGQEHVLGHELDWYGGDGGHHEHHHRNGVSGGSALRDALYSLAGLVGKWTSEGVVAAKERREEMEVLPRLLKFLDNVEEFYDCIGGIIGYQIMVLELLSASKDRMHRPSKDKFVDFHVPSGLNLLKDKEYASQAALWGIEGLPELGEIYPIGGAGDRLGLVDSDTGESLPAALLPYCGRSLLEGLIRDLQAREFLHFKIFGGQCITPVAIMTSSVKDNHEHIIAICERLDWFGRGRDNFRLFEQPLVPVVNAKDGKWLISKSLFPVGKPGGHGAIWKLAYDRGVLQWLQNCGRKGATVRQVSNVVAATDLTMMALAGIGLRCNKKLGFASCERRPGATEGVNVLIEKQNLEGLWSYGITCIEYTEFEKYGIPEPTLTNSSQVSFPANTNILYVDLQAVQEVGSRKNASCLPGMVLNLKKAVSYPNHLGFECSAAGGRLECTMQNIADDFMNTFNYRCSKGIESELNTFIVYNERKRVTSSAKRKLKSEDRSLHQLLCIPELCSTPEGSLLDIMRNAHDLLSSCGIDIPMVQDNSEYMHSGPPFLIFLHPALGPFWDIIRQKFVGGSVSKGSELQIEVAEFLWKDVELDGSFIILADNVMGSTKNSKNGEQILHYGSRCGRCRLQSVKIVNEGINWTSPNNVYWKHDVERSESVKIILHGNAEFEAKDVVLKGNHVFEVPDGHRMCIIQDRAGFVVKLDLIRDELMDSGTWHWKYAVDGVHVKLNMVEL

SEQ ID NO: 228231 - protein, 184 aa, Zea Mays
MQAVNKGLEKVEQELTTSENDGPVSEIFRKTLKDFLIGAEAEVRSLTSLYSNVGRNADALALYFGEDPARCPFEQVVTTLQNFVRLFTRSHEENCKQLDLEKKKALKEAEDNSKQLDLEKKKTQKEAETEKIKKKSDSEKACKKELENDKSSKKDSANEKGKLNNPIKELDISLQSPAQTASAK

SEQ ID NO: 228232 - protein, 1362 aa, Zea Mays
MFDSCFTTDVFDDDKYRDYIGDIVAQLQSHFADASFMVFNFRDGDSQSLLANILSSYDMVVMDYPRQYEGCPLLTIEMIHHYLRSGESWLSLGQQNVLIMHCERGGWAVLAFMLAGLLLYRKQFIGEQRTLEMIYRQAPHELVQLWSPLNPMPSQIRYLHYISRRNVSSEWPPQDRALTLDCVILRNIPGFNEEGGCRPIFRIYGQDPLPATNNTPKVLFATPKRSKYVRLYKKADCELIKIDIHCHIQGDVVLECISIDVDQEREEMMFRVMFNTAFIRSNILMLNRDEIDILWDAKDRFPKEFRAEVLLSEMDTANQLGPMEVAGIGEKGGLPVEAFAKVQEMFSNVDWLDPTGDAAVQLFQRLTSSENIQLRQGFLSPSKKEAESLELGSISPIDKHFDNVQQEPSKVEHPTVYVNKLENVGQERLVLLEQTTNSEVKTGISVVQENPGSLVHKVDSNAKQSISLEKAVPSTMKSIDPVLKDQNAKLDEQHGSGQHSFPTIIMSQRFPISSSCPALSGYSSPRLLSACPRFNSAPSALGITALLEDHAGSAENRCGSTTLTFDTTGTPVVTKGMPLLRPPPSPLDLLVSDSTMMSEAKGSSQPTLNNSGLPSHPERQLTFQSLGTTTPATNHQKSSTTVTIELLPTSAPPPPPLPPPSSVFSSRIYHLPPSPTSFRSPAPAAPQPPPVPPPPPPMPRPFPVRSHAPQPLTPQPPALSSSLILSGTPQSPPSPPPSRCSLSKPPAPPPPPPPPPLLASTSSTIRPAASHLPLFASTSSPVRPAAPPPPPAPTSSPIRASALPPPPPPGTSSSPRPPPPPCYSSKQSSSPMGKSMPSPPVPPPPSHGGRNGASGNIVPPPAPPGSNAKLFGPQGRGPAPPSGPMSKSFQSGQAVLRRSNLKPLHWVKVTRAMHGSLWAESQKPDETLKAPVFDMSELENLFSAALPSSDSRRSDKSGSRASGSKPEKIHLIDLRRANNCGIMLTKVKMPLPDLMSAILALDDTVLDADQVENLIKFTPTKDEIELLKGYKGDKQVLGECEQFFMELMKLPRVESKLRVFSFKIQFRSQVSDLKRNLNIVNSSAEEIRGSVKLKRIMQTILSLGNALNQGTARGSAVGFRLDSLLKLSDTRARNNKMTLMHYLSKVLSEKLPELLDFPKDLSSLELAAKIQLKSLAEEMQAVNKGLEKVEQELTTSENDGPVSEIFRKTLKDFLIGAEAEVRSLTSLYSNVGRNADALALYFGEDPARCPFEQVVTTLQNFVRLFTRSHEENCKQLDLEKKKALKEAEDNSKQLDLEKKKTQKEAETEKIKKKSDSEKACKKELENDKSSKKDSANEKGKLNNPIKELDISLQSPAQTASAK

SEQ ID NO: 228233 - protein, 849 aa, Zea Mays
MMFRVMFNTAFIRSNILMLNRDEIDILWDAKDRFPKEFRAEVLLSEMDTANQLGPMEVAGIGEKGGLPVEAFAKVQEMFSNVDWLDPTGDAAVQLFQRLTSSENIQLRQGFLSPSKKEAESLELGSISPIDKHFDNVQQEPSKVEHPTVYVNKLENVGQERLVLLEQTTNSEVKTGISVVQENPGSLVHKVDSNAKQSISLEKAVPSTMKSIDPVLKDQNAKLDEQHGSGQHSFPTIIMSQRFPISSSCPALSGYSSPRLLSACPRFNSAPSALGITALLEDHAGSAENRCGSTTLTFDTTGTPVVTKGMPLLRPPPSPLDLLVSDSTMMSEAKGSSQPTLNNSGLPSHPERQLTFQSLGTTTPATNHQKSSTTVTIELLPTSAPPPPPLPPPSSVFSSRIYHLPPSPTSFRSPAPAAPQPPPVPPPPPPMPRPFPVRSHAPQPLTPQPPALSSSLILSGTPQSPPSPPPSRCSLSKPPAPPPPPPPPPLLASTSSTIRPAASHLPLFASTSSPVRPAAPPPPPAPTSSPIRASALPPPPPPGTSSSPRPPPPPCYSSKQSSSPMGKSMPSPPVPPPPSHGGRNGASGNIVPPPAPPGSNAKLFGPQGRGPAPPSGPMSKSFQSGQAVLRRSNLKPLHWVKVTRAMHGSLWAESQKPDETLKAPVFDMSELENLFSAALPSSDSRRSDKSGSRASGSKPEKIHLIDLRRANNCGIMLTKVKMPLPDLMSAILALDDTVLDADQVENLIKFTPTKDEIELLKGYKGDKQVLGECEQFFMELMKLPRVESKLRVFSFKIQFRSQVSDLKRNLNIVNSSAEEIRGSVKLKRIMQTILSLGNALNQGTARGAF
